United States Patent Application Publication US 2017/0114356 A1 - sequence listing, part 2

SEQ ID NO: 1275 - DNA, 1166 bp, Zea Mays
gaagccttctcatttgctcccgctctggaggacgttcctgctcacgccgttcaagctcatcaccgtcttcctccacgagaccagccacgcgcttgcctgcaagctcacttgcggcgatgtagaaggcatgcaggtccatgcgaatgagggtggcgttactcaaacccggggtggcatatattggataatcttgcccgctggatatctgggttcatcattttggggaatggtcttcatacttgcatccacaaatctcctcactacaagaattgcagcgggttgtttcatacttgcattgtttattgttctttttgttgcagaaaatgtaagacttgtttgaattgtgcagtggtttcttcgctggctctgccttggtatgcatcaacatgacttagtctccatttaagcccttactctgcagcatgccagtacaccacttacgatgtcgttatccaggattcattgtgttcattgctgttgtttgggtcatacaagaatttacatctttccatgttctgaaatatgtgatcttattcataggtgtgatgaacagcttattttcagtttacgatatttatgatgacttgatatcccgaagagttaacacaagtgatgctgaaaagtttgctgaaatctgcccttgcccctgcaatggttttgcatggggtgttatatggggattcatctcgtttatctttctctgcgcttcaatataccttggactggtcatattgtcttgagggttcgccattttgatctgacaatcgactctggttggctttttcgaagcttcgttgctcgaggttttggttcaagcttacaaggttctggtggttgtacagtatacatgtgcagggtaaacatgtacatccattataagttaatttggtggggattattcatgggattcttcgattttagtggttctatagagtaccattttacttaccattaccagttgcatttatggtctgtagcctcttcaatttatgtacctgtatatcatatattgctcatttatccatttcaaaacgtattcagagatgcaatattgtgcatcttaatctggcgccgttttgccataacgattgacgggctgatgtgctaccagtagcaggagttagttagtgcccagtgcagtttatagtttatcctggtaatttgag

SEQ ID NO: 1276 - DNA, 3159 bp, Zea Mays
cctccatccatcacacacacatacacataatacactgcagagaggaccgcgacgcgagcccaccccaggccgacaccgagcgcgagccctccagtccgtggtgctcttcgcgctccgccttcctcctcttccaccccgtcgcttccgtgccatccgcggttcggctccccacctcccattctcgccgccccatgcctccggctcgcccgtagccgcccgacgacgaccgctatggccgccgattccggcaaagggatggctgacctggagatagggctggcgtcgccgggctcggagcgggcgccgtcgccggcgtcgagcgcgggcgcctacggggagcggcccgaccagtcgccgccgcgggttgccaagcgcccaggcctcgtcatgtccttctccgggaagcggctggaccagtcgccggccgggtcgccgtcgccgtcgccgtcgtcgtcgcgcccggtgctggtcatgtcccactccagcaaccgcctcgaccagtcgcccgcgcgcccggtgctcgtcatgtcccggtccagcaaccggctggaccagtcctcaccggcgtcgtcgccggcggccgtgaagggccccgcgctggtcatgtcaggctccagcaatcgtctcgacagctcgcacccgtcgccgtcgccgacggcagcggccgccgctgcgcccttgctggtgctctccaactccggcaagcggatggaccaggccgggcggaagaagtacgtcaagcaggtgacgggccgccacaacgacacggagctccacctcgccgcgcagcgcggggacctcgaggccgtacgccagatcatcgccgagattgacgcgcagatgaccggcaccggcgaggagttcgacagcgacgtcgccgagatccgcgccgcgatagtgaacgaagccaacgagatggaggcgaccgcgctgctcatcgccgcggagaaggggtttcttgacatcgtcgtcgagctgctcaagcactccgacaaggacagcctcaccaggaagaacaagtccggattcgatgctctgcacgtcgctgcaaaggagggccacagaggtgagcatcgtacatagtcattgaagtccatggcaccataaatcacttcctgcttccaagtccaactaaagatcaatctcttgtttctgtaagttgatcaatcttaatcaatccccatggctaatttattagtacgcttctcttactacttgtgactttgtgagccttctagtgtctggtgctgaaattcatatactactgatagtgtacactgaccgtgttgtctcatcactagctagtatcatgcctgcttccgttctctatacttcttttatatacacacaaaaaaaaactggactactgatatgtgttcatagatatcgtgaaggtacttctggaccatgatccatcccttgggaaaacgtttggccaatcgaatgtgactcctctcataactgcggcgatcagaggccacatcgaggtggtgaacctactgctggagcgagtttctgggttggtcgagttatcaaaagcgaacggaaagaatgccctgcacttcgctgcccggcaggggcatgtggaaatcgtggaggctttgctacatgccgatacccagcttgctcggaggactgacaagaaaggccagaccgctctacacatggcagtaaaaggaactagccctgaagtcgttcaagcgcttgtgaacgccgatccggccatagtcatgctgcctgacagaaacggcaacctagctttgcacgttgcaaccagaaagaaaagatcagagattgtaaatgtgcttctgctccttccggatatgaacgtgaatgcgttgaccagggatcggaagaccgcgttcgacatagccgagggccttcccctgtcagaggagtctcaagaaatcaaggagtgcctgtcccgtgccggtgcggtcagagcaaacgatctgaaccagcctcgggacgagctgaggaaaacagtgacagagataaagaaggacgtgcatacccagctggagcaggcgaggaaaaccaacaagaacgtgtacggcatcgccaaggagctgaggaagctccacagggaaggcatcaacaacgcgacgaactcggtgaccgtcgtggcggtgctgttcgcgacggtggcgttcgcggcgatcttcacggtgcccggcggcaacgccaacgacggcgtggcggtggccgtgcacgcgacggccttcaaggtgttcttcatcttcaacgccgtcgcgctgttcacgtcgctggcggtggtggtggtccagataacgctggtccggggcgagaccaaggcggagcggcgggtggtggagatcatcaacaagctcatgtggctggcgtcggtgtgcacgacggtcgcgttcatctcgtcgtcctacatcgtggtggggcgccacttcaggtgggcggcgctcctggtgaccctgatcggcggggtgatcatggccggcgtgctcggcaccatgacgtactacgtggtgaagtccaagcgcacgcgcaagatcaggaagaaggtgaagtcgacgaggaggagcggctccagctcgtggcagcacaactcggagttctcggactcggagatcgaccgtatctacgccatatgaagccggcgcagtgcagctggttcctccagacagacagacccttttggcagcggcacgaaaaggacaggacaccctggggctggactgcacttggaatttggacgcatgatggagacgggaaaatgaggaagaggcatctggccaagtagattagggagatgggagcttggcgtctggctgaaaaccccatgtgtggaacttgagagtcgtcaggggatctagaaggaaactgacaccagagaggaggtgtacgtacgcatgacaccaaagcgtgaaagccgtgtgagctgaaggcactgatggcagactcagctggcttgtctactctcagtcaacgtttattgtacatgattggtctattggaaggtttttgctatcaacataattaagcaggacaaaagcctcaggtcgaataagatgataggtaggtaaaacaccacgctgtgcctgtagcaggtggtggctgcaagtttgttaccgataatggtactctctacgtactctcgctttcgttccttcgcgactacgtaag

SEQ ID NO: 1277 - DNA, 1908 bp, Zea Mays
cctgcttccaagtccaactaaagatcaatctcttgtttctgtacttctggaccatgatccatcccttgggaaaacgtttggccaatcgaatgtgactcctctcataactgcggcgatcagaggccacatcgaggtggtgaacctactgctggagcgagtttctgggttggtcgagttatcaaaagcgaacggaaagaatgccctgcacttcgctgcccggcaggggcatgtggaaatcgtggaggctttgctacatgccgatacccagcttgctcggaggactgacaagaaaggccagaccgctctacacatggcagtaaaaggaactagccctgaagtcgttcaagcgcttgtgaacgccgatccggccatagtcatgctgcctgacagaaacggcaacctagctttgcacgttgcaaccagaaagaaaagatcagagattgtaaatgtgcttctgctccttccggatatgaacgtgaatgcgttgaccagggatcggaagaccgcgttcgacatagccgagggccttcccctgtcagaggagtctcaagaaatcaaggagtgcctgtcccgtgccggtgcggtcagagcaaacgatctgaaccagcctcgggacgagctgaggaaaacagtgacagagataaagaaggacgtgcatacccagctggagcaggcgaggaaaaccaacaagaacgtgtacggcatcgccaaggagctgaggaagctccacagggaaggcatcaacaacgcgacgaactcggtgaccgtcgtggcggtgctgttcgcgacggtggcgttcgcggcgatcttcacggtgcccggcggcaacgccaacgacggcgtggcggtggccgtgcacgcgacggccttcaaggtgttcttcatcttcaacgccgtcgcgctgttcacgtcgctggcggtggtggtggtccagataacgctggtccggggcgagaccaaggcggagcggcgggtggtggagatcatcaacaagctcatgtggctggcgtcggtgtgcacgacggtcgcgttcatctcgtcgtcctacatcgtggtggggcgccacttcaggtgggcggcgctcctggtgaccctgatcggcggggtgatcatggccggcgtgctcggcaccatgacgtactacgtggtgaagtccaagcgcacgcgcaagatcaggaagaaggtgaagtcgacgaggaggagcggctccagctcgtggcagcacaactcggagttctcggactcggagatcgaccgtatctacgccatatgaagccggcgcagtgcagctggttcctccagacagacagacccttttggcagcggcacgaaaagagacgcatccatggagaagagacagcacgtgagagcgagaggtgagaaaaaaattgccccttctgatattccgttgcttggtgctctctctctctctctgtaggacaggacaccctggggctggactgcacttggaatttggacgcatgatggagacgggaaaatgaggaagaggcatctggccaagtagattagggagatgggagcttggcgtctggctgaaaaccccatgtgtggaacttgagagtcgtcaggggatctagaaggaaactgacaccagagaggaggtgtacgtacgcatgacaccaaagcgtgaaagccgtgtgagctgaaggcactgatggcagactcagctggcttgtctactctcagtcaacgtttattgtacatgattggtctattggaaggtttttgctatcaacataattaagcaggacaaaagcctcaggtcgaataagatgataggtaggtaaaacaccacgctgtgcctgtagcaggtggtggctgcaagtttgttaccgataatggtactctctacgtactctcgctttcgttccttcgcgactacgtaag

SEQ ID NO: 1278 - DNA, 1919 bp, Zea Mays
cctgcttccaagtccaactaaagatcaatctcttgtttctatatcgtgaaggtacttctggaccatgatccatcccttgggaaaacgtttggccaatcgaatgtgactcctctcataactgcggcgatcagaggccacatcgaggtggtgaacctactgctggagcgagtttctgggttggtcgagttatcaaaagcgaacggaaagaatgccctgcacttcgctgcccggcaggggcatgtggaaatcgtggaggctttgctacatgccgatacccagcttgctcggaggactgacaagaaaggccagaccgctctacacatggcagtaaaaggaactagccctgaagtcgttcaagcgcttgtgaacgccgatccggccatagtcatgctgcctgacagaaacggcaacctagctttgcacgttgcaaccagaaagaaaagatcagagattgtaaatgtgcttctgctccttccggatatgaacgtgaatgcgttgaccagggatcggaagaccgcgttcgacatagccgagggccttcccctgtcagaggagtctcaagaaatcaaggagtgcctgtcccgtgccggtgcggtcagagcaaacgatctgaaccagcctcgggacgagctgaggaaaacagtgacagagataaagaaggacgtgcatacccagctggagcaggcgaggaaaaccaacaagaacgtgtacggcatcgccaaggagctgaggaagctccacagggaaggcatcaacaacgcgacgaactcggtgaccgtcgtggcggtgctgttcgcgacggtggcgttcgcggcgatcttcacggtgcccggcggcaacgccaacgacggcgtggcggtggccgtgcacgcgacggccttcaaggtgttcttcatcttcaacgccgtcgcgctgttcacgtcgctggcggtggtggtggtccagataacgctggtccggggcgagaccaaggcggagcggcgggtggtggagatcatcaacaagctcatgtggctggcgtcggtgtgcacgacggtcgcgttcatctcgtcgtcctacatcgtggtggggcgccacttcaggtgggcggcgctcctggtgaccctgatcggcggggtgatcatggccggcgtgctcggcaccatgacgtactacgtggtgaagtccaagcgcacgcgcaagatcaggaagaaggtgaagtcgacgaggaggagcggctccagctcgtggcagcacaactcggagttctcggactcggagatcgaccgtatctacgccatatgaagccggcgcagtgcagctggttcctccagacagacagacccttttggcagcggcacgaaaagagacgcatccatggagaagagacagcacgtgagagcgagaggtgagaaaaaaattgccccttctgatattccgttgcttggtgctctctctctctctctgtaggacaggacaccctggggctggactgcacttggaatttggacgcatgatggagacgggaaaatgaggaagaggcatctggccaagtagattagggagatgggagcttggcgtctggctgaaaaccccatgtgtggaacttgagagtcgtcaggggatctagaaggaaactgacaccagagaggaggtgtacgtacgcatgacaccaaagcgtgaaagccgtgtgagctgaaggcactgatggcagactcagctggcttgtctactctcagtcaacgtttattgtacatgattggtctattggaaggtttttgctatcaacataattaagcaggacaaaagcctcaggtcgaataagatgataggtaggtaaaacaccacgctgtgcctgtagcaggtggtggctgcaagtttgttaccgataatggtactctctacgtactctcgctttcgttccttcgcgactacgtaag

SEQ ID NO: 1279 - DNA, 2321 bp, Zea Mays
caacttgcgatttatttagcggcggcgatcggccagcccggccccttgtcttcttcctcgcatcatccgcctctgccccctgcggattagtaggggccccatgcctcacatgcacgccgggagcgcgctggaggatgcgccgcagagctcgtcacgccgggctacactgatttgggagaaaccaaaagcaaaaaaaattactccatgtagtagccattgctgcgacgccgtgcccccgagtttgatttgatggaagcgaagacgaaccaaaccagcggcgaggacaggccgcagccggcgatggactcgccgagggcggcgcaggcggcgacgcgccgcaagaagatgacgaagcagctgacggggaagcgcgacgacacggcgatgcacgcggcggcgcgcgccgggcagctcgagtccatgcggcagatgatgtccggcaaggacgccgaggagctcggggcgctgctgtccaggcagaaccaggccggggagacgccgctgttcgtggccgccgagtacgggtacgtggccctggtggccgagatgatcaagtaccacgacgtcgccaccgccggcatcaaggcccgcagcggctacgacgcgctccacatcgccgccaagcaaggggatgtagacgtcgtgagggagctgctgcgggcgctgccgcagctgtcgatgacggtggactcctccaacacgacggcgctgaacacggcggcgacgcaggggcacatggacgtggtgaggctcctgctggaggtggacgggagcctggcgctgatcgcgcgcagcaacggcaagacggcgctgcactcggcggcgcggaacggccacgtggaggtggtgcgcgcgctgctggaggcggagcccagcatcgcgctgcgcacggacaagaagggccagaccgcgctgcacatggccgccaagggcaccaggctggacctcgtcgacgcgctcctggccgccgagccggcgctgctcaaccagacggacagcaagggcaacaccgcgctgcacatcgcggcgcgcaaggcgcggcacgagatcatcaggcggctggtcacgatgcccgacacggacgtcagggcgatcaaccggtcccgcgagaccccgctggacacggcggagaagatgggcaacacggacgcggcggaactcctggctgagcacggcgtgcagtcggcgcgcgccattagcccctgcggcggcggcggcggcggcaacaagcaggcgcgcgagctgaagcagcaggtgagcgacatcaagcacgaggtgcactcgcagctggagcagacgcggcagacgcgcgtgcgcatgcagggcatcgccaagcgcatcaacaagctgcacgaggaagggctcaacaacgccatcaactccacgacggtggtggccgtgctgatcgccacggtggcgttcgccgccatcttcacggtgcccggggagtacgtgcaggacccgggcagcctggcgcccgggcacgatctgggcgaggccaacatctcccaccagacggccttcatcatcttcttcgtcttcgactcggtgtcgctcttcatctcgctggccgtggtggtggtgcagacgtcggtcgtggtcatcgagcgcaaggccaagaagcagatgatggcggtgatcaacaagctcatgtgggtggcctgcgtgctcatcagcgtatccttcctggcgctctcgttcgtcgttgtgggccgcaccgagcgctggctggccgtgtccgtcaccatcatgggcgccaccatcctggtcaccaccatcggcaccatgctctactgggtgatcgcgcaccgcatcgaggccaagcggattcgcacaatcaagcgcaacacgctcacccactcccgctccttctcctgctccggcatgtcggagggcgagtgggtcgacgaggatttcaagaggatgtacgcaatctgacgacccacgctacctgcatgtgtttgagatcatctcgtgcaatggccatcgcgttattgtcaacttgccgtgcttcggaccgggctaacattcttcttccgtcactccttagtggcgattgaagtattgtccaaccgaataaacctacctgtgcgccgcctgcgagagagaagtaataagttttgtcttcatagaaaacgaaacaaaagaaaagtgagttttgtcttaatagaaaatgaaaagctagacttactaaaaactcctgcactccgtattacttttagcttgtcgatcaagccgtgcttccgcaacgtctagagtcttaaaaactatttaaaaaatacaagtactcaatcttttcataaatatatgacaccatttaa

SEQ ID NO: 1280 - DNA, 2158 bp, Zea Mays
ggctacactgatttgggagaaaccaaaagcaaaaaaaattactccatgtagtagccattgctgcgacgccgtgcccccgagtttgatttgatggaagcgaagacgaaccaaaccagcggcgaggacaggccgcagccggcgatggactcgccgagggcggcgcaggcggcgacgcgccgcaagaagatgacgaagcagctgacggggaagcgcgacgacacggcgatgcacgcggcggcgcgcgccgggcagctcgagtccatgcggcagatgatgtccggcaaggacgccgaggagctcggggcgctgctgtccaggcagaaccaggccggggagacgccgctgttcgtggccgccgagtacgggtacgtggccctggtggccgagatgatcaagtaccacgacgtcgccaccgccggcatcaaggcccgcagcggctacgacgcgctccacatcgccgccaagcaaggggatacgtcgtgagggagctgctgcgggcgctgccgcagctgtcgatgacggtggactcctccaacacgacggcgctgaacacggcggcgacgcaggggcacatggacgtggtgaggctcctgctggaggtggacgggagcctggcgctgatcgcgcgcagcaacggcaagacggcgctgcactcggcggcgcggaacggccacgtggaggtggtgcgcgcgctgctggaggcggagcccagcatcgcgctgcgcacggacaagaagggccagaccgcgctgcacatggccgccaagggcaccaggctggacctcgtcgacgcgctcctggccgccgagccggcgctgctcaaccagacggacagcaagggcaacaccgcgctgcacatcgcggcgcgcaaggcgcggcacgagatcatcaggcggctggtcacgatgcccgacacggacgtcagggcgatcaaccggtcccgcgagaccccgctggacacggcggagaagatgggcaacacggacgcggcggaactcctggctgagcacggcgtgcagtcggcgcgcgccattagcccctgcggcggcggcggcggcggcaacaagcaggcgcgcgagctgaagcagcaggtgagcgacatcaagcacgaggtgcactcgcagctggagcagacgcggcagacgcgcgtgcgcatgcagggcatcgccaagcgcatcaacaagctgcacgaggaagggctcaacaacgccatcaactccacgacggtggtggccgtgctgatcgccacggtggcgttcgccgccatcttcacggtgcccggggagtacgtgcaggacccgggcagcctggcgcccgggcacgatctgggcgaggccaacatctcccaccagacggccttcatcatcttcttcgtcttcgactcggtgtcgctcttcatctcgctggccgtggtggtggtgcagacgtcggtcgtggtcatcgagcgcaaggccaagaagcagatgatggcggtgatcaacaagctcatgtgggtggcctgcgtgctcatcagcgtatccttcctggcgctctcgttcgtcgttgtgggccgcaccgagcgctggctggccgtgtccgtcaccatcatgggcgccaccatcctggtcaccaccatcggcaccatgctctactgggtgatcgcgcaccgcatcgaggccaagcggattcgcacaatcaagcgcaacacgctcacccactcccgctccttctcctgctccggcatgtcggagggcgagtgggtcgacgaggatttcaagaggatgtacgcaatctgacgacccacgctacctgcatgtgtttgagatcatctcgtgcaatggccatcgcgttattgtcaacttgccgtgcttcggaccgggctaacattcttcttccgtcactccttagtggcgattgaagtattgtccaaccgaataaacctacctgtgcgccgcctgcgagagagaagtaataagttttgtcttcatagaaaacgaaacaaaagaaaagtgagttttgtcttaatagaaaatgaaaagctagacttactaaaaactcctgcactccgtattacttttagcttgtcgatcaagccgtgcttccgcaacgtctagagtcttaaaaactatttaaaaaatacaagtactcaatcttttcataaatatatgacaccatttaa

SEQ ID NO: 1281 - DNA, 2403 bp, Zea Mays
attttctttaatgtacatctgcctagaaatatctcttcctctgaatatcccatgtaattggtcgttatcccctgccgtcgttcatctggccttatctcactgccgccccaggactcggcctcatcttctccagatcgtcgtgctcgtctccaactccggcgtcctgattttttttatcaccgctcaagggtcatcgtctttatctccctagcgcgtctcctatttttcctgctgcgtgctctctctgccgagcgtggtctctgcagcttgctgctccagcccatccccttcctggcgctcgccctcgctccctgctggccagtgcccagctccctccatctctcctgcgtacgcctttctctgtttgctgctcgccccagctcctagctatggcgtctggccgagagagcctctctcatctcctccctgcttcctctgccgaccgaaactccctactcgaaatttcgctcacagagctcccttcccccagcgtcgcttgccgtcctggtgcaagctcctgctgcagcgcccaactggcttcctgcatcgcgcttggtcctgcccatctcgccgtgcgcggatctcgtccatgtcgccgctgtcgagttccctgcatcgctccggggattttgtcgcggcatccctttccatagcttgcccctgcgtctcctcgtcgtagagctcccaagccgccgccgtcgaagctcctctgcgcgctttgctttttgtgcgcgcatgctcgccgtctctattcgggccatccgcacaattttctctgctctcttgccgtggtcgacgcgtgcctgcgtgcagcttgccaagttcggcctcgacaaaaactctggacgctcggaccccgcctcgaccaagtcttctattcctgtcgtcgtaaattgttatcgttcgccttcgcgccgtgcagcagcacgtcccttatcgtgctcatggttaatactgtcattcctgctgtccctcacttccattgtgttcgattaaatatcggaccaagaatccacgatgtcgctcatcctcgcgaaatcctcacgctcaccatcccctattcgatctcgtcgtcaagcttcgccatcagccttagctcgtcagtcacgttcgccagatattcgatcgaggatttaagctgaaggctgtcgtcgttcaggcaaaactaccaaatcgagttgtgatgtggtgagccgattcactatttttactatcggttttatgatttacaaaaatgcttagctctgctcagatcttttggatataggttgtcttttgcattaaggcctagctcaggggttatcctgaggaaatatggcttctacctgcaagaatattttcattgagagcgtggtgggatcttactgcaaagtttcctattatgctcttttcatcctaaggaacacaaaacaatcctaaggatgaaagtatttaactcgcgacttgggctaggaacaggtgatgtgatgctccgcccgggtcaattaaggattggatgcgtatgtaggcctgtatgatcaaggactatcttaactggccacatgccctggaaatgagacagggtaagcttgaacctggctattccatacgtgaaaagacaaccgcgcactgggcgtgggagatggtgggagtagcgtgtgccctcctggctagaggctggatggaggagtactgtgctcccgggtagcgcggaccggttcatgttgtggaggatatgtgggaacggttgacatatgcaagggttaagtgctacatatgtcgtgtggttagagatcctcagctgagtaaatcgattcggatcgtcgttatatccccggagagtggagacttgatcactgacctgcaacctaagtcaggatgtgaacctcatgaataaaaatgatgttgtattgatgagatggtgaaattagaccagatgcaaacagaggctattaatatttaatctggcgttaaaatattgaaagtaaggactcactttagtaagctatttctgcaaaagtatctaagttgattctgtctaaagcctctccttgattcccaaatccagcatacccttgagagtcttttgtttagtcgggtaagtcttgctgagtaattccatactcagggttttattccctgttgtttttcaggttttaactttgtgctgctgttgatggtgttaagtgccggtgggctcggccttcttaaaagtctatgtaactcttctatacttcttattgaggatgatcacttgagctagcatatatttcaaacttatacttttctaatcactccgataaaataatgtaaattttttgtaatctgtaaaatttggtaataagatttccgctgcaaaaatgttggtgtgtgtgatttgtgttacttaatcttgcggtcctggttgtaagtggtttatctgat

SEQ ID NO: 1282 - DNA, 2933 bp, Zea Mays
gccacgtccatggctcgcgccgtcctcgacacgctcctgcgggtcgccgtcgtgctgctgctgctgcccgcgctggtggccgccgcgttcaccccggcggacgactacctcgtgctctgcggcacggcggcgaacgccaccgtcgacggcaggacgttcctcggggacgacggcctccccgcggcggccgtgctgccggcgccccggggctccgaggccagcgcgtcggcggccagcggctccgacgacgcggcgctgtaccggtccgcgcgcgtcttcgcggcgccgtcctcgtacacgttcgcgatcaagagtcccgggcgccacttcgtgcgcctccacttcttccccttccggtacgggtccggcgacctcgccgcggacgccgagttcagcgtgtccgcgcagggcctgctgctcatcgacgggtacgcgcccgccaacggcacgcccgcggtccgggagttctccgtcaacgtcgccggcggcacgctggcggtcgcgttcgcgccggcggcggcggggaaggtggcgttcgtcaacgccatcgaggtcgtgtcgcaccccgacgacctgttcgcggacacggcgcagacggtgagccccatgggccgctacgcggggctgtccacgcaggcgctcgagacggttaacagggtcaacatgggctctcccaagatcacgcccaggaacgacacgctgggaaggacgtggcttcccgacgaagccttcctggtcgacagttcggtcacggtgcacagggatgtggcgccgtcgaagctccggtggacgccaggcttggcgacgcccgagacggcgccaggcatggtctacgctacagcgacggagatcaacaccaacctggtgtccgccagcaccataagcgtgcagtttaacatgacgtggaagctccaggccgcgccggggtcggcgtacctgctccggctacacttctgcgacatcgtcagcaaggcggcgaacgggttggtcttcaacgtctacgtaggcgggtggaatgtgctgccggactacgagatctccagagacactttcagcgtcccggccgtgccgttatacaaggacttcgtgctcagcgccaaggacgccaagggcaacatcaccgtgagcatcgggacgtccacgctgggcaacgcgtacccagacggcgtcctcaacggcctcgagatcatgagaatggtcgggagcaccggcggcggcgcggactcgtcgcagagcggttcaaagaagaagaccgtcaccgcaatcatcgctggttcggccatcgcgggggtcatcaccgtggtgatggctgtcgcgctcattgtcctcatgttgcgacgacgaaggaagaagccagagaagaagccgtcgagcacctgggtcgcgttctcggagagcgcgctgggatcccggtcgcactcgcgcagcttcggcaagagcagcagcgcaggcgccaggaacaacacggtcacgctcgggcagagcgccggtgccgggtaccggatccccctcgcggcgctgcaggaggcgacgtgcgggttcgacgagggcatggtgatcggcgtgggcgggttcgggaaggtgtacaagggcacgctgagggacgagacgcaggtggccgtgaagcgcggcaaccggcggtcgcagcaggggctgaacgagttccgcacggagatcgagctgctctcccggctgcggcaccgccacctggtgtcgctcatcggctactgcgacgagcgcggcgagatgatcctggtgtacgagtacatggccaggggcacgctccggagccacctctacgactccgagctgcctcccctctcgtggaagcagaggctcgacgtgtgcatcggcgccgccaggggcctgcactacctccacaccggctcggccaaggcgatcatccaccgtgacgtcaagtccgccaacatcctcctcgacgacagcttcatggccaaggtcgccgactttgggctgtccaagaccgggccggagctggacaagacgcacgtcagcaccgccgtcaagggcagcttcgggtacctcgacccggagtacttccggcggcagatgctgacgaacaagtccgacgtctactccttcggcgtcgtcctgctggaggtgctctgcgcccgtccagtcatcgacccgacgctgccccgggagatggtcaacctggcagagtgggccacgcagcggctcaaaaacggcgagctcgacagcatcgtcgaccagcggatcgctgggtcgatacggccggagtcgctcaagaagttcgtcgacaccgcggagaagtgcctcgcggagtacggcgtggagcggcccgcaataggggacgtgctctggtgcctcgagttcgcgctgcagttgcaggaggcgtcgccggacagctctggcacagacaacacgcagctagttcacaggagtacgtccaaattccatcgcaaccagtctaccgtcagcgacgggacagaggccaccgtggcagcgaacttgggggacctcgatggtatgtccatgaggagagttttttcaaagatggtcaacagcgaggagggcaggtgaagctaaaataatgttgcatcctccgtgtacagcagtatatgatcaatagccatgctgcggatttcatctgcacaagaggaatctcacaagcaaacataactgaacatacgactctaacaaatatattactgagcagtgagcaacatgtcagaagattcgcaacagaacagtagtagcatatatagcgcaccatcatagctaaaaagcgtcagatagccattgctgtatctccagcatgttcacagcaccagcatttgttacaacgaaaagaatgcagtgtgttcaatgcgatctgattatgagtcctatagaatatccttgcctgtcctggactgtcatattcccagtctaaaaagactcagaaagga

SEQ ID NO: 1283 - DNA, 3620 bp, Zea Mays
ctctggtcccactggccacagaaacatcccttcctcaccgaaccacctgacgagctaggaccaaagcttgggagctgggacctgacacagccacaccggaatagcacgcacgatcggtcaaaaccaggcgattactttccagagtccagacccattcaaagctctccgccgtcctccttgctcctactcgggctacgacgctgcgccggtaggcacgaggcgttcgacgagtctctgcgctccgaccggccaccacggcgcgtgccgggagccgcgcggcggcggccatgggcgccgcggccttggacttcgagtacaagagggacgcttatggtttcgcggtgcggccacagcatctgcagcgtttccgcgagtacgccaagatttacaaggaagaggaggaggagagggcgcacagatggagagacttcttggacaggttggctgatgcagcgaatgtgcccactacacccagcgtttcaccatatgcatctaccggggatcctgcgtcaggtgcaggacaggcacaagagaatagcggcatcggaatacattgtgatgatgaagaggagggatctgagaatgcagaacataacaacaacttggaaagcccaaaggaatccgatgccagtgctgaatcacgagaagcaaatggtaaatcagaagatctgaaagatgtaactaacttggacaaactgcaagagaagactggtagcagcagctctacagaagcaatcaaagccttagagggcttgatggaaacaaatggggactttgaagaactaaaagatttgaatggaagctcagaagaattggaagaagagaataatggcaacatggaaaagctggtagagctcttcttggataaggggttgttggatgaactgaagcccataaaagttgagtcccagcggcgggtacgtgcagcacttagcatcattgacaaaatgatgagctctcgggtagtgaagggtggtaatggtgcaaatggtattcatggaaacgatggagcacagcttacttctattgaagaggaaggaaggactgcagaagcgagtgatgacggagatccagctgaggttgagtcttgtgttgcagagaaggtggaacttggacaggagacaactcatgattctacaggtactgctttggatggaggcaatgatgggtcctattttccttggagggaggagcttgagagcttggttcgtggaggtgtaccaatggctcttagaggagagatatggcaagcatttgtgggtgttggtgctcgaaggattcctgggtactacaacaaattgcttgatgacaggactgagacattggatgaaaaggatcttgtggacccagtggtcaacgaacagggaagtgcacccagaaaagttacccagcctgagaaatggaaaggacagatagagaaggatttgccacgaacatttccaggacaccctgcattagatgaggatgggaggaatgctttgaggcggttgttaaccgcatatgcaaggcataatccatcagttgggtactgccaggccatgaacttttttgctgggctatttttgttattcatgcctgaagaaaatgcattttgggccttagtaggggttattgatgattattttgatggatactacactgaagaaatgattgaatctcaggttgaccaactcgtccttgaggaggttgtacgagaaaggttccctaaattggccaaacatatggaattcttgggagttcaagtgggatggataactggaccatggtttctttcaattttcatcaatatgcttccatgggaaagtgtacttcgcatttgggatgtcatcctttttgaaggaaatcgcataatgttgttcaggacgacacttgctttgctggatttatatgggcctgcactagtgaccacaaaagatgccggagatgcaattacactactgcagtctcttgctggatctacatttgacagcagccagcttgtattgacagcttgtatgggttttcaatcagttagagaaatgggattgcaagagttaaggaaaaagtacaggcctgaaattttaactgcaatggaggaaagatcgaaagaccgtggctcctggaaagataagaaggggttagcaaccaaactttatagctttaaacatgatccttcatatgtgtgctcaccagttaagtccaaggaagggctagatggttcaaaggtgaatggagagactgggccagcaaatcttgagacctaccttagtactagttctatactggataatgatttggatcagggtgttgatcttcaagatcaggtgtcatggctaaaggttgaactatgcaagctgctcgaggagaaaagatcagctgatctcaggagtgaggaattggaaactgctttgatggagatggtcgagcatgacaacagacgtatgttgagtgcaaaggttgagaagcttgaaacagaggcatatgaactgcgcaaagctttttcagacaagcaagagcaagagcaagtaatgcttcagatcttgttaagaatggagcaagaacagaaagtggcagaagatgcccgcatagccgctgagcgagatgctgctgaacaaaaacacgctgctcacttgctccaggagaagtatgaagcagcaatgacagcactttcacaaatggagaagagagctgtaatggcagaaacaatgctggaagctacaaagcaataccaggttgggcaggttaaagccaaccaatctttcacttcaagttcacctcgtgcagaccatgttcctgcgaagataaatcaagaaccaaaccaaactgcacctatcaggagaatcggcctgctttctaggggacttggatggcttgacaagggcaagggaaggcagaattccaatgaaacatctggagcctaaactcatctaaagtccaggatgaagtcatagctcccaacaagatctggattgttcattaacgcttggattgcttgatcaccgtaagagtgttgaaatcagcatcgatacatgttttctcgggaagattcagctggtatattccatgaagttttgcaggaagtgtatcttgtatcatattgagttcaattgtcagataaagttttgttggtaggtcagaaaggcttctgcaagtcatcggtgtaaattttcttttattagttccattaagattgtcaatagttagtgttccaaataggagaaagaaaagaacgacttactacacacaagaaaaatttctgttagattagttacagtatcatggagttgttctggagaagagcatgttttttttatctcttcagaaatgtcaaaaccaccgaagagattctctctctgtatttttgtctgatacgtgtggctcatacattcttcagtcacagttgacatgtttgatgtaaggcaattattgtcacgaggattctgattacgaatacaacagcagaaactccactatagggaggcgttttggaaagttaattgttgtcagttcctcacaatgttattcaaaaataattttggtaaaagcatgctgtgttcctagttccccctcttgacctgtgcaggctcatgctgcacgcccgtaaacaccttccacctgattggatgcctgagcacgccaag

SEQ ID NO: 1284 - DNA, 3484 bp, Zea Mays
ccaattagtttccaggtcaaaaccaggcgattactttccagagtccagacccattcaaagctctccgccgtcctccttgctcctactcgggctacgacgctgcgccggtaggcacgaggcgttcgacgagtctctgcgctccgaccggccaccacggcgcgtgccgggagccgcgcggcggcggccatgggcgccgcggccttggacttcgagtacaagagggacgcttatggtttcgcggtgcggccacagcatctgcagcgtttccgcgagtacgccaagatttacaaggaagaggaggaggagagggcgcacagatggagagacttcttggacaggttggctgatgcagcgaatgtgcccactacacccagcgtttcaccatatgcatctaccggggatcctgcgtcaggtgcaggacaggcacaagagaatagcggcatcggaatacattgtgatgatgaagaggagggatctgagaatgcagaacataacaacaacttggaaagcccaaaggaatccgatgccagtgctgaatcacgagaagcaaatggtaaatcagaagatctgaaagatgtaactaacttggacaaactgcaagagaagactggtagcagcagctctacagaagcaatcaaagccttagagggcttgatggaaacaaatggggactttgaagaactaaaagatttgaatggaagctcagaagaattggaagaagagaataatggcaacatggaaaagctggtagagctcttcttggataaggggttgttggatgaactgaagcccataaaagttgagtcccagcggcgggtacgtgcagcacttagcatcattgacaaaatgatgagctctcgggtagtgaagggtggtaatggtgcaaatggtattcatggaaacgatggagcacagcttacttctattgaagaggaaggaaggactgcagaagcgagtgatgacggagatccagctgaggttgagtcttgtgttgcagagaaggtggaacttggacaggagacaactcatgattctacaggtactgctttggatggaggcaatgatgggtcctattttccttggagggaggagcttgagagcttggttcgtggaggtgtaccaatggctcttagaggagagatatggcaagcatttgtgggtgttggtgctcgaaggattcctgggtactacaacaaattgcttgatgacaggactgagacattggatgaaaaggatcttgtggacccagtggtcaacgaacagggaagtgcacccagaaaagttacccagcctgagaaatggaaaggacagatagagaaggatttgccacgaacatttccaggacaccctgcattagatgaggatgggaggaatgctttgaggcggttgttaaccgcatatgcaaggcataatccatcagttgggtactgccaggccatgaacttttttgctgggctatttttgttattcatgcctgaagaaaatgcattttgggccttagtaggggttattgatgattattttgatggatactacactgaagaaatgattgaatctcaggttgaccaactcgtccttgaggaggttgtacgagaaaggttccctaaattggccaaacatatggaattcttgggagttcaagtgggatggataactggaccatggtttctttcaattttcatcaatatgcttccatgggaaagtgtacttcgcatttgggatgtcatcctttttgaaggaaatcgcataatgttgttcaggacgacacttgctttgctggatttatatgggcctgcactagtgaccacaaaagatgccggagatgcaattacactactgcagtctcttgctggatctacatttgacagcagccagcttgtattgacagcttgtatgggttttcaatcagttagagaaatgggattgcaagagttaaggaaaaagtacaggcctgaaattttaactgcaatggaggaaagatcgaaagaccgtggctcctggaaagataagaaggggttagcaaccaaactttatagctttaaacatgatccttcatatgtgtgctcaccagttaagtccaaggaagggctagatggttcaaaggtgaatggagagactgggccagcaaatcttgagacctaccttagtactagttctatactggataatgatttggatcagggtgttgatcttcaagatcaggtgtcatggctaaaggttgaactatgcaagctgctcgaggagaaaagatcagctgatctcaggagtgaggaattggaaactgctttgatggagatggtcgagcatgacaacagacgtatgttgagtgcaaaggttgagaagcttgaaacagaggcatatgaactgcgcaaagctttttcagacaagcaagagcaagagcaagtaatgcttcagatcttgttaagaatggagcaagaacagaaagtggcagaagatgcccgcatagccgctgagcgagatgctgctgaacaaaaacacgctgctcacttgctccaggagaagtatgaagcagcaatgacagcactttcacaaatggagaagagagctgtaatggcagaaacaatgctggaagctacaaagcaataccagttcacctcgtgcagaccatgttcctgcgaagataaatcaagaaccaaaccaaactgcacctatcaggagaatcggcctgctttctaggggacttggatggcttgacaagggcaagcagggaaggcagaattccaatgaaacatctggagcctaaactcatctaaagtccaggatgaagtcatagctcccaacaagatctggattgttcattaacgcttggattgcttgatcaccgtaagagtgttgaaatcagcatcgatacatgttttctcgggaagattcagctggtatattccatgaagttttgcaggaagtgtatcttgtatcatattgagttcaattgtcagataaagttttgttggtaggtcagaaaggcttctgcaagtcatcggtgtaaattttcttttattagttccattaagattgtcaatagttagtgttccaaataggagaaagaaaagaacgacttactacacacaagaaaaatttctgttagattagttacagtatcatggagttgttctggagaagagcatgttttttttatctcttcagaaatgtcaaaaccaccgaagagattctctctctgtatttttgtctgatacgtgtggctcatacattcttcagtcacagttgacatgtttgatgtaaggcaattattgtcacgaggattctgattacgaatacaacagcagaaactccactatagggaggcgttttggaaagttaattgttgtcagttcctcacaatgttattcaaaaataattttggtaaaagcatgctgtgttcctagttccccctcttgacctgtgcaggctcatgctgcacgcccgtaaacaccttccacctgattggatgcctgagcacgccaag

SEQ ID NO: 1285 - DNA, 3934 bp, Zea Mays
ccaattagtttccaggtcaaaaccaggcgattactttccagagtccagacccattcaaagctctccgccgtcctccttgctcctactcgggctacgacgctgcgccggtaggcacgaggcgttcgacgagtctctgcgctccgaccggccaccacggcgcgtgccgggagccgcgcggcggcggccatgggcgccgcggccttggacttcgagtacaagagggacgcttatggtttcgcggtgcggccacagcatctgcagcgtttccgcgagtacgccaagatttacaaggaagaggaggaggagagggcgcacagatggagagacttcttggacaggttggctgatgcagcgaatgtgcccactacacccagcgtttcaccatatgcatctaccggggatcctgcgtcaggtgcaggacaggcacaagagaatagcggcatcggaatacattgtgatgatgaagaggagggatctgagaatgcagaacataacaacaacttggaaagcccaaaggaatccgatgccagtgctgaatcacgagaagcaaatggtaaatcagaagatctgaaagatgtaactaacttggacaaactgcaagagaagactggtagcagcagctctacagaagcaatcaaagccttagagggcttgatggaaacaaatggggactttgaagaactaaaagatttgaatggaagctcagaagaattggaagaagagaataatggcaacatggaaaagctggtagagctcttcttggataaggggttgttggatgaactgaagcccataaaagttgagtcccagcggcgggtacgtgcagcacttagcatcattgacaaaatgatgagctctcgggtagtgaagggtggtaatggtgcaaatggtattcatggaaacgatggagcacagcttacttctattgaagaggaaggaaggactgcagaagcgagtgatgacggagatccagctgaggttgagtcttgtgttgcagagaaggtggaacttggacaggagacaactcatgattctacaggtactgctttggatggaggcaatgatgggtcctattttccttggagggaggagcttgagagcttggttcgtggaggtgtaccaatggctcttagaggagagatatggcaagcatttgtgggtgttggtgctcgaaggattcctgggtactacaacaaattgcttgatgacaggactgagacattggatgaaaaggatcttgtggacccagtggtcaacgaacagggaagtgcacccagaaaagttacccagcctgagaaatggaaaggacagatagagaaggatttgccacgaacatttccaggacaccctgcattagatgaggatgggaggaatgctttgaggcggttgttaaccgcatatgcaaggcataatccatcagttgggtactgccaggccatgaacttttttgctgggctatttttgttattcatgcctgaagaaaatgcattttgggccttagtaggggttattgatgattattttgatggatactacactgaagaaatgattgaatctcaggttgaccaactcgtccttgaggaggttgtacgagaaaggttccctaaattggccaaacatatggaattcttgggagttcaagtgggatggataactggaccatggtttctttcaattttcatcaatatgcttccatgggaaagtggtcagtacttcgcatttgggatgtcatcctttttgaaggaaatcgcataatgttgttcaggacgacacttgctttgctggatttatatgggcctgcactagtgaccacaaaagatgccggagatgcaattacactactgcagtctcttgctggatctacatttgacagcagccagcttgtattgacagcttgtatgggttttcaatcagttagagaaatgggattgcaagagttaaggaaaaagtacaggcctgaaattttaactgcaatggaggaaagatcgaaagaccgtggctcctggaaagataagaaggggttagcaaccaaactttatagctttaaacatgatccttcatatgtgtgctcaccagttaagtccaaggaagggctagatggttcaaaggtgaatggagagactgggccagcaaatcttgagacctaccttagtactagttctatactggataatgatttggatcagggtgttgatcttcaagatcaggtgtcatggctaaaggttgaactatgcaagctgctcgaggagaaaagatcagctgatctcaggagtgaggaattggaaactgctttgatggagatggtcgagcatgacaacagacgtatgttgagtgcaaaggttgagaagcttgaaacagaggcatatgaactgcgcaaagctttttcagacaagcaagagcaagagcaagtaatgcttcagatcttgttaagaatggagcaagaacagaaagtggcagaagatgcccgcatagccgctgagcgagatgctgctgaacaaaaacacgctgctcacttgctccaggagaagtatgaagcagcaatgacagcactttcacaaatggagaagagagctgtaatggcagaaacaatgctggaagctacaaagcaataccaggttgggcaggttaaagccaaccaatctttcacttcaagttcacctcgtgcagaccatgttcctgcgaagataaatcaagaaccaaaccaaactgcacctatcaggagaatcggcctgctttctaggggacttggatggcttgacaagggcaaggccctacgcccctacatgccattatcagagaccttgtttcttactagctttaattttacttctaaaatatctgatgtgcttggacataatgtgtgatgtgtccctgctcaaccatgatatctttttatagaatattatgctgttcatctttataccacgtttgcatggacatcatatatatgtatatacatatatgtatgtatatatacgtacgtatatatacgtatatttacgcatatatatatatatatatatatagacacacacacacacacacacacatatacatatatatacacacacagacgtatatacgtatgcatatatataaagaatggcctcattgatctagaaaggttttataaagttgaggtgcagtgggttcactatacttgaattgcttttagcagggaaggcagaattccaatgaaacatctggagcctaaactcatctaaagtccaggatgaagtcatagctcccaacaagatctggattgttcattaacgcttggattgcttgatcaccgtaagagtgttgaaatcagcatcgatacatgttttctcgggaagattcagctggtatattccatgaagttttgcaggaagtgtatcttgtatcatattgagttcaattgtcagataaagttttgttggtaggtcagaaaggcttctgcaagtcatcggtgtaaattttcttttattagttccattaagattgtcaatagttagtgttccaaataggagaaagaaaagaacgacttactacacacaagaaaaatttctgttagattagttacagtatcatggagttgttctggagaagagcatgttttttttatctcttcagaaatgtcaaaaccaccgaagagattctctctctgtatttttgtctgatacgtgtggctcatacattcttcagtcacagttgacatgtttgatgtaaggcaattattgtcacgaggattctgattacgaatacaacagcagaaactccactatagggaggcgttttggaaagttaattgttgtcagttcctcacaatgttattcaaaaataattttggtaaaagcatgctgtgttcctagttccccctcttgacctgtgcaggctcatgctgcacgcccgtaaacaccttccacctgattggatgcctgagcacgccaag

SEQ ID NO: 1286 - DNA, 3527 bp, Zea Mays
ccaattagtttccaggtcaaaaccaggcgattactttccagagtccagacccattcaaagctctccgccgtcctccttgctcctactcgggctacgacgctgcgccggtaggcacgaggcgttcgacgagtctctgcgctccgaccggccaccacggcgcgtgccgggagccgcgcggcggcggccatgggcgccgcggccttggacttcgagtacaagagggacgcttatggtttcgcggtgcggccacagcatctgcagcgtttccgcgagtacgccaagatttacaaggaagaggaggaggagagggcgcacagatggagagacttcttggacaggttggctgatgcagcgaatgtgcccactacacccagcgtttcaccatatgcatctaccggggatcctgcgtcaggtgcaggacaggcacaagagaatagcggcatcggaatacattgtgatgatgaagaggagggatctgagaatgcagaacataacaacaacttggaaagcccaaaggaatccgatgccagtgctgaatcacgagaagcaaatggtaaatcagaagatctgaaagatgtaactaacttggacaaactgcaagagaagactggtagcagcagctctacagaagcaatcaaagccttagagggcttgatggaaacaaatggggactttgaagaactaaaagatttgaatggaagctcagaagaattggaagaagagaataatggcaacatggaaaagctggtagagctcttcttggataaggggttgttggatgaactgaagcccataaaagttgagtcccagcggcgggtacgtgcagcacttagcatcattgacaaaatgatgagctctcgggtagtgaagggtggtaatggtgcaaatggtattcatggaaacgatggagcacagcttacttctattgaagaggaaggaaggactgcagaagcgagtgatgacggagatccagctgaggttgagtcttgtgttgcagagaaggtggaacttggacaggagacaactcatgattctacaggtactgctttggatggaggcaatgatgggtcctattttccttggagggaggagcttgagagcttggttcgtggaggtgtaccaatggctcttagaggagagatatggcaagcatttgtgggtgttggtgctcgaaggattcctgggtactacaacaaattgcttgatgacaggactgagacattggatgaaaaggatcttgtggacccagtggtcaacgaacagggaagtgcacccagaaaagttacccagcctgagaaatggaaaggacagatagagaaggatttgccacgaacatttccaggacaccctgcattagatgaggatgggaggaatgctttgaggcggttgttaaccgcatatgcaaggcataatccatcagttgggtactgccaggccatgaacttttttgctgggctatttttgttattcatgcctgaagaaaatgcattttgggccttagtaggggttattgatgattattttgatggatactacactgaagaaatgattgaatctcaggttgaccaactcgtccttgaggaggttgtacgagaaaggttccctaaattggccaaacatatggaattcttgggagttcaagtgggatggataactggaccatggtttctttcaattttcatcaatatgcttccatgggaaagtggtcagtacttcgcatttgggatgtcatcctttttgaaggaaatcgcataatgttgttcaggacgacacttgctttgctggatttatatgggcctgcactagtgaccacaaaagatgccggagatgcaattacactactgcagtctcttgctggatctacatttgacagcagccagcttgtattgacagcttgtatgggttttcaatcagttagagaaatgggattgcaagagttaaggaaaaagtacaggcctgaaattttaactgcaatggaggaaagatcgaaagaccgtggctcctggaaagataagaaggggttagcaaccaaactttatagctttaaacatgatccttcatatgtgtgctcaccagttaagtccaaggaagggctagatggttcaaaggtgaatggagagactgggccagcaaatcttgagacctaccttagtactagttctatactggataatgatttggatcagggtgttgatcttcaagatcaggtgtcatggctaaaggttgaactatgcaagctgctcgaggagaaaagatcagctgatctcaggagtgaggaattggaaactgctttgatggagatggtcgagcatgacaacagacgtatgttgagtgcaaaggttgagaagcttgaaacagaggcatatgaactgcgcaaagctttttcagacaagcaagagcaagagcaagtaatgcttcagatcttgttaagaatggagcaagaacagaaagtggcagaagatgcccgcatagccgctgagcgagatgctgctgaacaaaaacacgctgctcacttgctccaggagaagtatgaagcagcaatgacagcactttcacaaatggagaagagagctgtaatggcagaaacaatgctggaagctacaaagcaataccaggttgggcaggttaaagccaaccaatctttcacttcaagttcacctcgtgcagaccatgttcctgcgaagataaatcaagaaccaaaccaaactgcacctatcaggagaatcggcctgctttctaggggacttggatggcttgacaagggcaagcagggaaggcagaattccaatgaaacatctggagcctaaactcatctaaagtccaggatgaagtcatagctcccaacaagatctggattgttcattaacgcttggattgcttgatcaccgtaagagtgttgaaatcagcatcgatacatgttttctcgggaagattcagctggtatattccatgaagttttgcaggaagtgtatcttgtatcatattgagttcaattgtcagataaagttttgttggtaggtcagaaaggcttctgcaagtcatcggtgtaaattttcttttattagttccattaagattgtcaatagttagtgttccaaataggagaaagaaaagaacgacttactacacacaagaaaaatttctgttagattagttacagtatcatggagttgttctggagaagagcatgttttttttatctcttcagaaatgtcaaaaccaccgaagagattctctctctgtatttttgtctgatacgtgtggctcatacattcttcagtcacagttgacatgtttgatgtaaggcaattattgtcacgaggattctgattacgaatacaacagcagaaactccactatagggaggcgttttggaaagttaattgttgtcagttcctcacaatgttattcaaaaataattttggtaaaagcatgctgtgttcctagttccccctcttgacctgtgcaggctcatgctgcacgcccgtaaacaccttccacctgattggatgcctgagcacgccaag

SEQ ID NO: 1287 - DNA, 3524 bp, Zea Mays
ccaattagtttccaggtcaaaaccaggcgattactttccagagtccagacccattcaaagctctccgccgtcctccttgctcctactcgggctacgacgctgcgccggtaggcacgaggcgttcgacgagtctctgcgctccgaccggccaccacggcgcgtgccgggagccgcgcggcggcggccatgggcgccgcggccttggacttcgagtacaagagggacgcttatggtttcgcggtgcggccacagcatctgcagcgtttccgcgagtacgccaagatttacaaggaagaggaggaggagagggcgcacagatggagagacttcttggacaggttggctgatgcagcgaatgtgcccactacacccagcgtttcaccatatgcatctaccggggatcctgcgtcaggtgcaggacaggcacaagagaatagcggcatcggaatacattgtgatgatgaagaggagggatctgagaatgcagaacataacaacaacttggaaagcccaaaggaatccgatgccagtgctgaatcacgagaagcaaatggtaaatcagaagatctgaaagatgtaactaacttggacaaactgcaagagaagactggtagcagcagctctacagaagcaatcaaagccttagagggcttgatggaaacaaatggggactttgaagaactaaaagatttgaatggaagctcagaagaattggaagaagagaataatggcaacatggaaaagctggtagagctcttcttggataaggggttgttggatgaactgaagcccataaaagttgagtcccagcggcgggtacgtgcagcacttagcatcattgacaaaatgatgagctctcgggtagtgaagggtggtaatggtgcaaatggtattcatggaaacgatggagcacagcttacttctattgaagaggaaggaaggactgcagaagcgagtgatgacggagatccagctgaggttgagtcttgtgttgcagagaaggtggaacttggacaggagacaactcatgattctacaggtactgctttggatggaggcaatgatgggtcctattttccttggagggaggagcttgagagcttggttcgtggaggtgtaccaatggctcttagaggagagatatggcaagcatttgtgggtgttggtgctcgaaggattcctgggtactacaacaaattgcttgatgacaggactgagacattggatgaaaaggatcttgtggacccagtggtcaacgaacagggaagtgcacccagaaaagttacccagcctgagaaatggaaaggacagatagagaaggatttgccacgaacatttccaggacaccctgcattagatgaggatgggaggaatgctttgaggcggttgttaaccgcatatgcaaggcataatccatcagttgggtactgccaggccatgaacttttttgctgggctatttttgttattcatgcctgaagaaaatgcattttgggccttagtaggggttattgatgattattttgatggatactacactgaagaaatgattgaatctcaggttgaccaactcgtccttgaggaggttgtacgagaaaggttccctaaattggccaaacatatggaattcttgggagttcaagtgggatggataactggaccatggtttctttcaattttcatcaatatgcttccatgggaaagtggtcagtacttcgcatttgggatgtcatcctttttgaaggaaatcgcataatgttgttcaggacgacacttgctttgctggatttatatgggcctgcactagtgaccacaaaagatgccggagatgcaattacactactgcagtctcttgctggatctacatttgacagcagccagcttgtattgacagcttgtatgggttttcaatcagttagagaaatgggattgcaagagttaaggaaaaagtacaggcctgaaattttaactgcaatggaggaaagatcgaaagaccgtggctcctggaaagataagaaggggttagcaaccaaactttatagctttaaacatgatccttcatatgtgtgctcaccagttaagtccaaggaagggctagatggttcaaaggtgaatggagagactgggccagcaaatcttgagacctaccttagtactagttctatactggataatgatttggatcagggtgttgatcttcaagatcaggtgtcatggctaaaggttgaactatgcaagctgctcgaggagaaaagatcagctgatctcaggagtgaggaattggaaactgctttgatggagatggtcgagcatgacaacagacgtatgttgagtgcaaaggttgagaagcttgaaacagaggcatatgaactgcgcaaagctttttcagacaagcaagagcaagagcaagtaatgcttcagatcttgttaagaatggagcaagaacagaaagtggcagaagatgcccgcatagccgctgagcgagatgctgctgaacaaaaacacgctgctcacttgctccaggagaagtatgaagcagcaatgacagcactttcacaaatggagaagagagctgtaatggcagaaacaatgctggaagctacaaagcaataccaggttgggcaggttaaagccaaccaatctttcacttcaagttcacctcgtgcagaccatgttcctgcgaagataaatcaagaaccaaaccaaactgcacctatcaggagaatcggcctgctttctaggggacttggatggcttgacaagggcaagggaaggcagaattccaatgaaacatctggagcctaaactcatctaaagtccaggatgaagtcatagctcccaacaagatctggattgttcattaacgcttggattgcttgatcaccgtaagagtgttgaaatcagcatcgatacatgttttctcgggaagattcagctggtatattccatgaagttttgcaggaagtgtatcttgtatcatattgagttcaattgtcagataaagttttgttggtaggtcagaaaggcttctgcaagtcatcggtgtaaattttcttttattagttccattaagattgtcaatagttagtgttccaaataggagaaagaaaagaacgacttactacacacaagaaaaatttctgttagattagttacagtatcatggagttgttctggagaagagcatgttttttttatctcttcagaaatgtcaaaaccaccgaagagattctctctctgtatttttgtctgatacgtgtggctcatacattcttcagtcacagttgacatgtttgatgtaaggcaattattgtcacgaggattctgattacgaatacaacagcagaaactccactatagggaggcgttttggaaagttaattgttgtcagttcctcacaatgttattcaaaaataattttggtaaaagcatgctgtgttcctagttccccctcttgacctgtgcaggctcatgctgcacgcccgtaaacaccttccacctgattggatgcctgagcacgccaag

SEQ ID NO: 1288 - DNA, 3790 bp, Zea Mays
gtataagtaccataccatactcccgtgtcttcttcaattgaaatccatgcaggaggcagggcaaaagcgcgcccgcgggcgtgcgcgaaatcgtcgtgccgcgcgccacgtgctccggtgctctagcgtcgacgcaaaatgacctttttttttcttcttctctctgtctcctcttcgccgtccccaatctgcgctgccccctttttctccaattcaattcctcttcgtcgcctcgcgcatgggcattcctcgtgcgccgcggcagcgcagttaacgccagcgcgcgtggcttcacccggtcttgccacgacccgttgcaatcctgattcccttcctctccagaattcctcctcccatgtgcgtggatctcggggcccgtgcgggctagggtttatggctttggtcaatccatggcgtgcggtggcgaggtcgcgctgtcgcttcttctttaatgcgcgctgatccccatggacgccgagtccccacgggacgcttatggtttcgcggtgcggccacagcatctgcagcgtttccgcgagtacgccaagatttacaaggaagaggaggaggagagggcgcacagatggagagacttcttggacaggttggctgatgcagcgaatgtgcccactacacccagcgtttcaccatatgcatctaccggggatcctgcgtcaggtgcaggacaggcacaagagaatagcggcatcggaatacattgtgatgatgaagaggagggatctgagaatgcagaacataacaacaacttggaaagcccaaaggaatccgatgccagtgctgaatcacgagaagcaaatggtaaatcagaagatctgaaagatgtaactaacttggacaaactgcaagagaagactggtagcagcagctctacagaagcaatcaaagccttagagggcttgatggaaacaaatggggactttgaagaactaaaagatttgaatggaagctcagaagaattggaagaagagaataatggcaacatggaaaagctggtagagctcttcttggataaggggttgttggatgaactgaagcccataaaagttgagtcccagcggcgggtacgtgcagcacttagcatcattgacaaaatgatgagctctcgggtagtgaagggtggtaatggtgcaaatggtattcatggaaacgatggagcacagcttacttctattgaagaggaaggaaggactgcagaagcgagtgatgacggagatccagctgaggttgagtcttgtgttgcagagaaggtggaacttggacaggagacaactcatgattctacaggtactgctttggatggaggcaatgatgggtcctattttccttggagggaggagcttgagagcttggttcgtggaggtgtaccaatggctcttagaggagagatatggcaagcatttgtgggtgttggtgctcgaaggattcctgggtactacaacaaattgcttgatgacaggactgagacattggatgaaaaggatcttgtggacccagtggtcaacgaacagggaagtgcacccagaaaagttacccagcctgagaaatggaaaggacagatagagaaggatttgccacgaacatttccaggacaccctgcattagatgaggatgggaggaatgctttgaggcggttgttaaccgcatatgcaaggcataatccatcagttgggtactgccaggccatgaacttttttgctgggctatttttgttattcatgcctgaagaaaatgcattttgggccttagtaggggttattgatgattattttgatggatactacactgaagaaatgattgaatctcaggttgaccaactcgtccttgaggaggttgtacgagaaaggttccctaaattggccaaacatatggaattcttgggagttcaagtgggatggataactggaccatggtttctttcaattttcatcaatatgcttccatgggaaagtggtcagtacttcgcatttgggatgtcatcctttttgaaggaaatcgcataatgttgttcaggacgacacttgctttgctggatttatatgggcctgcactagtgaccacaaaagatgccggagatgcaattacactactgcagtctcttgctggatctacatttgacagcagccagcttgtattgacagcttgtatgggttttcaatcagttagagaaatgggattgcaagagttaaggaaaaagtacaggcctgaaattttaactgcaatggaggaaagatcgaaagaccgtggctcctggaaagataagaaggggttagcaaccaaactttatagctttaaacatgatccttcatatgtgtgctcaccagttaagtccaaggaagggctagatggttcaaaggtgaatggagagactgggccagcaaatcttgagacctaccttagtactagttctatactggataatgatttggatcagggtgttgatcttcaagatcaggtgtcatggctaaaggttgaactatgcaagctgctcgaggagaaaagatcagctgatctcaggagtgaggaattggaaactgctttgatggagatggtcgagcatgacaacagacgtatgttgagtgcaaaggttgagaagcttgaaacagaggcatatgaactgcgcaaagctttttcagacaagcaagagcaagagcaagtaatgcttcagatcttgttaagaatggagcaagaacagaaagtggcagaagatgcccgcatagccgctgagcgagatgctgctgaacaaaaacacgctgctcacttgctccaggagaagtatgaagcagcaatgacagcactttcacaaatggagaagagagctgtaatggcagaaacaatgctggaagctacaaagcaataccaggttgggcaggttaaagccaaccaatctttcacttcaagttcacctcgtgcagaccatgttcctgcgaagataaatcaagaaccaaaccaaactgcacctatcaggagaatcggcctgctttctaggggacttggatggcttgacaagggcaagggaaggcagaattccaatgaaacatctggagcctaaactcatctaaagtccaggatgaagtcatagctcccaacaagatctggattgttcattaacgcttggattgcttgatcaccgtaagagtgttgaaatcagcatcgatacatgttttctcgggaagattcagctggtatattccatgaagttttgcaggaagtgtatcttgtatcatattgagttcaattgtcagataaagttttgttggtaggtcagaaaggcttctgcaagtcatcggtgtaaattttcttttattagttccattaagattgtcaatagttagtgttccaaataggagaaagaaaagaacgacttactacacacaagaaaaatttctgttagattagttacagtatcatggagttgttctggagaagagcatgttttttttatctcttcagaaatgtcaaaaccaccgaagagattctctctctgtatttttgtctgatacgtgtggctcatacattcttcagtcacagttgacatgtttgatgtaaggcaattattgtcacgaggattctgattacgaatacaacagcagaaactccactatagggaggcgttttggaaagttaattgttgtcagttcctcacaatgttattcaaaaataattttggtaaaagcatgctgtgttcctagttccccctcttgacctgtgcaggctcatgctgcacgcccgtaaacaccttccacctgattggatgcctgagcacgccaag

SEQ ID NO: 1289 - DNA, 3754 bp, Zea Mays
cttcaattgaaatccatgcaggaggcagggcaaaagcgcgcccgcgggcgtgcgcgaaatcgtcgtgccgcgcgccacgtgctccggtgctctagcgtcgacgcaaaatgacctttttttttcttcttctctctgtctcctcttcgccgtccccaatctgcgctgccccctttttctccaattcaattcctcttcgtcgcctcgcgcatgggcattcctcgtgcgccgcggcagcgcagttaacgccagcgcgcgtggcttcacccggtcttgccacgacccgttgcaatcctgattcccttcctctccagaattcctcctcccatgtgcgtggatctcggggcccgtgcgggctagggtttatggctttggtcaatccatggcgtgcggtggcgaggtcgcgctgtcgcttcttctttaatgcgcgctgatccccatggacgccgagtccccacgggacgcttatggtttcgcggtgcggccacagcatctgcagcgtttccgcgagtacgccaagatttacaaggaagaggaggaggagagggcgcacagatggagagacttcttggacaggttggctgatgcagcgaatgtgcccactacacccagcgtttcaccatatgcatctaccggggatcctgcgtcaggtgcaggacaggcacaagagaatagcggcatcggaatacattgtgatgatgaagaggagggatctgagaatgcagaacataacaacaacttggaaagcccaaaggaatccgatgccagtgctgaatcacgagaagcaaatggtaaatcagaagatctgaaagatgtaactaacttggacaaactgcaagagaagactggtagcagcagctctacagaagcaatcaaagccttagagggcttgatggaaacaaatggggactttgaagaactaaaagatttgaatggaagctcagaagaattggaagaagagaataatggcaacatggaaaagctggtagagctcttcttggataaggggttgttggatgaactgaagcccataaaagttgagtcccagcggcgggtacgtgcagcacttagcatcattgacaaaatgatgagctctcgggtagtgaagggtggtaatggtgcaaatggtattcatggaaacgatggagcacagcttacttctattgaagaggaaggaaggactgcagaagcgagtgatgacggagatccagctgaggttgagtcttgtgttgcagagaaggtggaacttggacaggagacaactcatgattctacaggtactgctttggatggaggcaatgatgggtcctattttccttggagggaggagcttgagagcttggttcgtggaggtgtaccaatggctcttagaggagagatatggcaagcatttgtgggtgttggtgctcgaaggattcctgggtactacaacaaattgcttgatgacaggactgagacattggatgaaaaggatcttgtggacccagtggtcaacgaacagggaagtgcacccagaaaagttacccagcctgagaaatggaaaggacagatagagaaggatttgccacgaacatttccaggacaccctgcattagatgaggatgggaggaatgctttgaggcggttgttaaccgcatatgcaaggcataatccatcagttgggtactgccaggccatgaacttttttgctgggctatttttgttattcatgcctgaagaaaatgcattttgggccttagtaggggttattgatgattattttgatggatactacactgaagaaatgattgaatctcaggttgaccaactcgtccttgaggaggttgtacgagaaaggttccctaaattggccaaacatatggaattcttgggagttcaagtgggatggataactggaccatggtttctttcaattttcatcaatatgcttccatgggaaagtgtacttcgcatttgggatgtcatcctttttgaaggaaatcgcataatgttgttcaggacgacacttgctttgctggatttatatgggcctgcactagtgaccacaaaagatgccggagatgcaattacactactgcagtctcttgctggatctacatttgacagcagccagcttgtattgacagcttgtatgggttttcaatcagttagagaaatgggattgcaagagttaaggaaaaagtacaggcctgaaattttaactgcaatggaggaaagatcgaaagaccgtggctcctggaaagataagaaggggttagcaaccaaactttatagctttaaacatgatccttcatatgtgtgctcaccagttaagtccaaggaagggctagatggttcaaaggtgaatggagagactgggccagcaaatcttgagacctaccttagtactagttctatactggataatgatttggatcagggtgttgatcttcaagatcaggtgtcatggctaaaggttgaactatgcaagctgctcgaggagaaaagatcagctgatctcaggagtgaggaattggaaactgctttgatggagatggtcgagcatgacaacagacgtatgttgagtgcaaaggttgagaagcttgaaacagaggcatatgaactgcgcaaagctttttcagacaagcaagagcaagagcaagtaatgcttcagatcttgttaagaatggagcaagaacagaaagtggcagaagatgcccgcatagccgctgagcgagatgctgctgaacaaaaacacgctgctcacttgctccaggagaagtatgaagcagcaatgacagcactttcacaaatggagaagagagctgtaatggcagaaacaatgctggaagctacaaagcaataccaggttgggcaggttaaagccaaccaatctttcacttcaagttcacctcgtgcagaccatgttcctgcgaagataaatcaagaaccaaaccaaactgcacctatcaggagaatcggcctgctttctaggggacttggatggcttgacaagggcaagggaaggcagaattccaatgaaacatctggagcctaaactcatctaaagtccaggatgaagtcatagctcccaacaagatctggattgttcattaacgcttggattgcttgatcaccgtaagagtgttgaaatcagcatcgatacatgttttctcgggaagattcagctggtatattccatgaagttttgcaggaagtgtatcttgtatcatattgagttcaattgtcagataaagttttgttggtaggtcagaaaggcttctgcaagtcatcggtgtaaattttcttttattagttccattaagattgtcaatagttagtgttccaaataggagaaagaaaagaacgacttactacacacaagaaaaatttctgttagattagttacagtatcatggagttgttctggagaagagcatgttttttttatctcttcagaaatgtcaaaaccaccgaagagattctctctctgtatttttgtctgatacgtgtggctcatacattcttcagtcacagttgacatgtttgatgtaaggcaattattgtcacgaggattctgattacgaatacaacagcagaaactccactatagggaggcgttttggaaagttaattgttgtcagttcctcacaatgttattcaaaaataattttggtaaaagcatgctgtgttcctagttccccctcttgacctgtgcaggctcatgctgcacgcccgtaaacaccttccacctgattggatgcctgagcacgccaag

SEQ ID NO: 1290 - DNA, 3824 bp, Zea Mays
ccaatctgcgctgccccctttttctccaattcaattcctcttcgtcgcctcgcgcatgggcattcctcgtgcgccgcggcagcgcagttaacgccagcgcgcgtggcttcacccggtcttgccacgacccgttgcaatcctgattcccttcctctccagaattcctcctcccatgtgcgtggatctcggggcccgtgcgggctagggtttatggctttggtcaatccatggcgtgcggtggcgaggtcgcgctgtcgcttcttctttaatgcgcgctgatccccatggacgccgagtccccacgggacgcttatggtttcgcggtgcggccacagcatctgcagcgtttccgcgagtacgccaagatttacaaggaagaggaggaggagagggcgcacagatggagagacttcttggacaggttggctgatgcagcgaatgtgcccactacacccagcgtttcaccatatgcatctaccggggatcctgcgtcaggtgcaggacaggcacaagagaatagcggcatcggaatacattgtgatgatgaagaggagggatctgagaatgcagaacataacaacaacttggaaagcccaaaggaatccgatgccagtgctgaatcacgagaagcaaatggtaaatcagaagatctgaaagatgtaactaacttggacaaactgcaagagaagactggtagcagcagctctacagaagcaatcaaagccttagagggcttgatggaaacaaatggggactttgaagaactaaaagatttgaatggaagctcagaagaattggaagaagagaataatggcaacatggaaaagctggtagagctcttcttggataaggggttgttggatgaactgaagcccataaaagttgagtcccagcggcgggtacgtgcagcacttagcatcattgacaaaatgatgagctctcgggtagtgaagggtggtaatggtgcaaatggtattcatggaaacgatggagcacagcttacttctattgaagaggaaggaaggactgcagaagcgagtgatgacggagatccagctgaggttgagtcttgtgttgcagagaaggtggaacttggacaggagacaactcatgattctacaggtactgctttggatggaggcaatgatgggtcctattttccttggagggaggagcttgagagcttggttcgtggaggtgtaccaatggctcttagaggagagatatggcaagcatttgtgggtgttggtgctcgaaggattcctgggtactacaacaaattgcttgatgacaggactgagacattggatgaaaaggatcttgtggacccagtggtcaacgaacagggaagtgcacccagaaaagttacccagcctgagaaatggaaaggacagatagagaaggatttgccacgaacatttccaggacaccctgcattagatgaggatgggaggaatgctttgaggcggttgttaaccgcatatgcaaggcataatccatcagttgggtactgccaggccatgaacttttttgctgggctatttttgttattcatgcctgaagaaaatgcattttgggccttagtaggggttattgatgattattttgatggatactacactgaagaaatgattgaatctcaggttgaccaactcgtccttgaggaggttgtacgagaaaggttccctaaattggccaaacatatggaattcttgggagttcaagtgggatggataactggaccatggtttctttcaattttcatcaatatgcttccatgggaaagtggtcaggttttatacagtgtcttggttctttcattatgatatgtgttattccaatatttttgttggtagttcactgctgtaatattggttaatccccttctggttcactaacatttaaatctcactatcagcatatggaaaattttcttatgtctttgtaggttatattctgttaccatatgtgtgctatcgatatctaagtaagactttacctctcttatagtacttcgcatttgggatgtcatcctttttgaaggaaatcgcataatgttgttcaggacgacacttgctttgctggatttatatgggcctgcactagtgaccacaaaagatgccggagatgcaattacactactgcagtctcttgctggatctacatttgacagcagccagcttgtattgacagcttgtatgggttttcaatcagttagagaaatgggattgcaagagttaaggaaaaagtacaggcctgaaattttaactgcaatggaggaaagatcgaaagaccgtggctcctggaaagataagaaggggttagcaaccaaactttatagctttaaacatgatccttcatatgtgtgctcaccagttaagtccaaggaagggctagatggttcaaaggtgaatggagagactgggccagcaaatcttgagacctaccttagtactagttctatactggataatgatttggatcagggtgttgatcttcaagatcaggtgtcatggctaaaggttgaactatgcaagctgctcgaggagaaaagatcagctgatctcaggagtgaggaattggaaactgctttgatggagatggtcgagcatgacaacagacgtatgttgagtgcaaaggttgagaagcttgaaacagaggcatatgaactgcgcaaagctttttcagacaagcaagagcaagagcaagtaatgcttcagatcttgttaagaatggagcaagaacagaaagtggcagaagatgcccgcatagccgctgagcgagatgctgctgaacaaaaacacgctgctcacttgctccaggagaagtatgaagcagcaatgacagcactttcacaaatggagaagagagctgtaatggcagaaacaatgctggaagctacaaagcaataccaggttgggcaggttaaagccaaccaatctttcacttcaagttcacctcgtgcagaccatgttcctgcgaagataaatcaagaaccaaaccaaactgcacctatcaggagaatcggcctgctttctaggggacttggatggcttgacaagggcaagggaaggcagaattccaatgaaacatctggagcctaaactcatctaaagtccaggatgaagtcatagctcccaacaagatctggattgttcattaacgcttggattgcttgatcaccgtaagagtgttgaaatcagcatcgatacatgttttctcgggaagattcagctggtatattccatgaagttttgcaggaagtgtatcttgtatcatattgagttcaattgtcagataaagttttgttggtaggtcagaaaggcttctgcaagtcatcggtgtaaattttcttttattagttccattaagattgtcaatagttagtgttccaaataggagaaagaaaagaacgacttactacacacaagaaaaatttctgttagattagttacagtatcatggagttgttctggagaagagcatgttttttttatctcttcagaaatgtcaaaaccaccgaagagattctctctctgtatttttgtctgatacgtgtggctcatacattcttcagtcacagttgacatgtttgatgtaaggcaattattgtcacgaggattctgattacgaatacaacagcagaaactccactatagggaggcgttttggaaagttaattgttgtcagttcctcacaatgttattcaaaaataattttggtaaaagcatgctgtgttcctagttccccctcttgacctgtgcaggctcatgctgcacgcccgtaaacaccttccacctgattggatgcctgagcacgccaag

SEQ ID NO: 1291 - DNA, 2930 bp, Zea Mays
gcgctgccccctttttctccaattcaattcctcttcgtcgcctcgcgcatgggcattcctcgtgcgccgcggcagcgcagttaacgccagcgcgcgtggcttcacccggtcttgccacgacccgttgcaatcctgattcccttcctctccagaattcctcctcccatgtgcgtggatctcggggcccgtgcgggctagggtttatggctttggtcaatccatggcgtgcggtggcgaggtcgcgctgtcgcttcttctttaatgcgcgctgatccccatggacgccgagtccccacgggacgcttatggtttcgcggtgcggccacagcatctgcagcgtttccgcgagtacgccaagatttacaagatatggcaagcatttgtgggtgttggtgctcgaaggattcctgggtactacaacaaattgcttgatgacaggactgagacattggatgaaaaggatcttgtggacccagtggtcaacgaacagggaagtgcacccagaaaagttacccagcctgagaaatggaaaggacagatagagaaggatttgccacgaacatttccaggacaccctgcattagatgaggatgggaggaatgctttgaggcggttgttaaccgcatatgcaaggcataatccatcagttgggtactgccaggccatgaacttttttgctgggctatttttgttattcatgcctgaagaaaatgcattttgggccttagtaggggttattgatgattattttgatggatactacactgaagaaatgattgaatctcaggttgaccaactcgtccttgaggaggttgtacgagaaaggttccctaaattggccaaacatatggaattcttgggagttcaagtgggatggataactggaccatggtttctttcaattttcatcaatatgcttccatgggaaagtggtcaggttttatacagtgtcttggttctttcattatgatatgtgttattccaatatttttgttggtagttcactgctgtaatattggttaatccccttctggttcactaacatttaaatctcactatcagcatatggaaaattttcttatgtctttgtaggttatattctgttaccatatgtgtgctatcgatatctaagtaagactttacctctcttatagtacttcgcatttgggatgtcatcctttttgaaggaaatcgcataatgttgttcaggacgacacttgctttgctggatttatatgggcctgcactagtgaccacaaaagatgccggagatgcaattacactactgcagtctcttgctggatctacatttgacagcagccagcttgtattgacagcttgtatgggttttcaatcagttagagaaatgggattgcaagagttaaggaaaaagtacaggcctgaaattttaactgcaatggaggaaagatcgaaagaccgtggctcctggaaagataagaaggggttagcaaccaaactttatagctttaaacatgatccttcatatgtgtgctcaccagttaagtccaaggaagggctagatggttcaaaggtgaatggagagactgggccagcaaatcttgagacctaccttagtactagttctatactggataatgatttggatcagggtgttgatcttcaagatcaggtgtcatggctaaaggttgaactatgcaagctgctcgaggagaaaagatcagctgatctcaggagtgaggaattggaaactgctttgatggagatggtcgagcatgacaacagacgtatgttgagtgcaaaggttgagaagcttgaaacagaggcatatgaactgcgcaaagctttttcagacaagcaagagcaagagcaagtaatgcttcagatcttgttaagaatggagcaagaacagaaagtggcagaagatgcccgcatagccgctgagcgagatgctgctgaacaaaaacacgctgctcacttgctccaggagaagtatgaagcagcaatgacagcactttcacaaatggagaagagagctgtaatggcagaaacaatgctggaagctacaaagcaataccagttcacctcgtgcagaccatgttcctgcgaagataaatcaagaaccaaaccaaactgcacctatcaggagaatcggcctgctttctaggggacttggatggcttgacaagggcaagggaaggcagaattccaatgaaacatctggagcctaaactcatctaaagtccaggatgaagtcatagctcccaacaagatctggattgttcattaacgcttggattgcttgatcaccgtaagagtgttgaaatcagcatcgatacatgttttctcgggaagattcagctggtatattccatgaagttttgcaggaagtgtatcttgtatcatattgagttcaattgtcagataaagttttgttggtaggtcagaaaggcttctgcaagtcatcggtgtaaattttcttttattagttccattaagattgtcaatagttagtgttccaaataggagaaagaaaagaacgacttactacacacaagaaaaatttctgttagattagttacagtatcatggagttgttctggagaagagcatgttttttttatctcttcagaaatgtcaaaaccaccgaagagattctctctctgtatttttgtctgatacgtgtggctcatacattcttcagtcacagttgacatgtttgatgtaaggcaattattgtcacgaggattctgattacgaatacaacagcagaaactccactatagggaggcgttttggaaagttaattgttgtcagttcctcacaatgttattcaaaaataattttggtaaaagcatgctgtgttcctagttccccctcttgacctgtgcaggctcatgctgcacgcccgtaaacaccttccacctgattggatgcctgagcacgccaag

SEQ ID NO: 1292 - DNA, 2751 bp, Zea Mays
gcgctgccccctttttctccaattcaattcctcttcgtcgcctcgcgcatgggcattcctcgtgcgccgcggcagcgcagttaacgccagcgcgcgtggcttcacccggtcttgccacgacccgttgcaatcctgattcccttcctctccagaattcctcctcccatgtgcgtggatctcggggcccgtgcgggctagggtttatggctttggtcaatccatggcgtgcggtggcgaggtcgcgctgtcgcttcttctttaatgcgcgctgatccccatggacgccgagtccccacgggacgcttatggtttcgcggtgcggccacagcatctgcagcgtttccgcgagtacgccaagatttacaagatatggcaagcatttgtgggtgttggtgctcgaaggattcctgggtactacaacaaattgcttgatgacaggactgagacattggatgaaaaggatcttgtggacccagtggtcaacgaacagggaagtgcacccagaaaagttacccagcctgagaaatggaaaggacagatagagaaggatttgccacgaacatttccaggacaccctgcattagatgaggatgggaggaatgctttgaggcggttgttaaccgcatatgcaaggcataatccatcagttgggtactgccaggccatgaacttttttgctgggctatttttgttattcatgcctgaagaaaatgcattttgggccttagtaggggttattgatgattattttgatggatactacactgaagaaatgattgaatctcaggttgaccaactcgtccttgaggaggttgtacgagaaaggttccctaaattggccaaacatatggaattcttgggagttcaagtgggatggataactggaccatggtttctttcaattttcatcaatatgcttccatgggaaagtggtcagtacttcgcatttgggatgtcatcctttttgaaggaaatcgcataatgttgttcaggacgacacttgctttgctggatttatatgggcctgcactagtgaccacaaaagatgccggagatgcaattacactactgcagtctcttgctggatctacatttgacagcagccagcttgtattgacagcttgtatgggttttcaatcagttagagaaatgggattgcaagagttaaggaaaaagtacaggcctgaaattttaactgcaatggaggaaagatcgaaagaccgtggctcctggaaagataagaaggggttagcaaccaaactttatagctttaaacatgatccttcatatgtgtgctcaccagttaagtccaaggaagggctagatggttcaaaggtgaatggagagactgggccagcaaatcttgagacctaccttagtactagttctatactggataatgatttggatcagggtgttgatcttcaagatcaggtgtcatggctaaaggttgaactatgcaagctgctcgaggagaaaagatcagctgatctcaggagtgaggaattggaaactgctttgatggagatggtcgagcatgacaacagacgtatgttgagtgcaaaggttgagaagcttgaaacagaggcatatgaactgcgcaaagctttttcagacaagcaagagcaagagcaagtaatgcttcagatcttgttaagaatggagcaagaacagaaagtggcagaagatgcccgcatagccgctgagcgagatgctgctgaacaaaaacacgctgctcacttgctccaggagaagtatgaagcagcaatgacagcactttcacaaatggagaagagagctgtaatggcagaaacaatgctggaagctacaaagcaataccaggttgggcaggttaaagccaaccaatctttcacttcaagttcacctcgtgcagaccatgttcctgcgaagataaatcaagaaccaaaccaaactgcacctatcaggagaatcggcctgctttctaggggacttggatggcttgacaagggcaagggaaggcagaattccaatgaaacatctggagcctaaactcatctaaagtccaggatgaagtcatagctcccaacaagatctggattgttcattaacgcttggattgcttgatcaccgtaagagtgttgaaatcagcatcgatacatgttttctcgggaagattcagctggtatattccatgaagttttgcaggaagtgtatcttgtatcatattgagttcaattgtcagataaagttttgttggtaggtcagaaaggcttctgcaagtcatcggtgtaaattttcttttattagttccattaagattgtcaatagttagtgttccaaataggagaaagaaaagaacgacttactacacacaagaaaaatttctgttagattagttacagtatcatggagttgttctggagaagagcatgttttttttatctcttcagaaatgtcaaaaccaccgaagagattctctctctgtatttttgtctgatacgtgtggctcatacattcttcagtcacagttgacatgtttgatgtaaggcaattattgtcacgaggattctgattacgaatacaacagcagaaactccactatagggaggcgttttggaaagttaattgttgtcagttcctcacaatgttattcaaaaataattttggtaaaagcatgctgtgttcctagttccccctcttgacctgtgcaggctcatgctgcacgcccgtaaacaccttccacctgattggatgcctgagcacgccaag

SEQ ID NO: 1293 - DNA, 4035 bp, Zea Mays
gcgctgccccctttttctccaattcaattcctcttcgtcgcctcgcgcatgggcattcctcgtgcgccgcggcagcgcagttaacgccagcgcgcgtggcttcacccggtcttgccacgacccgttgcaatcctgattcccttcctctccagaattcctcctcccatgtgcgtggatctcggggcccgtgcgggctagggtttatggctttggtcaatccatggcgtgcggtggcgaggtcgcgctgtcgcttcttctttaatgcgcgctgatccccatggacgccgagtccccacgggacgcttatggtttcgcggtgcggccacagcatctgcagcgtttccgcgagtacgccaagatttacaaggaagaggaggaggagagggcgcacagatggagagacttcttggacaggttggctgatgcagcgaatgtgcccactacacccagcgtttcaccatatgcatctaccggggatcctgcgtcaggtgcaggacaggcacaagagaatagcggcatcggaatacattgtgatgatgaagaggagggatctgagaatgcagaacataacaacaacttggaaagcccaaaggaatccgatgccagtgctgaatcacgagaagcaaatggtaaatcagaagatctgaaagatgtaactaacttggacaaactgcaagagaagactggtagcagcagctctacagaagcaatcaaagccttagagggcttgatggaaacaaatggggactttgaagaactaaaagatttgaatggaagctcagaagaattggaagaagagaataatggcaacatggaaaagctggtagagctcttcttggataaggggttgttggatgaactgaagcccataaaagttgagtcccagcggcgggtacgtgcagcacttagcatcattgacaaaatgatgagctctcgggtagtgaagggtggtaatggtgcaaatggtattcatggaaacgatggagcacagcttacttctattgaagaggaaggaaggactgcagaagcgagtgatgacggagatccagctgaggttgagtcttgtgttgcagagaaggtggaacttggacaggagacaactcatgattctacaggtactgctttggatggaggcaatgatgggtcctattttccttggagggaggagcttgagagcttggttcgtggaggtgtaccaatggctcttagaggagagatatggcaagcatttgtgggtgttggtgctcgaaggattcctgggtactacaacaaattgcttgatgacaggactgagacattggatgaaaaggatcttgtggacccagtggtcaacgaacagggaagtgcacccagaaaagttacccagcctgagaaatggaaaggacagatagagaaggatttgccacgaacatttccaggacaccctgcattagatgaggatgggaggaatgctttgaggcggttgttaaccgcatatgcaaggcataatccatcagttgggtactgccaggccatgaacttttttgctgggctatttttgttattcatgcctgaagaaaatgcattttgggccttagtaggggttattgatgattattttgatggatactacactgaagaaatgattgaatctcaggttgaccaactcgtccttgaggaggttgtacgagaaaggttccctaaattggccaaacatatggaattcttgggagttcaagtgggatggataactggaccatggtttctttcaattttcatcaatatgcttccatgggaaagtgtacttcgcatttgggatgtcatcctttttgaaggaaatcgcataatgttgttcaggacgacacttgctttgctggatttatatgggcctgcactagtgaccacaaaagatgccggagatgcaattacactactgcagtctcttgctggatctacatttgacagcagccagcttgtattgacagcttgtatgggttttcaatcagttagagaaatgggattgcaagagttaaggaaaaagtacaggcctgaaattttaactgcaatggaggaaagatcgaaagaccgtggctcctggaaagataagaaggggttagcaaccaaactttatagctttaaacatgatccttcatatgtgtgctcaccagttaagtccaaggaagggctagatggttcaaaggtgaatggagagactgggccagcaaatcttgagacctaccttagtactagttctatactggataatgatttggatcagggtgttgatcttcaagatcaggtgtcatggctaaaggttgaactatgcaagctgctcgaggagaaaagatcagctgatctcaggagtgaggaattggaaactgctttgatggagatggtcgagcatgacaacagacgtatgttgagtgcaaaggttgagaagcttgaaacagaggcatatgaactgcgcaaagctttttcagacaagcaagagcaagagcaagtaatgcttcagatcttgttaagaatggagcaagaacagaaagtggcagaagatgcccgcatagccgctgagcgagatgctgctgaacaaaaacacgctgctcacttgctccaggagaagtatgaagcagcaatgacagcactttcacaaatggagaagagagctgtaatggcagaaacaatgctggaagctacaaagcaataccaggttgggcaggttaaagccaaccaatctttcacttcaaggttaacttccactttccaagcatctagatcacttagactatctccagcagactttctatcccactccttatcaaactcctctctgcaaacagtgcatctataatacaaaacagtgttatacacgcccgcgtgcagggcgttgctggagttggtcttattggaagtctattacttcacattcgcatgtctacttcatgtgtcccgctagctattgcttgccttggtttcttttccccttcaattatactccctccatattttcttatttgacgttttgtagttcatttttgtactgtttggcgtcaaatataaaaagatggaggcagtattaatttttcatgtgtccaacaaacatttgattgatatttttactgttaatttaagaagcttgaactctaaattcatactacaatacttcatttacttggaatcttctgtagttcacctcgtgcagaccatgttcctgcgaagataaatcaagaaccaaaccaaactgcacctatcaggagaatcggcctgctttctaggggacttggatggcttgacaagggcaagggaaggcagaattccaatgaaacatctggagcctaaactcatctaaagtccaggatgaagtcatagctcccaacaagatctggattgttcattaacgcttggattgcttgatcaccgtaagagtgttgaaatcagcatcgatacatgttttctcgggaagattcagctggtatattccatgaagttttgcaggaagtgtatcttgtatcatattgagttcaattgtcagataaagttttgttggtaggtcagaaaggcttctgcaagtcatcggtgtaaattttcttttattagttccattaagattgtcaatagttagtgttccaaataggagaaagaaaagaacgacttactacacacaagaaaaatttctgttagattagttacagtatcatggagttgttctggagaagagcatgttttttttatctcttcagaaatgtcaaaaccaccgaagagattctctctctgtatttttgtctgatacgtgtggctcatacattcttcagtcacagttgacatgtttgatgtaaggcaattattgtcacgaggattctgattacgaatacaacagcagaaactccactatagggaggcgttttggaaagttaattgttgtcagttcctcacaatgttattcaaaaataattttggtaaaagcatgctgtgttcctagttccccctcttgacctgtgcaggctcatgctgcacgcccgtaaacaccttccacctgattggatgcctgagcacgccaag

SEQ ID NO: 1294 - DNA, 3557 bp, Zea Mays
gcgctgccccctttttctccaattcaattcctcttcgtcgcctcgcgcatgggcattcctcgtgcgccgcggcagcgcagttaacgccagcgcgcgtggcttcacccggtcttgccacgacccgttgcaatcctgattcccttcctctccagaattcctcctcccatgtgcgtggatctcggggcccgtgcgggctagggtttatggctttggtcaatccatggcgtgcggtggcgaggtcgcgctgtcgcttcttctttaatgcgcgctgatccccatggacgccgagtccccacgggacgcttatggtttcgcggtgcggccacagcatctgcagcgtttccgcgagtacgccaagatttacaaggaagaggaggaggagagggcgcacagatggagagacttcttggacaggttggctgatgcagcgaatgtgcccactacacccagcgtttcaccatatgcatctaccggggatcctgcgtcaggtgcaggacaggcacaagagaatagcggcatcggaatacattgtgatgatgaagaggagggatctgagaatgcagaacataacaacaacttggaaagcccaaaggaatccgatgccagtgctgaatcacgagaagcaaatggtaaatcagaagatctgaaagatgtaactaacttggacaaactgcaagagaagactggtagcagcagctctacagaagcaatcaaagccttagagggcttgatggaaacaaatggggactttgaagaactaaaagatttgaatggaagctcagaagaattggaagaagagaataatggcaacatggaaaagctggtagagctcttcttggataaggggttgttggatgaactgaagcccataaaagttgagtcccagcggcgggtacgtgcagcacttagcatcattgacaaaatgatgagctctcgggtagtgaagggtggtaatggtgcaaatggtattcatggaaacgatggagcacagcttacttctattgaagaggaaggaaggactgcagaagcgagtgatgacggagatccagctgaggttgagtcttgtgttgcagagaaggtggaacttggacaggagacaactcatgattctacaggtactgctttggatggaggcaatgatgggtcctattttccttggagggaggagcttgagagcttggttcgtggaggtgtaccaatggctcttagaggagagatatggcaagcatttgtgggtgttggtgctcgaaggattcctgggtactacaacaaattgcttgatgacaggactgagacattggatgaaaaggatcttgtggacccagtggtcaacgaacagggaagtgcacccagaaaagttacccagcctgagaaatggaaaggacagatagagaaggatttgccacgaacatttccaggacaccctgcattagatgaggatgggaggaatgctttgaggcggttgttaaccgcatatgcaaggcataatccatcagttgggtactgccaggccatgaacttttttgctgggctatttttgttattcatgcctgaagaaaatgcattttgggccttagtaggggttattgatgattattttgatggatactacactgaagaaatgattgaatctcaggttgaccaactcgtccttgaggaggttgtacgagaaaggttccctaaattggccaaacatatggaattcttgggagttcaagtgggatggataactggaccatggtttctttcaattttcatcaatatgcttccatgggaaagtgtacttcgcatttgggatgtcatcctttttgaaggaaatcgcataatgttgttcaggacgacacttgctttgctggatttatatgggcctgcactagtgaccacaaaagatgccggagatgcaattacactactgcagtctcttgctggatctacatttgacagcagccagcttgtattgacagcttgtatgggttttcaatcagttagagaaatgggattgcaagagttaaggaaaaagtacaggcctgaaattttaactgcaatggaggaaagatcgaaagaccgtggctcctggaaagataagaaggggttagcaaccaaactttatagctttaaacatgatccttcatatgtgtgctcaccagttaagtccaaggaagggctagatggttcaaaggtgaatggagagactgggccagcaaatcttgagacctaccttagtactagttctatactggataatgatttggatcagggtgttgatcttcaagatcaggtgtcatggctaaaggttgaactatgcaagctgctcgaggagaaaagatcagctgatctcaggagtgaggaattggaaactgctttgatggagatggtcgagcatgacaacagacgtatgttgagtgcaaaggttgagaagcttgaaacagaggcatatgaactgcgcaaagctttttcagacaagcaagagcaagagcaagtaatgcttcagatcttgttaagaatggagcaagaacagaaagtggcagaagatgcccgcatagccgctgagcgagatgctgctgaacaaaaacacgctgctcacttgctccaggagaagtatgaagcagcaatgacagcactttcacaaatggagaagagagctgtaatggcagaaacaatgctggaagctacaaagcaataccagttcacctcgtgcagaccatgttcctgcgaagataaatcaagaaccaaaccaaactgcacctatcaggagaatcggcctgctttctaggggacttggatggcttgacaagggcaagggaaggcagaattccaatgaaacatctggagcctaaactcatctaaagtccaggatgaagtcatagctcccaacaagatctggattgttcattaacgcttggattgcttgatcaccgtaagagtgttgaaatcagcatcgatacatgttttctcgggaagattcagctggtatattccatgaagttttgcaggaagtgtatcttgtatcatattgagttcaattgtcagataaagttttgttggtaggtcagaaaggcttctgcaagtcatcggtgtaaattttcttttattagttccattaagattgtcaatagttagtgttccaaataggagaaagaaaagaacgacttactacacacaagaaaaatttctgttagattagttacagtatcatggagttgttctggagaagagcatgttttttttatctcttcagaaatgtcaaaaccaccgaagagattctctctctgtatttttgtctgatacgtgtggctcatacattcttcagtcacagttgacatgtttgatgtaaggcaattattgtcacgaggattctgattacgaatacaacagcagaaactccactatagggaggcgttttggaaagttaattgttgtcagttcctcacaatgttattcaaaaataattttggtaaaagcatgctgtgttcctagttccccctcttgacctgtgcaggctcatgctgcacgcccgtaaacaccttccacctgattggatgcctgagcacgccaag

SEQ ID NO: 1295 - DNA, 2971 bp, Zea Mays
gcgctgccccctttttctccaattcaattcctcttcgtcgcctcgcgcatgggcattcctcgtgcgccgcggcagcgcagttaacgccagcgcgcgtggcttcacccggtcttgccacgacccgttgcaatcctgattcccttcctctccagaattcctcctcccatgtgcgtggatctcggggcccgtgcgggctagggtttatggctttggtcaatccatggcgtgcggtggcgaggtcgcgctgtcgcttcttctttaatgcgcgctgatccccatggacgccgagtccccacgggacgcttatggtttcgcggtgcggccacagcatctgcagcgtttccgcgagtacgccaagatttacaagatatggcaagcatttgtgggtgttggtgctcgaaggattcctgggtactacaacaaattgcttgatgacaggactgagacattggatgaaaaggatcttgtggacccagtggtcaacgaacagggaagtgcacccagaaaagttacccagcctgagaaatggaaaggacagatagagaaggatttgccacgaacatttccaggacaccctgcattagatgaggatgggaggaatgctttgaggcggttgttaaccgcatatgcaaggcataatccatcagttgggtactgccaggccatgaacttttttgctgggctatttttgttattcatgcctgaagaaaatgcattttgggccttagtaggggttattgatgattattttgatggatactacactgaagaaatgattgaatctcaggttgaccaactcgtccttgaggaggttgtacgagaaaggttccctaaattggccaaacatatggaattcttgggagttcaagtgggatggataactggaccatggtttctttcaattttcatcaatatgcttccatgggaaagtggtcaggttttatacagtgtcttggttctttcattatgatatgtgttattccaatatttttgttggtagttcactgctgtaatattggttaatccccttctggttcactaacatttaaatctcactatcagcatatggaaaattttcttatgtctttgtaggttatattctgttaccatatgtgtgctatcgatatctaagtaagactttacctctcttatagtacttcgcatttgggatgtcatcctttttgaaggaaatcgcataatgttgttcaggacgacacttgctttgctggatttatatgggcctgcactagtgaccacaaaagatgccggagatgcaattacactactgcagtctcttgctggatctacatttgacagcagccagcttgtattgacagcttgtatgggttttcaatcagttagagaaatgggattgcaagagttaaggaaaaagtacaggcctgaaattttaactgcaatggaggaaagatcgaaagaccgtggctcctggaaagataagaaggggttagcaaccaaactttatagctttaaacatgatccttcatatgtgtgctcaccagttaagtccaaggaagggctagatggttcaaaggtgaatggagagactgggccagcaaatcttgagacctaccttagtactagttctatactggataatgatttggatcagggtgttgatcttcaagatcaggtgtcatggctaaaggttgaactatgcaagctgctcgaggagaaaagatcagctgatctcaggagtgaggaattggaaactgctttgatggagatggtcgagcatgacaacagacgtatgttgagtgcaaaggttgagaagcttgaaacagaggcatatgaactgcgcaaagctttttcagacaagcaagagcaagagcaagtaatgcttcagatcttgttaagaatggagcaagaacagaaagtggcagaagatgcccgcatagccgctgagcgagatgctgctgaacaaaaacacgctgctcacttgctccaggagaagtatgaagcagcaatgacagcactttcacaaatggagaagagagctgtaatggcagaaacaatgctggaagctacaaagcaataccaggttgggcaggttaaagccaaccaatctttcacttcaagttcacctcgtgcagaccatgttcctgcgaagataaatcaagaaccaaaccaaactgcacctatcaggagaatcggcctgctttctaggggacttggatggcttgacaagggcaagcagggaaggcagaattccaatgaaacatctggagcctaaactcatctaaagtccaggatgaagtcatagctcccaacaagatctggattgttcattaacgcttggattgcttgatcaccgtaagagtgttgaaatcagcatcgatacatgttttctcgggaagattcagctggtatattccatgaagttttgcaggaagtgtatcttgtatcatattgagttcaattgtcagataaagttttgttggtaggtcagaaaggcttctgcaagtcatcggtgtaaattttcttttattagttccattaagattgtcaatagttagtgttccaaataggagaaagaaaagaacgacttactacacacaagaaaaatttctgttagattagttacagtatcatggagttgttctggagaagagcatgttttttttatctcttcagaaatgtcaaaaccaccgaagagattctctctctgtatttttgtctgatacgtgtggctcatacattcttcagtcacagttgacatgtttgatgtaaggcaattattgtcacgaggattctgattacgaatacaacagcagaaactccactatagggaggcgttttggaaagttaattgttgtcagttcctcacaatgttattcaaaaataattttggtaaaagcatgctgtgttcctagttccccctcttgacctgtgcaggctcatgctgcacgcccgtaaacaccttccacctgattggatgcctgagcacgccaag

SEQ ID NO: 1296 - DNA, 2746 bp, Zea Mays
gcgctgccccctttttctccaattcaattcctcttcgtcgcctcgcgcatgggcattcctcgtgcgccgcggcagcgcagttaacgccagcgcgcgtggcttcacccggtcttgccacgacccgttgcaatcctgattcccttcctctccagaattcctcctcccatgtgcgtggatctcggggcccgtgcgggctagggtttatggctttggtcaatccatggcgtgcggtggcgaggtcgcgctgtcgcttcttctttaatgcgcgctgatccccatggacgccgagtccccacgggacgcttatggtttcgcggtgcggccacagcatctgcagcgtttccgcgagtacgccaagatttacaagatatggcaagcatttgtgggtgttggtgctcgaaggattcctgggtactacaacaaattgcttgatgacaggactgagacattggatgaaaaggatcttgtggacccagtggtcaacgaacagggaagtgcacccagaaaagttacccagcctgagaaatggaaaggacagatagagaaggatttgccacgaacatttccaggacaccctgcattagatgaggatgggaggaatgctttgaggcggttgttaaccgcatatgcaaggcataatccatcagttgggtactgccaggccatgaacttttttgctgggctatttttgttattcatgcctgaagaaaatgcattttgggccttagtaggggttattgatgattattttgatggatactacactgaagaaatgattgaatctcaggttgaccaactcgtccttgaggaggttgtacgagaaaggttccctaaattggccaaacatatggaattcttgggagttcaagtgggatggataactggaccatggtttctttcaattttcatcaatatgcttccatgggaaagtgtacttcgcatttgggatgtcatcctttttgaaggaaatcgcataatgttgttcaggacgacacttgctttgctggatttatatgggcctgcactagtgaccacaaaagatgccggagatgcaattacactactgcagtctcttgctggatctacatttgacagcagccagcttgtattgacagcttgtatgggttttcaatcagttagagaaatgggattgcaagagttaaggaaaaagtacaggcctgaaattttaactgcaatggaggaaagatcgaaagaccgtggctcctggaaagataagaaggggttagcaaccaaactttatagctttaaacatgatccttcatatgtgtgctcaccagttaagtccaaggaagggctagatggttcaaaggtgaatggagagactgggccagcaaatcttgagacctaccttagtactagttctatactggataatgatttggatcagggtgttgatcttcaagatcaggtgtcatggctaaaggttgaactatgcaagctgctcgaggagaaaagatcagctgatctcaggagtgaggaattggaaactgctttgatggagatggtcgagcatgacaacagacgtatgttgagtgcaaaggttgagaagcttgaaacagaggcatatgaactgcgcaaagctttttcagacaagcaagagcaagagcaagtaatgcttcagatcttgttaagaatggagcaagaacagaaagtggcagaagatgcccgcatagccgctgagcgagatgctgctgaacaaaaacacgctgctcacttgctccaggagaagtatgaagcagcaatgacagcactttcacaaatggagaagagagctgtaatggcagaaacaatgctggaagctacaaagcaataccaggttgggcaggttaaagccaaccaatctttcacttcaagttcacctcgtgcagaccatgttcctgcgaagataaatcaagaaccaaaccaaactgcacctatcaggagaatcggcctgctttctaggggacttggatggcttgacaagggcaagggaaggcagaattccaatgaaacatctggagcctaaactcatctaaagtccaggatgaagtcatagctcccaacaagatctggattgttcattaacgcttggattgcttgatcaccgtaagagtgttgaaatcagcatcgatacatgttttctcgggaagattcagctggtatattccatgaagttttgcaggaagtgtatcttgtatcatattgagttcaattgtcagataaagttttgttggtaggtcagaaaggcttctgcaagtcatcggtgtaaattttcttttattagttccattaagattgtcaatagttagtgttccaaataggagaaagaaaagaacgacttactacacacaagaaaaatttctgttagattagttacagtatcatggagttgttctggagaagagcatgttttttttatctcttcagaaatgtcaaaaccaccgaagagattctctctctgtatttttgtctgatacgtgtggctcatacattcttcagtcacagttgacatgtttgatgtaaggcaattattgtcacgaggattctgattacgaatacaacagcagaaactccactatagggaggcgttttggaaagttaattgttgtcagttcctcacaatgttattcaaaaataattttggtaaaagcatgctgtgttcctagttccccctcttgacctgtgcaggctcatgctgcacgcccgtaaacaccttccacctgattggatgcctgagcacgccaag

SEQ ID NO: 1297 - DNA, 1372 bp, Zea Mays
aggcatcatttcggaaacctccttggatgaagtttgggggcaacattcggggtttctgcgagaacaaataccttcggtccacatcaagggtgaggttaaaaacatgtgaacagagggggaccccatggggagtgaggaattggaaactgctttgatggagatggtcgagcatgacaacagacgtatgttgagtgcaaaggttgagaagcttgaaacagaggcatatgaactgcgcaaagctttttcagacaagcaagagcaagagcaaatcttgttaagaatggagcaagaacagaaagtggcagaagatgcccgcatagccgctgagcgagatgctgctgaacaaaaacacgctgctcacttgctccaggagaagtatgaagcagcaatgacagcactttcacaaatggagaagagagctgtaatggcagaaacaatgctggaagctacaaagcaataccaggttgggcaggttaaagccaaccaatctttcacttcaagttcacctcgtgcagaccatgttcctgcgaagataaatcaagaaccaaaccaaactgcacctatcaggagaatcggcctgctttctaggggacttggatggcttgacaagggcaagggaaggcagaattccaatgaaacatctggagcctaaactcatctaaagtccaggatgaagtcatagctcccaacaagatctggattgttcattaacgcttggattgcttgatcaccgtaagagtgttgaaatcagcatcgatacatgttttctcgggaagattcagctggtatattccatgaagttttgcaggaagtgtatcttgtatcatattgagttcaattgtcagataaagttttgttggtaggtcagaaaggcttctgcaagtcatcggtgtaaattttcttttattagttccattaagattgtcaatagttagtgttccaaataggagaaagaaaagaacgacttactacacacaagaaaaatttctgttagattagttacagtatcatggagttgttctggagaagagcatgttttttttatctcttcagaaatgtcaaaaccaccgaagagattctctctctgtatttttgtctgatacgtgtggctcatacattcttcagtcacagttgacatgtttgatgtaaggcaattattgtcacgaggattctgattacgaatacaacagcagaaactccactatagggaggcgttttggaaagttaattgttgtcagttcctcacaatgttattcaaaaataattttggtaaaagcatgctgtgttcctagttccccctcttgacctgtgcaggctcatgctgcacgcccgtaaacaccttccacctgattggatgcctgagcacgccaag

SEQ ID NO: 1298 - DNA, 1337 bp, Zea Mays
cggggtttctgcgagaacaaataccttcggtccacatcaagggtgaggttaaaaacatgtgaacagagggggaccccatggggagtgaggaattggaaactgctttgatggagatggtcgagcatgacaacagacgtatgttgagtgcaaaggttgagaagcttgaaacagaggcatatgaactgcgcaaagctttttcagacaagcaagagcaagagcaagtaatgcttcagatcttgttaagaatggagcaagaacagaaagtggcagaagatgcccgcatagccgctgagcgagatgctgctgaacaaaaacacgctgctcacttgctccaggagaagtatgaagcagcaatgacagcactttcacaaatggagaagagagctgtaatggcagaaacaatgctggaagctacaaagcaataccaggttgggcaggttaaagccaaccaatctttcacttcaagttcacctcgtgcagaccatgttcctgcgaagataaatcaagaaccaaaccaaactgcacctatcaggagaatcggcctgctttctaggggacttggatggcttgacaagggcaagggaaggcagaattccaatgaaacatctggagcctaaactcatctaaagtccaggatgaagtcatagctcccaacaagatctggattgttcattaacgcttggattgcttgatcaccgtaagagtgttgaaatcagcatcgatacatgttttctcgggaagattcagctggtatattccatgaagttttgcaggaagtgtatcttgtatcatattgagttcaattgtcagataaagttttgttggtaggtcagaaaggcttctgcaagtcatcggtgtaaattttcttttattagttccattaagattgtcaatagttagtgttccaaataggagaaagaaaagaacgacttactacacacaagaaaaatttctgttagattagttacagtatcatggagttgttctggagaagagcatgttttttttatctcttcagaaatgtcaaaaccaccgaagagattctctctctgtatttttgtctgatacgtgtggctcatacattcttcagtcacagttgacatgtttgatgtaaggcaattattgtcacgaggattctgattacgaatacaacagcagaaactccactatagggaggcgttttggaaagttaattgttgtcagttcctcacaatgttattcaaaaataattttggtaaaagcatgctgtgttcctagttccccctcttgacctgtgcaggctcatgctgcacgcccgtaaacaccttccacctgattggatgcctgagcacgccaag

SEQ ID NO: 1299 - DNA, 1263 bp, Zea Mays
atggggagtgaggaattggaaactgctttgatggagatggtcgagcatgacaacagacgtatgttgagtgcaaaggttgagaagcttgaaacagaggcatatgaactgcgcaaagctttttcagacaagcaagagcaagagcaagtaatgcttcagatcttgttaagaatggagcaagaacagaaagtggcagaagatgcccgcatagccgctgagcgagatgctgctgaacaaaaacacgctgctcacttgctccaggagaagtatgaagcagcaatgacagcactttcacaaatggagaagagagctgtaatggcagaaacaatgctggaagctacaaagcaataccaggttgggcaggttaaagccaaccaatctttcacttcaagttcacctcgtgcagaccatgttcctgcgaagataaatcaagaaccaaaccaaactgcacctatcaggagaatcggcctgctttctaggggacttggatggcttgacaagggcaagcagggaaggcagaattccaatgaaacatctggagcctaaactcatctaaagtccaggatgaagtcatagctcccaacaagatctggattgttcattaacgcttggattgcttgatcaccgtaagagtgttgaaatcagcatcgatacatgttttctcgggaagattcagctggtatattccatgaagttttgcaggaagtgtatcttgtatcatattgagttcaattgtcagataaagttttgttggtaggtcagaaaggcttctgcaagtcatcggtgtaaattttcttttattagttccattaagattgtcaatagttagtgttccaaataggagaaagaaaagaacgacttactacacacaagaaaaatttctgttagattagttacagtatcatggagttgttctggagaagagcatgttttttttatctcttcagaaatgtcaaaaccaccgaagagattctctctctgtatttttgtctgatacgtgtggctcatacattcttcagtcacagttgacatgtttgatgtaaggcaattattgtcacgaggattctgattacgaatacaacagcagaaactccactatagggaggcgttttggaaagttaattgttgtcagttcctcacaatgttattcaaaaataattttggtaaaagcatgctgtgttcctagttccccctcttgacctgtgcaggctcatgctgcacgcccgtaaacaccttccacctgattggatgcctgagcacgccaag

SEQ ID NO: 1300 - DNA, 1251 bp, Zea Mays
atggggagtgaggaattggaaactgctttgatggagatggtcgagcatgacaacagacgtatgttgagtgcaaaggttgagaagcttgaaacagaggcatatgaactgcgcaaagctttttcagacaagcaagagcaagagcaaatcttgttaagaatggagcaagaacagaaagtggcagaagatgcccgcatagccgctgagcgagatgctgctgaacaaaaacacgctgctcacttgctccaggagaagtatgaagcagcaatgacagcactttcacaaatggagaagagagctgtaatggcagaaacaatgctggaagctacaaagcaataccaggttgggcaggttaaagccaaccaatctttcacttcaagttcacctcgtgcagaccatgttcctgcgaagataaatcaagaaccaaaccaaactgcacctatcaggagaatcggcctgctttctaggggacttggatggcttgacaagggcaagcagggaaggcagaattccaatgaaacatctggagcctaaactcatctaaagtccaggatgaagtcatagctcccaacaagatctggattgttcattaacgcttggattgcttgatcaccgtaagagtgttgaaatcagcatcgatacatgttttctcgggaagattcagctggtatattccatgaagttttgcaggaagtgtatcttgtatcatattgagttcaattgtcagataaagttttgttggtaggtcagaaaggcttctgcaagtcatcggtgtaaattttcttttattagttccattaagattgtcaatagttagtgttccaaataggagaaagaaaagaacgacttactacacacaagaaaaatttctgttagattagttacagtatcatggagttgttctggagaagagcatgttttttttatctcttcagaaatgtcaaaaccaccgaagagattctctctctgtatttttgtctgatacgtgtggctcatacattcttcagtcacagttgacatgtttgatgtaaggcaattattgtcacgaggattctgattacgaatacaacagcagaaactccactatagggaggcgttttggaaagttaattgttgtcagttcctcacaatgttattcaaaaataattttggtaaaagcatgctgtgttcctagttccccctcttgacctgtgcaggctcatgctgcacgcccgtaaacaccttccacctgattggatgcctgagcacgccaag

SEQ ID NO: 1301 - DNA, 1319 bp, Zea Mays
gtggcgagtggcgacagccgcataaccgcatcctggccgccgagagcccacgtaattaccccgactgcccgagctcgccggctcgctgccactaaccagccaagagtaatccagcgcccaccgcatggccgcgcgcgcacctctcatcatgccgcgcgccgcctccagcgccggcccggtcccggctgcggcgacgaccgtggccaggcgccagtccgcgcagtgtctccacgcgaggggggctgtcggcggcctcttcttcgaccagaggacagcgcggccggtccaccacctcctccctggcgccaagttcggagcgattgggagcaccgcggaggccgcgccgtcggaggggctcgcgcagaagctgcagggggtcgatgtgttcgatctgagcggcaagacggtgcccatcgttgatctgtggaaggaaaggaaggcagtggttgcgtttgcccggcatttcgggtgcgtgctgtgccgaaagagggcggaccttctcgccgcgaaacaggatgacatgcaagctgctggagttgctcttgttttaattggaccagaagtgtatgctgaccctactcactcatcgtatgacgctcttgaatttgcattcgggttgttctccacctttacgcccgcggctggcctcaagataatacagttgtacagggaaggatacaggcaggactgggaattgtcattcgagaagaacaccaggacaaaaggcggatggtatcaaggggggttaattgttgcaggtccaggtatcgataacatcctgtacatccacaaggacaaagaagccggagatgatcctgacatgcaggatgtgttgagagcttgctgttcctagaaaatcagtgtgccccacgaccacacagtcactctatatctcgttgtaaaagtcaggttgtaatcagccctcaatcttcagcgatcctgttcaggatgcatgggctctcttttttcgtaacatacgacgcacggggaaccttacgtttatgttttggtagcaagggggaaaggattgtaagggctagaatccccttgctatttaattctgagtaacaagaggattttagcccctcaaattccttttatttttcttgctcccaaacaagctcgtgcgtgtacataacatatgtatggttctgtatagaaatcgatgaagttctgagtatctgctaggaataatatataggacgtacgagactcgttgttgttgatgttctgcgagactcgttgatgttctgtgtgtgtatacatgagcatgtagcccgaggctcttttttttgcccgactgggttcgtgcctgggcc

SEQ ID NO: 1302 - DNA, 795 bp, Zea Mays
tgtggccgtatgcaagcatatatacaactcatgaagaagtgtatgctgaccctactcactcatcgtatgacgctcttgaatttgcattcgggttgttctccacctttacgcccgcggctggcctcaagataatacagttgtacagggaaggatacaggcaggactgggaattgtcattcgagaagaacaccaggacaaaaggcggatggtatcaaggggggttaattgttgcaggtccaggtatcgataacatcctgtacatccacaaggacaaagaagccggagatgatcctgacatgcaggatgtgttgagagcttgctgttcctagaaaatcagtgtgccccacgaccacacagtcactctatatctcgttgtaaaagtcaggttgtaatcagccctcaatcttcagcgatcctgttcaggatgcatgggctctcttttttcgtaacatacgacgcacggggaaccttacgtttatgttttggtagcaagggggaaaggattgtaagggctagaatccccttgctatttaattctgagtaacaagaggattttagcccctcaaattccttttatttttcttgctcccaaacaagctcgtgcgtgtacataacatatgtatggttctgtatagaaatcgatgaagttctgagtatctgctaggaataatatataggacgtacgagactcgttgttgttgatgttctgcgagactcgttgatgttctgtgtgtgtatacatgagcatgtagcccgaggctcttttttttgcccgactgggttcgtgcctgggcc

SEQ ID NO: 1303 - DNA, 2802 bp, Zea Mays
cccacgcatgattgtgcatgcttggcccgatagacccgtgggcctggtcatgtcgtgccttggcatgagcccaggtcgtatcgtgccgagcatgactagtttgctcatctatagttttgtgtcattgcggccttgagcccataagctattcggcccattagcttagcccagccgagacgccgcgcgcggcacagccctcctccggtactcggtcagtcggtcctccacactcctcaccagtcaccaccagaccaaatcgcagccgcgctcgagctaagccccgccgccgacgccgtcatctgcgccccagaaccccgtatttccctccgccgccttccgatctctcgctcctccccatgtcggagaaaaagcgccgcgccggtgcgagcgcggccggcgccgcatccagctccaagaagccgcgtgcttcctcggccgcgtcgtacgccgagtccctccgctcgaagctccgccccgacgcctccatcctggccaccctccgctccctcgcttctgcctccgcttccaaatccaaggccgccgccaggtccctcgcggaccacgacccgtgcgcggaccccgcctcctcgtacatcgtggtggccgaccaggactccacctccgtcacctcccgcatcaaccgcctcgtccttgccgccgcgcgcagcatcctctccggccggggcttctccttcgcggtgccctcgcgcgccgcctccaaccaggtctacctcccggacctcgaccgcatcgtgctcgtccgccgcgagtccgcgcgccccttcgccaacgtcgccaccgcgcgcaaggccaccatcacggcgcgagtcctctccctcgtccacgccgtcctcggcaggggcatccacgtcaccaagcgtgacctcttctacaccgacgtcaagctcttcggcgaccagacccagtctgacgccgtcctcgacgacgtctcctgcatgctcggatgcaccaggtcctcgctccacgtcgtcgcctccgagaagggcgtcgtcgtcggccgcctcgtcttcgccgacgacggggaccggatcgactgcacgcgcatgggcgtcggcggcaaggccattccgcccaacgtcgacagggtctcgggcatcgagagcgacgcgctcttcatcctcctggtggagaaggacgctgcattcatgcgactcgccgaggacaggttctacaaccgcttcccctgcatcattctgacggccaaggggcagccagatgtcgccacccggctgttcctgcggaggctcaaggttgagctgaagctgccagtgctcgcgctggtggattccgatccatacgggctcaagatcttgtcggtgtacatgtgtggttccaagaacatgtcgtatgacagtgccaatctgacgacgccggacatcaagtggctcggtgtccggccgagcgacctggacaagtacagagtgccggagcagtgccgtctccccatgaccgatcacgatatcaaggtggggaaagagctgctcgaggaggacttcgtgaagcagaatgagggctgggtgaaggagctggagacgatgcttcgcaccaagcaaaaggctgagatacaggccctcagttccttcgggttccagtacctcactgaggtctacctgcctcttaagttgcaggagcaggattggatttgagaactctccaatgctagatatcagtaatttccctagccaagataatgccctcctccgctcagtattttcaaggaccaaattggcatgaatgaagacttcgctatctagttaatcacatgtatttttgaacaccagctgttgtattatttatttctgctggagaactgttctgtggaaaacattgctgccagatatgtgctggaatttgatacataacacaggagggcggcttccaggttcaatcaaaactaatttcaacttcagctcttgcctgcacgacatcaactgcactagtttcagtaattattgcctgcacgatgtcaactgcagtagtttcagcttcagctcttgatgtcttctcatgatccgtgatgataatacgaagtggcagctcaacatgacctaggaggtattgctctttgatcttccgaagaacagatagaacaattcgagcttcaacctgcagaatacatggtattatggattacggtaagcacaaaaaacatagtgatggtttctgtaaatatcgctattcaaaatcagtcattatgttcatgtagcagatcatctgcatatcatatagcttgaattagttggatgtcatttattaccttttggaaggccacaaacatcgacaatttggttctgatcagcatctttttgcaagacttacgactttctcaagaaacaggttgaaagattctttcctgttaggttgtagatccaaattgtaaaaatcttgattatcactgccattagacaactcgtcacgcaattccactattaaaattccttgagataatgatcatttgtctgatacctggagtgggaaatcttttaaaattcaaaaacaaagggaaatcctagtcattctcacaatgtcagtctatcagaaaataggctgtcagtatgtttcctacaatggaacagtggaattagaagcggtagatacctcatgagataacaactaaagcttcagtggattacatgctctggtgatacctgtctgttgtcaaaataattgtagtctgaagcacttctagttttccattatctatggtgtattccatgaattttacattgggacatttgtatcagataaacacttgtttatttaatacaatcacgagttact

SEQ ID NO: 1304 - DNA, 828 bp, Zea Mays
gtaagctttgtctctgatgtttgtgtccactagttcaggacaagcctcagcccccacctgagggccgccttcctgatgccactaagggttctgaccacctgaggcaagtttttggcaagcagatgggcttgagcgatcaggacattgttgccctctctggtggccacaccttgggaaggtgccacaaagagcggtctggtttcgagggggcctggactacaaaccctttggtctttgacaactcttacttcaaggaacttctgagtggtgataaggagggccttcttcagctcccaagtgacaaagccctgctgagtgaccctgtcttccgccctcttgtcgagaaatatgctgcggatgagaaggctttctttgatgactacaaagaggcccacctcaagctctccgaactggggtttgctgatgcttaaatagaccctatcctggagtgatacattctgctgcatgtggtcttttgcatctggagtcaatgtgaacaagcagattgtcgtattgtctttctcgtaataaatttgtcaatgttgagcccttaggcttgaattgtgggaccctttgttcgttttcctagactctgatgctgtatgcaactgaaacgagtaaatctatgatcttaaggctgcagtatgttcttgtgttactgtgcgtttatctagtttccgttggttcggttcacagcttgtgtggtttaataggttgtgcttgtgctgcgtgactggtcgtgcaacttgagtccgagtcttccatagttccaattttctcttggcggctaacacacttgatgtgccttgctatcctatgatcggagta

SEQ ID NO: 1305 - DNA, 1994 bp, Zea Mays
ctgggctagacagaccggctcatgttggcaaaatattctgggccgtatcatgttggcaaaaatatactgactccggtccgcaactccggatgtgtcggcgaccaggcaaagctccgtgtcctctcgtctcgtgtgactgacgaccaggtgggagggccataaggcctttagcgcggcggcggcaatggcgcccacggcctgcctccggacccccttcttccccgcccgtgcccgatccaccaacgccaccccgttctcgccacaccgccgcttttctctcaaatgcagcgcctccaacggtgacaactccaaccccaactccatctccatctctcccacctcgccgcctcggctaacggtgtcggacggcgtcgagtctgtggacgttaacgggttgcgtcgcccgccagcgcccgcctccgtccccgccgcccgcgatccccactggctgcctcgtccgctcacaagtgcggacgtcatggaggtggacgggaaggggctcaaggttgcttaccagggttgtgctggagcgtacagcgaagcagcagcaaagaaggcgtacccgaattgtgagactgtgccctgtgagcacttcgacactgcatttcaggctgttcaaaactgggtagctgatagggccgtactgccacttgagaattcattgggaggtagcatacataggaattatgatcttttgcttcggcatagtttgcacattgtaggagaagttcgccttgcggttcgccattgcttattagccaatcctggcgtgaagattgaaaacctgaaaagtgctatgagtcatccccaggctcttgcgcaatgtgagcacacattaacatcactaggaattgagcatagagaagctgttgacgacactgctggtgcagcaaagattgttgcagaacatatgctccaggacactggtgctattgctagttcgttggcggctaaactgtatggattggatgttcttgctgagaatattcaggatgacaaagataatgtcacccgttttatgatgctagctcgagaacccatcatacctcgcactgataaaccatttaagacaagcatagtcttttcactagaagaaggacctggacagctctttaaggcacttgctgtatttgcactgagggacatcaacctcacaaagattgaaagtcgtccacacaaggaaaggcctcttcgggtatctgatgactgttcctcactcttaaagaactttgattaccttttttatgttgaccttgaagcatcaatggctgatccaaagactcagaatgctcttggaaatctgaaggagtttgcaacatttttaagagttcttggaagctatcctacagatgtgaatgaaccttagattgaaagtactgcagattacatactggattagcaggaataggcaaaatgagtaaaaggatctactctagaccagtagggaccggtgcattcgaggctcacatttggttgtgatattgagaggaaagtctgatgttttgctggtgatttttctgatgatttaagtcttctccaatctcctatggataccaaagggttgaatattcggaaatacttcaatgtacaaggtttatatgtttcatgttggagaatctgtgtcatggtagcatgcaggttgctaaagcacagttacagtgaaataatgggacaatgtctaagaacaccgccctttttttgtgacaatataataagaactgaataactgatgtttccatgtctgggcgattgggccggcgttcctcaaaaatcatatttgctgtcattacgcgctccatgcacatacatctggcggtggtcacgttggccaagcatcgccaaactttccttctgtagaaggaagtcatttggcgcttcttatttttttctattgatggaacggattttggtgctccttgattgccttgatcagtgccaggtcaaattcggcagttcaagtttcgagcaggttagtcggtttggttcaggttcct

SEQ ID NO: 1306 - DNA, 1942 bp, Zea Mays
ctgggctagacagaccggctcatgttggcaaaatattctgggccgtatcatgttggcaaaaatatactgactccggtccgcaactccggatgtgtcggcgaccaggcaaagctccgtgtcctctcgtctcgtgtgactgacgaccaggtgggagggccataaggcctttagcgcggcggcggcaatggcgcccacggcctgcctccggacccccttcttccccgcccgtgcccgatccaccaacgccaccccgttctcgccacaccgccgcttttctctcaaatgcagcgcctccaacggtgacaactccaaccccaactccatctccatctctcccacctcgccgcctcggctaacggtgtcggacggcgtcgagtctgtggacgttaacgggttgcgtcgcccgccagcgcccgcctccgtccccgccgcccgcgatccccactggctgcctcgtccgctcacaagtgcggacgtcatggaggtggacgggaaggggctcaaggttgcttaccagggttgtgctggagcgtacagcgaagcagcagcaaagaaggcgtacccgaattgtgagactgtgccctgtgagcacttcgacactgcatttcaggctgttcaaaactgggtagctgatagggccgtactgccacttgagaattcattgggaggtagcatacataggaattatgatcttttgcttcggcatagtttgcacattgtaggagaagttcgccttgcggttcgccattgcttattagccaatcctggcgtgaagattgaaaacctgaaaagtgctatgagtcatccccaggctcttgcgcaatgtgagcacacattaacatcactaggaattgagcatagagaagctgttgacgacactgctggtgcagcaaagattgttgcagaacatatgctccaggacactggtgctattgctagttcgttggcggctaaactgtatggattggatgttcttgctgagaatattcaggatgacaaagataatgtcacccgttttatgatgctagctcgagaacccatcatacctcgcactgataaaccatttaagacaagcatagtcttttcactagaagaaggacctggacagctctttaaggcacttgctgtatttgcactgagggacatcaacctcacaaagattgaaagtcgtccacacaaggaaaggcctcttcgggaactttgattaccttttttatgttgaccttgaagcatcaatggctgatccaaagactcagaatgctcttggaaatctgaaggagtttgcaacatttttaagagttcttggaagctatcctacagatgtgaatgaaccttagattgaaagtactgcagattacatactgagtaaaaggatctactctagaccagtagggaccggtgcattcgaggctcacatttggttgtgatattgagaggaaagtctgatgttttgctggtgatttttctgatgatttaagtcttctccaatctcctatggataccaaagggttgaatattcggaaatacttcaatgtacaaggtttatatgtttcatgttggagaatctgtgtcatggtagcatgcaggttgctaaagcacagttacagtgaaataatgggacaatgtctaagaacaccgccctttttttgtgacaatataataagaactgaataactgatgtttccatgtctgggcgattgggccggcgttcctcaaaaatcatatttgctgtcattacgcgctccatgcacatacatctggcggtggtcacgttggccaagcatcgccaaactttccttctgtagaaggaagtcatttggcgcttcttatttttttctattgatggaacggattttggtgctccttgattgccttgatcagtgccaggtcaaattcggcagttcaagtttcgagcaggttagtcggtttggttcaggttcct

SEQ ID NO: 1307 - DNA, 1984 bp, Zea Mays
ctgggctagacagaccggctcatgttggcaaaatattctgggccgtatcatgttggcaaaaatatactgactccggtccgcaactccggatgtgtcggcgaccaggcaaagctccgtgtcctctcgtctcgtgtgactgacgaccaggtgggagggccataaggcctttagcgcggcggcggcaatggcgcccacggcctgcctccggacccccttcttccccgcccgtgcccgatccaccaacgccaccccgttctcgccacaccgccgcttttctctcaaatgcagcgcctccaacggtgacaactccaaccccaactccatctccatctctcccacctcgccgcctcggctaacggtgtcggacggcgtcgagtctgtggacgttaacgggttgcgtcgcccgccagcgcccgcctccgtccccgccgcccgcgatccccactggctgcctcgtccgctcacaagtgcggacgtcatggaggtggacgggaaggggctcaaggttgcttaccagggttgtgctggagcgtacagcgaagcagcagcaaagaaggcgtacccgaattgtgagactgtgccctgtgagcacttcgacactgcatttcaggctgttcaaaactgggtagctgatagggccgtactgccacttgagaattcattgggaggtagcatacataggaattatgatcttttgcttcggcatagtttgcacattgtaggagaagttcgccttgcggttcgccattgcttattagccaatcctggcgtgaagattgaaaacctgaaaagtgctatgagtcatccccaggctcttgcgcaatgtgagcacacattaacatcactaggaattgagcatagagaagctgttgacgacactgctggtgcagcaaagcattctttcctagattgttgcagaacatatgctccaggacactggtgctattgctagttcgttggcggctaaactgtatggattggatgttcttgctgagaatattcaggatgacaaagataatgtcacccgttttatgatgctagctcgagaacccatcatacctcgcactgataaaccatttaagacaagcatagtcttttcactagaagaaggacctggacagctctttaaggcacttgctgtatttgcactgagggacatcaacctcacaaagattgaaagtcgtccacacaaggaaaggcctcttcgggtatctgatgactgttcctcactcttaaagaactttgattaccttttttatgttgaccttgaagcatcaatggctgatccaaagactcagaatgctcttggaaatctgaaggagtttgcaacatttttaagagttcttggaagctatcctacagatgtgaatgaaccttagattgaaagtactgcagattacatactgagtaaaaggatctactctagaccagtagggaccggtgcattcgaggctcacatttggttgtgatattgagaggaaagtctgatgttttgctggtgatttttctgatgatttaagtcttctccaatctcctatggataccaaagggttgaatattcggaaatacttcaatgtacaaggtttatatgtttcatgttggagaatctgtgtcatggtagcatgcaggttgctaaagcacagttacagtgaaataatgggacaatgtctaagaacaccgccctttttttgtgacaatataataagaactgaataactgatgtttccatgtctgggcgattgggccggcgttcctcaaaaatcatatttgctgtcattacgcgctccatgcacatacatctggcggtggtcacgttggccaagcatcgccaaactttccttctgtagaaggaagtcatttggcgcttcttatttttttctattgatggaacggattttggtgctccttgattgccttgatcagtgccaggtcaaattcggcagttcaagtttcgagcaggttagtcggtttggttcaggttcct

SEQ ID NO: 1308 - DNA, 657 bp, Zea Mays
cgtcacggactcacgctacgcgttcgtccgacatccctaggcttcaccgctggccggattagcaggaataggcaaaatgagtaaaaggatctactctagaccagtagggaccggtgcattcgaggctcacatttggttgtgatattgagaggaaagtctgatgttttgctggtgatttttctgatgatttaagtcttctccaatctcctatggataccaaagggttgaatattcggaaatacttcaatgtacaaggtttatatgtttcatgttggagaatctgtgtcatggtagcatgcaggttgctaaagcacagttacagtgaaataatgggacaatgtctaagaacaccgccctttttttgtgacaatataataagaactgaataactgatgtttccatgtctgggcgattgggccggcgttcctcaaaaatcatatttgctgtcattacgcgctccatgcacatacatctggcggtggtcacgttggccaagcatcgccaaactttccttctgtagaaggaagtcatttggcgcttcttatttttttctattgatggaacggattttggtgctccttgattgccttgatcagtgccaggtcaaattcggcagttcaagtttcgagcaggttagtcggtttggttcaggttcct

SEQ ID NO: 1309 - DNA, 1701 bp, Zea Mays
caaacatagccttattaggttcggaaataaaactgtaccctatctatatcacgtacattatctatacgtcatatgtatagatagatgaaatgatcagtatccatctcctctccgttctcaccaccgacaggggcgtctgtctcctccccgctgccataaacgcaggctcacgcggacgcctccctcccgtgccaagcgcccaagaccaaacccaccagcacagcaccaattcaaccgcgacccaacccaccgccccgcaccccattcccgcaccctcctcccccagatctccggccgcgacgacgccatgacggccaagggcggcgccacgccgtcccccggcggcgcgggcccccgcggcggggaacggccgcctcttcaccgtcgggctggtcaccgcctggtactcctccaacatcggcgtgctcctgctcaacaagtacctcctcagcaactacggcttcaagtaccccatcttcctcaccatgtgccacatgtccgcctgcgccctgctctcctacgccgccatcgcctggctgcgcgtcgtgcccatgcagctcgtgcgctcccgcgtccagctcgccaagatcgccgcgctcagcctcgtcttctgcggctccgtcgtctccggcaacgtctcgctgcgctacctccccgtctccttcaaccaggcggtcggcgccaccacgcctttcttcaccgccgtcttcgcctacatcatgaccgtcaagcgcgagtcctgggtcacctacctcaccctcgtgcccgtcgtcaccggagtcatcatcgccagcggcggcgagcctagctttcatctgtttggattcatcatgtgcataggagcaactgcagcaagggcgttgaagacagtattgcaaggaattcttctgtcttccgatggggagaagcttaattctatgaatctgttgttgtacatggctccaatcgctgttatcttcttgcttcctgcaactatctttatggaggataatgttgtcggcgttacaattgagcttgcaaagaaggatttcacgattgtttggttgcttttgttcaattcttgcttgtcgtattttgtcaatttgaccaatttcttggtgaccaagcatactagtgcactgactctacaggttctcggaaatgcaaagggtgcggtggcagttgtcgtctcgattatgatattcaggaatcccgtgtccataacaggaatgctcggttatactctcacagtttttggcgtcattctttacagtgaatcgaaaaagcgcagcaacaagccatgaataccctaggagacagtaaatatgggaaatcatttctttgtcctgtcagtgcctagagctaatatatgatgagaaatcacatcggtggcgaccacaacaaatcctatgccatactgcctcagcaattggacatcaaggatagaagtccaataactaccttggcatatgggaggcattttgttttatggcgttgatggatagaatataaatatttttttgtgtgtgttagagaactatggctcacactgccagcattggttgatacgtttagctcttgggaaattgcctcttgtattcatcttctgctgctgcagtttccattttgttttgttgtgaagaccacctataccacactttgatccaggttccgggacctaattaatatattgtgacactgaattgatgctcaaaaaaaaaa

SEQ ID NO: 1310 - DNA, 1933 bp, Zea Mays
cggcgatcagatggtgcgcttgtgcagagggtcgacttgtagccatggtggtacaagtcatgatttttactggtgtatttttgatccgacagtaaccgcatatagtgtcgtctatgtctcagtatggaaaattgcatggtcatgaaggctgtgttaataccgtaagcttcaaccctgctggagacctccttgtgtctggttcagacgacacaaacatcatactatgggactggctttctaaaactaaaaagcttgtttacccttctggtcaccaagataatgtcttccatgctcgtgtgatgccgtttactgatgacagcaccatcgtaactgttgctgctgatggccaggtacgagtaggacgactaaaggagggcggtgaagtcacaactaaactagttggggagcacgattcacgggtgcataagatggctattgaaccaggaaacccttacatattttacagttgtggagaggatggcttggtacaacattttgacttaagaagcgattcagcaacaaagcttttcacctgctgttctttcttgaatgacagacgccgtgtaaaactgaatagcattgtcattgacccacagaatccttactatttttcaattggtggttccgacgagtatgcacgtttgtatgacatgaggaaattccagttggatggttcaagaaacacaaaccagcctgtagataccttctgccctaagcaccttattaagggtgcgagtgcgagggtccacatcaccagtattgcatattcctatgcaagggagatacttgtatcctacaatgatgagcttatctatttgttccaacacaatataggtcttggtccaaatcctgtgtcggcagagccagagtttttcaacatgcttgatcagccacaagcatacagagggcacaggaattttcgaactgttaagggagtcagtttctttggacaacatgatgaatatgttgtgagtggatcagattgcgggaatgtattcatatggaggaagaagggaggtgaattgatcaggatgatgaatggtgacaaaagtgtagttaactgcattgaaccccacccgcatttcccatttatggctactagtgggattgataacactgttaagctttggactcctgcagctaaaaaattgattatgccgctgcctaaaaatgcaaagcaaataatagccgctaatgaacttgagaggacagttcatatttctcaagcaacagcgacactttcatctgatgtcatgatgcatgtgttgaggttgttacgtaggagagattctgaaatgaatatcgagaatgagccggctagtgcagatttggccagtgatgacgatgaggctttcgactttggatttgacgatgcggaaaggaacgaaagggaaaactctgatcccagagaatgcaacatgacatagctaaaacaactggggattttttttttgcagcctgggcctggccctgcctctatgttggagtaaactgaataggtcttagatttcagttctacatagtaaggtgtgctgaatgggcctgaccgcctgatacacatgggaggactatacaggtcgtgattattaatggagaaactaaacgggtagagccacatcctaccactcggttattctgctctagttttaacgcatgttcaatcttctcgattgccgtatacctagcctagtaaaataagttgtgcaccccagcctgtgtgattatgaactgtaaacctgaatttttagttatcatcaggcaatatgtacataggttttccgtagtgtggaaatgttgagaagtttgttgtttcatctgtctggcaatgtgttctcatacgtaatctggaagtacggtgtcttggtatttccgtctgcttccgagccaacgtcctcgactcctgtttgccaattttgcctatagaactagatca

SEQ ID NO: 1311 - DNA, 1800 bp, Zea Mays
cctgcgcctcgactagcagattctaccatttaaaaatcccacaaaatccccaacccctcctatctcctagtgcattccaccgctcaccatggccgccgccgccatcgaagcagctggtcgccggaagggtagctgcttcttggaagtcggccgccgcgagatcggctcttcattcccccgcgtctcttcccgccgaatcagcggctccgagcatatagtgtcgtctatgtctcagtatggaaaattgcatggtcatgaaggctgtgttaataccgtaagcttcaaccctgctggagacctccttgtgtctggttcagacgacacaaacatcatactatgggactggctttctaaaactaaaaagcttgtttacccttctggtcaccaagataatgtcttccatgctcgtgtgatgccgtttactgatgacagcaccatcgtaactgttgctgctgatggccagaatccttactatttttcaattggtggttccgacgagtatgcacgtttgtatgacatgaggaaattccagttggatggttcaagaaacacaaaccagcctgtagataccttctgccctaagcaccttattaagggtgcgagtgcgagggtccacatcaccagtattgcatattcctatgcaagggagatacttgtatcctacaatgatgagcttatctatttgttccaacacaatataggtcttggtccaaatcctgtgtcggcagagccagagtttttcaacatgcttgatcagccacaagcatacagagggcacaggaattttcgaactgttaagggagtcagtttctttggacaacatgatgaatatgttgtgagtggatcagattgcgggaatgtattcatatggaggaagaagggaggtgaattgatcaggatgatgaatggtgacaaaagtgtagttaactgcattgaaccccacccgcatttcccatttatggctactagtgggattgataacactgttaagctttggactcctgcagctaaaaaattgattatgccgctgcctaaaaatgcaaagcaaataatagccgctaatgaacttgagaggacagttcatatttctcaagcaacagcgacactttcatctgatgtcatgatgcatgtgttgaggttgttacgtaggagagattctgaaatgaatatcgagaatgagccggctagtgcagatttggccagtgatgacgatgaggctttcgactttggatttgacgatgcggaaaggaacgaaagggaaaactctgatcccagagaatgcaacatgacatagctaaaacaactggggattttttttttgcagcctgggcctggccctgcctctatgttggagtaaactgaataggtcttagatttcagttctacatagtaaggtgtgctgaatgggcctgaccgcctgatacacatgggaggactatacaggtcgtgattattaatggagaaactaaacgggtagagccacatcctaccactcggttattctgctctagttttaacgcatgttcaatcttctcgattgccgtatacctagcctagtaaaataagttgtgcaccccagcctgtgtgattatgaactgtaaacctgaatttttagttatcatcaggcaatatgtacataggttttccgtagtgtggaaatgttgagaagtttgttgtttcatctgtctggcaatgtgttctcatacgtaatctggaagtacggtgtcttggtatttccgtctgcttccgagccaacgtcctcgactcctgtttgccaattttgcctatagaactagatca

SEQ ID NO: 1312 - DNA, 1799 bp, Zea Mays
tcgactagcagattctaccatttaaaaatcccacaaaatccccaacccctcctatctcctagtgcattccaccgctcaccatggccgccgccgccatcgaagcagctggtcgccggaagggtagctgcttcttggaagtcggccgccgcgagatcggctcttcattcccccgcgtctcttcccgccgaatcagcggctccgagggagtagcatatagtgtcgtctatgtctcagtatggaaaattgcatggtcatgaaggctgtgttaataccgtaagcttcaaccctgctggagacctccttgtgtctggttcagacgacacaaacatcatactatgggactggctttctaaaactaaaaagcttgtttacccttctggtcaccaagataatgtcttccatgctcgtgtgatgccgtttactgatgacagcaccatcgtaactgttgctgctgatggccagaatccttactatttttcaattggtggttccgacgagtatgcacgtttgtatgacatgaggaaattccagttggatggttcaagaaacacaaaccagcctgtagataccttctgccctaagcaccttattaagggtgcgagtgcgagggtccacatcaccagtattgcatattcctatgcaagggagatacttgtatcctacaatgatgagcttatctatttgttccaacacaatataggtcttggtccaaatcctgtgtcggcagagccagagtttttcaacatgcttgatcagccacaagcatacagagggcacaggaattttcgaactgttaagggagtcagtttctttggacaacatgatgaatatgttgtgagtggatcagattgcgggaatgtattcatatggaggaagaagggaggtgaattgatcaggatgatgaatggtgacaaaagtgtagttaactgcattgaaccccacccgcatttcccatttatggctactagtgggattgataacactgttaagctttggactcctgcagctaaaaaattgattatgccgctgcctaaaaatgcaaagcaaataatagccgctaatgaacttgagaggacagttcatatttctcaagcaacagcgacactttcatctgatgtcatgatgcatgtgttgaggttgttacgtaggagagattctgaaatgaatatcgagaatgagccggctagtgcagatttggccagtgatgacgatgaggctttcgactttggatttgacgatgcggaaaggaacgaaagggaaaactctgatcccagagaatgcaacatgacatagctaaaacaactggggattttttttttgcagcctgggcctggccctgcctctatgttggagtaaactgaataggtcttagatttcagttctacatagtaaggtgtgctgaatgggcctgaccgcctgatacacatgggaggactatacaggtcgtgattattaatggagaaactaaacgggtagagccacatcctaccactcggttattctgctctagttttaacgcatgttcaatcttctcgattgccgtatacctagcctagtaaaataagttgtgcaccccagcctgtgtgattatgaactgtaaacctgaatttttagttatcatcaggcaatatgtacataggttttccgtagtgtggaaatgttgagaagtttgttgtttcatctgtctggcaatgtgttctcatacgtaatctggaagtacggtgtcttggtatttccgtctgcttccgagccaacgtcctcgactcctgtttgccaattttgcctatagaactagatca

SEQ ID NO: 1313 - DNA, 1796 bp, Zea Mays
atcttttcttaatataataccggttttatatcacctactagtggcagcgagcggccgaagcacccccacacggccacaccacgcggcgagccacggctacgaagaaaaatcaccatgctgccacgcaaacaagattagacgtacgcttggtcgggaagtgttagcattagtgcgtcactaaactcgcacgccacctaatgatttacatttgctgctgcgtctgggatatataaaggaaaaaaagcgtgacaccaacccgacaccggctcccctcgctggctctcctccgcagctccgctcccctgctcgccacctcccgcccattttaaaccaccaccactaccaaactttgcttgcctccccagtccccaccaccgcttggctgccgcttgctgctgcggtcgtctagctaagctagcttacatagccagcttcgacacgtcgcgacgcagattaagcggcacgaggccagcctccgggagctggtggtggagctaggcaggcggcgttgtgcttgctggcttctgtgatggggtcgtccacggatcacgccgccggtgcccgtggcaagaagcaggggtcgcagctgtggaagaaggcgctgctgcattcctccctctgcttcgtgatgggcttcttcaccggcttcgcgccgtcgtccgtgtccgactggacgtccgcggcggcggcggcggggggccgggtgggcagcagccacgtggtccgggcgctgccggcgggcggggagcggcaccaccagcgcaacgtggcgctcggacacatcgagcaccaccgcctcgccggcgtcgtcctcttcgcgggcctcggcgacgtgttcgacctccgcttcttcgacgagctcaggggaatcagcgcgttcggcgcgtggccggtggcgacgatgcggcgcggcgagaggaaggtggtcgtccggggccccgcgtgcagctcggccgcggtcaccggctggttctcccaggacttgggcggcagcggcaccgcggccgcctccgcatccacggcgaggcctggtgagctggacgtccacggcttcgccttcaacagctccgtgctctgggaccccgagcgctggggccgctacccaacctccgagcccgacaagtcccaggactccatgaagttcgtccagcaagtggtcctggaagattttagcaaggtgaagggcatcccttccgactgctcagaggtcatggtatggcacgtcgatacggctgcgccgtctttgcagaacaagaagagaagatagagagctcaactctagaacagaacggggacgagctggatggaggacggctgagtgtgttcgttgtacatgcatgtctacgccgtcaagaatcaagatgctggttgccccctgctcggtacctgcaaagaaggaaaatttttgagtttctcaccggaggatggatcagcctctgaacaccacccccccccccccttctccatcatgatgtacaattttccactgttcttttctttttttttctaaaagaagttgtgatatatgtatatttttttcttttctagagggtttaggtgaatacatacataatacccccttgaagtgcctctcaacaaggatgtaatggaaagaaaggcaagctaaagaccagcttaacaatgatggtacacatgagaatgttctcttctgttcagaagttatttccaatacaagatatccagttcgtagcaaagatagacgcctgtactgttcagaagttattccaataccaaatagcatgcttcagaagcacacaaaaactatggcattgttc

SEQ ID NO: 1314 - DNA, 1392 bp, Zea Mays
ggtcgggaagtgttagcattagtgcgtcactaaactcgcacgccacctaatgatttacatttgctgctgcgtctgggatatataaaggaaaaaaagcgtgacaccaacccgacaccggctcccctcgctggctctcctccgcagctccgctcccctgctcgccacctcccgcccattttaaaccaccaccactaccaaactttgcttgcctccccagtccccaccaccgcttggctgccgcttgctgctgcggtcgtctagctaagctagcttacatagccagcttcgacacgtcgcgacgcagattaagcggcacgaggccagcctccgggagctggtggtggagctaggcaggcggcgttgtgcttgctggcttctgtgatggggtcgtccacggatcacgccgccggtgcccgtggcaagaagcaggggtcgcagctgtggaagaaggcgctgctgcattcctccctctgcttcgtgatgggcttcttcaccggcttcgcgccgtcgtccgtgtccgactggacgtccgcggcggcggcggcggggggccgggtgggcagcagccacgtggtccgggcgctgccggcgggcggggagcggcaccaccagcgcaacgtggcgctcggacacatcgagcaccaccgcctcgccggcgtcgtcctcttcgcgggcctcggcgacgtgttcgacctccgcttcttcgacgagctcaggggaatcaggactccatgaagttcgtccagcaagtggtcctggaagattttagcaaggtgaagggcatcccttccgactgctcagaggtcatggtatggcacgtcgatacggctgcgccgtctttgcagaacaagaagagaagatagagagctcaactctagaacagaacggggacgagctggatggaggacggctgagtgtgttcgttgtacatgcatgtctacgccgtcaagaatcaagatgctggttgccccctgctcggtacctgcaaagaaggaaaatttttgagtttctcaccggaggatggatcagcctctgaacaccacccccccccccccttctccatcatgatgtacaattttccactgttcttttctttttttttctaaaagaagttgtgatatatgtatatttttttcttttctagagggtttaggtgaatacatacataatacccccttgaagtgcctctcaacaaggatgtaatggaaagaaaggcaagctaaagaccagcttaacaatgatggtacacatgagaatgttctcttctgttcagaagttatttccaatacaagatatccagttcgtagcaaagatagacgcctgtactgttcagaagttattccaataccaaatagcatgcttcagaagcacacaaaaactatggcattgttc

SEQ ID NO: 1315 - DNA, 1243 bp, Zea Mays
gggatccccttgtcaccaaatcaaccctcagtgatcattagtgctgtttctgctcagcatgccccagtctcaaaaaccactcttctttcttcttcttttttcccccgagaacgtaaatccgctcctctttcaagtttgctttgcttcaaagcctgccttttgttggtgcttagctatcatgcttcgcgattcattcaacaaatgtgcgtccagtctgtctatctctgatgccaaccaccgttttcatccgcatgatttaaccatttgttttaataagtgatgagtgggtttttttttgggtggcattaatgctcacagtgcgcgttcggcgcgtggccggtggcgacgatgcggcgcggcgagaggaaggtggtcgtccggggccccgcgtgcagctcggccgcggtcaccggctggttctcccaggacttgggcggcagcggcaccgcggccgcctccgcatccacggcgaggcctggtgagctggacgtccacggcttcgccttcaacagctccgtgctctgggaccccgagcgctggggccgctacccaacctccgagcccgacaagtcccaggactccatgaagttcgtccagcaagtggtcctggaagattttagcaaggtgaagggcatcccttccgactgctcagaggtcatggtatggcacgtcgatacggctgcgccgtctttgcagaacaagaagagaagatagagagctcaactctagaacagaacggggacgagctggatggaggacggctgagtgtgttcgttgtacatgcatgtctacgccgtcaagaatcaagatgctggttgccccctgctcggtacctgcaaagaaggaaaatttttgagtttctcaccggaggatggatcagcctctgaacaccacccccccccccccttctccatcatgatgtacaattttccactgttcttttctttttttttctaaaagaagttgtgatatatgtatatttttttcttttctagagggtttaggtgaatacatacataatacccccttgaagtgcctctcaacaaggatgtaatggaaagaaaggcaagctaaagaccagcttaacaatgatggtacacatgagaatgttctcttctgttcagaagttatttccaatacaagatatccagttcgtagcaaagatagacgcctgtactgttcagaagttattccaataccaaatagcatgcttcagaagcacacaaaaactatggcattgttc

SEQ ID NO: 1316 - DNA, 1248 bp, Zea Mays
gttcgcgctgccctcgccgacccacattggcgtcgtgctatggaggagtacgcggccctcttggccaaccacacctgggacctggtgcagcgtccaccaggcaccaacgtggtcaccggcaagtggctatttcgccacaagctgacctcggatggctccctcaaccgctacaaggctcgttgggtccttcgggggcttcaccccagcgccccgaagtggattacgacgagaccttcagcccccgtcgtcaagttcgccactgttcgcgccgtcctctccctcgccctctcccgcgactgggcgatccaccagctcgacgtcaagaatgccttcctccatggcactctgacggagactgtctactgcaaccagcccaccggcttcgtcgacgctgaccgtccggatctggtctgccggctgaaccggtccctgtacggcctcaagcaagcgccacgggcatggtacagtcgcttcgcctcctacctggcctccatcggcttcgtcgaggccaagtcggacacgtccctgctcatctaccggcgcggcaacgacaccgtctacctcctgctctacgtcgacgacattgtgctcacggcatccactgccgaccttcttcaccgcacgatcgtcgcccttcagcgggaattcgccatgaaggacctagggcccctacaccacttcctcggcatcaccgccgagcgccggcctcagggtctcttcctccaccagcgccagtacgccatcgacatcctgaagcgggctggcatgtctgactgcaagccttgctccacgcctgtcgacacccaggcgaagctctgaggacgacgggcctccggtcgccgacgcgacgtcctaccggagcctgaccggcgcgctccagtacctcaccttctccaggcccgacatcgcttacgccgtccagcaagtgtgcctgcatatgcacactccgcgggagccccatctcaccgcgctcaagcggattctgcgctacctccgcggctccctcgactacggcctcctactccgaccatccccgacgtcggagcttgtggtctacaccgatgctgactgggctggctgtcccgacacacgccggtccacctccggttacgtcgtgttcctgggcgccaacctcgtctcttgggccgccaaacggcagcccgtcgtctctcgctccaacgctgaggccgagtaccgcgccgtggccaacggcgtggcagaggcctcctggctacgacaactcctcca

SEQ ID NO: 1317 - DNA, 408 bp, Zea Mays
ctcagcgtccccaccacactgcaattcgctgacatcttcaccaaggggttaccgtcgagtgtatttttagactttcgctccagtctcaacatctgtacaggatagagttgtgactacgggggggtgttagaatacccgtttggccgtttagggtttggggtttttccctatgtaattactgtctcgcccctctgtaatgggtctggcccagtactcaagtctattaatacaccacccaacccttgttagggttatgggttcacattccaacaattagtgaatggatttagcaaaatcttcgaagaagaggcaacctactgatctagaagtaaattgtacacaaaagtgagcacttgtctgatatacaaatggtttaaatatcaaattcgaatttaaattaaatttact

SEQ ID NO: 1318 - DNA, 1782 bp, Zea Mays
cccgtggacactagtggggaagaaagcaaccacggaaccaccgaagagacccaccggaaactcctacagccctaagcacacagcgtagcgggacccacaagtcagccaaacgtctcaagctcgccatttcgcctccgtttccaactcccagtgccgttttaggtgctgggaatggcaatgaaactccagtagagcttccaaagaaacttaccatctgtcccccaagtgctgatagaatccaacttcctgatggacgacatctggcttatgaagaacaaggagtctcagctaacagagcaagattttcactgattgctcctcattcttttctttcatcaaggctaacaggaattcctggaattagtgcatctcttctagaagaatttggagtacgacttgtgacctatgatcttcctggttttggtgaaagtgatccacacataggccggaatctcaattcttctgcactggacatgctctatctggctaatgctctcaatattccagagaagttctgggttgtgggctattctggaggtggcatgcatgcctggagtgctcttcattacattcctgatcgaattgctggtgcagcaatgttcgcacctatggcaaatccatatgactccaagatgacgaaagatgagaggagtaaaacatgggatagctggtcaacgaaacggaaactgatgcacattttagctcggaggtttccgtcactgctaccgttcttttatcgccaaaccttcctttctggaaagcaaggacagctggagagttggttgtcactgtcattagggaagaaggacaaaactttactggaaggtcctgtgttcaatgcattctgggaaaggaatgttgcagaggctgtgcgccagggagatgcaaggccatttgtagaggaagctgtgctgcaagtatctgactggggtttcagcttatctgacatccaaatgcagaagaaagaggctgggggattttttgagctcatcaagtctctgttcaatcaggccgaaagagagtgggtgggatttctgggcccaatacatatatggcaggggatggacgaccgagtggtctcgccggcagtggccgaatttgtgcggcgggtggttccaggagccacggtccacaagcttcttgacgaaggtcacttctcatacttctgcttctgcgacgagtgccacaggcagatattctccaccctcttcggcattccccagggccctatcaaccctgcaccgccgcagccaggcgaggtggtttcagagctcaccgaggaaacaacagtgccagacaatgccacagatgaggaacaaggaaaatcaggcctgccctgattcaagatcggtttcaggacccacaagtatagatacgagaccttactgctactaaaacacaatacctcaaatagacgggcttttcttcgctgcccatgggagcagcctgtgaatcgagctgctcctcttgcggaagtcgtgaaggcaaagcattggatggaggaggttgtgccgtctcagttcgatgtacaaaaatgctcatcacaaattcgcacggcacctgctcggtgcgcttttagtatagtcggtattacaattcgattaacctgttatgactcagctatattataggcttctttttgcacattatggttgaattgcgcccgcagctgaatttttgttcctttactagctatggcatgatccaacatcccgatccagcttaaggccagtaatgtattcgcctcttgcatgatgtaaaaaagttcgtctcttgctgcgg

SEQ ID NO: 1319 - DNA, 1726 bp, Zea Mays
cccgtggacactagtggggaagaaagcaaccacggaaccaccgaagagacccaccggaaactcctacagccctaagcacacagcgtagcgggacccacaattttaggtgctgggaatggcaatgaaactccagtagagcttccaaagaaacttaccatctgtcccccaagtgctgatagaatccaacttcctgatggacgacatctggcttatgaagaacaaggagtctcagctaacagagcaagattttcactgattgctcctcattcttttctttcatcaaggctaacaggaattcctggaattagtgcatctcttctagaagaatttggagtacgacttgtgacctatgatcttcctggttttggtgaaagtgatccacacataggccggaatctcaattcttctgcactggacatgctctatctggctaatgctctcaatattccagagaagttctgggttgtgggctattctggaggtggcatgcatgcctggagtgctcttcattacattcctgatcgaattgctggtgcagcaatgttcgcacctatggcaaatccatatgactccaagatgacgaaagatgagaggagtaaaacatgggatagctggtcaacgaaacggaaactgatgcacattttagctcggaggtttccgtcactgctaccgttcttttatcgccaaaccttcctttctggaaagcaaggacagctggagagttggttgtcactgtcattagggaagaaggacaaaactttactggaaggtcctgtgttcaatgcattctgggaaaggaatgttgcagaggctgtgcgccagggagatgcaaggccatttgtagaggaagctgtgctgcaagtatctgactggggtttcagcttatctgacatccaaatgcagaagaaagaggctgggggattttttgagctcatcaagtctctgttcaatcaggccgaaagagagtgggtgggatttctgggcccaatacatatatggcaggggatggacgaccgagtggtctcgccggcagtggccgaatttgtgcggcgggtggttccaggagccacggtccacaagcttcttgacgaaggtcacttctcatacttctgcttctgcgacgagtgccacaggcagatattctccaccctcttcggcattccccagggccctatcaaccctgcaccgccgcagccaggcgaggtggtttcagagctcaccgaggaaacaacagtgccagacaatgccacagatgaggaacaaggaaaatcaggcctgccctgattcaagatcggtttcaggacccacaagtatagatacgagaccttactgctactaaaacacaatacctcaaatagacgggcttttcttcgctgcccatgggagcagcctgtgaatcgagctgctcctcttgcggaagtcgtgaaggcaaagcattggatggaggaggttgtgccgtctcagttcgatgtacaaaaatgctcatcacaaattcgcacggcacctgctcggtgcgcttttagtatagtcggtattacaattcgattaacctgttatgactcagctatattataggcttctttttgcacattatggttgaattgcgcccgcagctgaatttttgttcctttactagctatggcatgatccaacatcccgatccagcttaaggccagtaatgtattcgcctcttgcatgatgtaaaaaagttcgtctcttgctgcgg

SEQ ID NO: 1320 - DNA, 2229 bp, Zea Mays
cccgtggacactagtggggaagaaagcaaccacggaaccaccgaagagacccaccggaaactcctacagccctaagcacacagcgtagcgggacccacaagtcagccaaacgtctcaagctcgccatttcgcctccgtttccaactcccagtgccggtcttccactcctcccttcttcgcctcccaatttccaaacctctctcttgggactgggagcacgtacacgcggaggaaaagcgatcggcgccgcggcggcaagatgactgcggcggcgacgatgacgtggcacgaggacctggccactctcgtgggggacacggacgttcacctcaccggcgccggggggcacgcgccggcgccggcggatgttacgccggcgggggccgggtggtacggggaggaggaagaggtgagggcggaggaggggtgggcgcagcaggcgaaggggttcgcggagtcgacggcggagatgctgcgggagctgggccgtgggctgtgggacgtcgccgcgcagagcctcgccggcgccgaggacagcgagctcgggcggcggctgcggaagcgggcggcggccacgggggagcgcctcagcttcatgaacgagtaccttcccgaggagcgcgacccagtgaggtgttggctcatcgtcgccgcagtctcattcgtcacgctcctagttttaggtgctgggaatggcaatgaaactccagtagagcttccaaagaaacttaccatctgtcccccaagtgctgatagaatccaacttcctgatggacgacatctggcttatgaagaacaaggagtctcagctaacagagcaagattttcactgattgctcctcattcttttctttcatcaaggctaacaggaattcctggaattagtgcatctcttctagaagaatttggagtacgacttgtgacctatgatcttcctggttttggtgaaagtgatccacacataggccggaatctcaattcttctgcactggacatgctctatctggctaatgctctcaatattccagagaagttctgggttgtgggctattctggaggtggcatgcatgcctggagtgctcttcattacattcctgatcgaattgctggtgcagcaatgttcgcacctatggcaaatccatatgactccaagatgacgaaagatgagaggagtaaaacatgggatagctggtcaacgaaacggaaactgatgcacattttagctcggaggtttccgtcactgctaccgttcttttatcgccaaaccttcctttctggaaagcaaggacagctggagagttggttgtcactgtcattagggaagaaggacaaaactttactggaaggtcctgtgttcaatgcattctgggaaaggaatgttgcagaggctgtgcgccagggagatgcaaggccatttgtagaggaagctgtgctgcaagtatctgactggggtttcagcttatctgacatccaaatgcagaagaaagaggctgggggattttttgagctcatcaagtctctgttcaatcaggccgaaagagagtgggtgggatttctgggcccaatacatatatggcaggggatggacgaccgagtggtctcgccggcagtggccgaatttgtgcggcgggtggttccaggagccacggtccacaagcttcttgacgaagggccctatcaaccctgcaccgccgcagccaggcgaggtggtttcagagctcaccgaggaaacaacagtgccagacaatgccacagatgaggaacaaggaaaatcaggcctgccctgattcaagatcggtttcaggacccacaagtatagatacgagaccttactgctactaaaacacaatacctcaaatagacgggcttttcttcgctgcccatgggagcagcctgtgaatcgagctgctcctcttgcggaagtcgtgaaggcaaagcattggatggaggaggttgtgccgtctcagttcgatgtacaaaaatgctcatcacaaattcgcacggcacctgctcggtgcgcttttagtatagtcggtattacaattcgattaacctgttatgactcagctatattataggcttctttttgcacattatggttgaattgcgcccgcagctgaatttttgttcctttactagctatggcatgatccaacatcccgatccagcttaaggccagtaatgtattcgcctcttgcatgatgtaaaaaagttcgtctcttgctgcgg

SEQ ID NO: 1321 - DNA, 1581 bp, Zea Mays
gttgagggttttattttgagttttggattttttaggtgctgggaatggcaatgaaactccagtagagcttccaaagaaacttaccatctgtcccccaagtgctgatagaatccaacttcctgatggacgacatctggcttatgaagaacaaggagtctcagctaacagagcaagattttcactgattgctcctcattcttttctttcatcaaggctaacaggaattcctggaattagtgcatctcttctagaagaatttggagtacgacttgtgacctatgatcttcctggttttggtgaaagtgatccacacataggccggaatctcaattcttctgcactggacatgctctatctggctaatgctctcaatattccagagaagttctgggttgtgggctattctggaggtggcatgcatgcctggagtgctcttcattacattcctgatcgaattgctggtgcagcaatgttcgcacctatggcaaatccatatgactccaagatgacgaaagatgagaggagtaaaacatgggatagctggtcaacgaaacggaaactgatgcacattttagctcggaggtttccgtcactgctaccgttcttttatcgccaaaccttcctttctggaaagcaaggacagctggagagttggttgtcactgtcattagggaagaaggacaaaactttactggaaggtcctgtgttcaatgcattctgggaaaggaatgttgcagaggctgtgcgccagggagatgcaaggccatttgtagaggaagctgtgctgcaagtatctgactggggtttcagcttatctgacatccaaatgcagaagaaagaggctgggggattttttgagctcatcaagtctctgttcaatcaggccgaaagagagtgggtgggatttctgggcccaatacatatatggcaggggatggacgaccgagtggtctcgccggcagtggccgaatttgtgcggcgggtggttccaggagccacggtccacaagcttcttgacgaagggccctatcaaccctgcaccgccgcagccaggcgaggtggtttcagagctcaccgaggaaacaacagtgccagacaatgccacagatgaggaacaaggaaaatcaggcctgccctgattcaagatcggtttcaggacccacaagtatagatacgagaccttactgctactaaaacacaatacctcaaatagacgggcttttcttcgctgcccatgggagcagcctgtgaatcgagctgctcctcttgcggaagtcgtgaaggcaaagcattggatggaggaggttgtgccgtctcagttcgatgtacaaaaatgctcatcacaaattcgcacggcacctgctcggtgcgcttttagtatagtcggtattacaattcgattaacctgttatgactcagctatattataggcttctttttgcacattatggttgaattgcgcccgcagctgaatttttgttcctttactagctatggcatgatccaacatcccgatccagcttaaggccagtaatgtattcgcctcttgcatgatgtaaaaaagttcgtctcttgctgcgg

SEQ ID NO: 1322 - DNA, 1172 bp, Zea Mays
gtttatttcaaggcataggaaaatcagatgcaagatgtgtggtatcttgtacaacagacaatgacgcaaggaataagtggcactggattttagttagataaatatttttttaaaaaaataatattgagctgaaaattcgaagcatctatgtttatcttccatgtgctactatacactcaacatctgttccacataggacaaaactttactggaaggtcctgtgttcaatgcattctgggaaaggaatgttgcagaggctgtgcgccagggagatgcaaggccatttgtagaggaagctgtgctgcaagtatctgactggggtttcagcttatctgacatccaaatgcagaagaaagaggctgggggattttttgagctcatcaagtctctgttcaatcaggccgaaagagagtgggtgggatttctgggcccaatacatatatggcaggggatggacgaccgagtggtctcgccggcagtggccgaatttgtgcggcgggtggttccaggagccacggtccacaagcttcttgacgaaggtcacttctcatacttctgcttctgcgacgagtgccacaggcagatattctccaccctcttcggcattccccagggccctatcaaccctgcaccgccgcagccaggcgaggtggtttcagagctcaccgaggaaacaacagtgccagacaatgccacagatgaggaacaaggaaaatcaggcctgccctgattcaagatcggtttcaggacccacaagtatagatacgagaccttactgctactaaaacacaatacctcaaatagacgggcttttcttcgctgcccatgggagcagcctgtgaatcgagctgctcctcttgcggaagtcgtgaaggcaaagcattggatggaggaggttgtgccgtctcagttcgatgtacaaaaatgctcatcacaaattcgcacggcacctgctcggtgcgcttttagtatagtcggtattacaattcgattaacctgttatgactcagctatattataggcttctttttgcacattatggttgaattgcgcccgcagctgaatttttgttcctttactagctatggcatgatccaacatcccgatccagcttaaggccagtaatgtattcgcctcttgcatgatgtaaaaaagttcgtctcttgctgcgg

SEQ ID NO: 1323 - DNA, 670 bp, Zea Mays
aacctacaaacgtatattcttaaataccttccccggcgcgatggccgcggccgcggcagaaacacagatgggcgacggggctccgccgccaggggctctatactccttcggaacgccgtggccggagctcaatcaaggcctcacctacaccgacacgttccgttgcgctgatgcggacgccgctaccaccttgattgagttctactctactaaccacaagagctcggcgccattgccagggtggatcaagaggattcgtaatgggcagataaccgttgatggtgaagttgtcactgatccagatatgactctgggatgggtctaagttggtatatcatcgttttccttggcaggagccatttgcgccgtatttgctggaagtgctctacgaggatgatgacatggttgcccttaataagccttctggcttgcaagttctgcctaaaggactgtttcagcagcgaactgttttagcacagcttcaattgaaagactggaagatggcctcatcttgccggttcaagagaaaagatgtgcagtcacatccagtacctgttcatcgtttagggaggggaacatcaggcctcctgctttgtgccaagacaaaagttgccaaagttcgacttgcatcttattttgctgaagttcaagtgattgagatgatttatag

SEQ ID NO: 1324 - DNA, 742 bp, Zea Mays
aacctacaaacgtatattcttaaataccttccccggcgcgatggccgcggccgcggcagaaacacagatgggcgacggggctccgccgccaggggctctatactccttcggaacgccgtggccggagctcaatcaaggcctcacctacaccgacacgttccgttgcgctgatgcggacgccgctaccaccttgattgagttctactctactaaccacaagagctcggcgccattgccagggtggatcaagaggattcgtaatgggcagataaccgttgatggtgaagttgtcactgatccagatatgactctggagccatttgcgccgtatttgctggaagtgctctacgaggatgatgacatggttgcccttaataagccttctggcttgcaagttctgcctaaaggactgtttcagcagcgaactgttttagcacagcttcaattgaaagactggaagatggcctcatcttgccggttcaagagaaaagatgtgcagtcacatccagtacctgttcatcgtttagggaggggaacatcaggcctcctgctttgtgccaagacaaaagttgccaaagttcgacttgcatcttattttgctgaaggtgctataaatgctgcaaagaaaagggataaatcagagttcagtgaagagcgaaaaatttcaaaattttatcgagccttagtgactggcatacttgatgatgatgaggtactatctcttatttgatacagtgttctg

SEQ ID NO: 1325 - DNA, 731 bp, Zea Mays
aacctacaaacgtatattcttaaataccttccccggcgcgatggccgcggccgcggcagaaacacagatgggcgacggggctccgccgccaggggctctatactccttcggaacgccgtggccggagctcaatcaaggcctcacctacaccgacacgttccgttgcgctgatgcggacgccgctaccaccttgattgagttctactctactaaccacaagagctcggcgccattgccagggtggatcaagaggattcgtaatgggcagataaccgttgatggtgaagttgtcactgatccagatatgactctggagccatttgcgccgtatttgctggaagtgctctacgaggatgatgacatggttgcccttaataagccttctggcttgcaagttctgcctaaaggactgtttcagcagcgaactgttttagcacagcttcaattgaaagactggaagatggcctcatcttgccggttcaagagaaaagatgtgcagtcacatccagtacctgttcatcgtttagggaggggaacatcaggcctcctgctttgtgccaagacaaaagttgccaaagttcgacttgcatcttattttgctgaaggtgctataaatgctgcaaagaaaagagttcagtgaagagcgaaaaatttcaaaattttatcgagccttagtgactggcatacttgatgatgatgaggtactatctcttatttgatacagtgttctg

SEQ ID NO: 1326 - DNA, 3981 bp, Zea Mays
aacctacaaacgtatattcttaaataccttccccggcgcgatggccgcggccgcggcagaaacacagatgggcgacggggctccgccgccaggggctctatactccttcggaacgccgtggccggagctcaatcaaggcctcacctacaccgacacgttccgttgcgctgatgcggacgccgctaccaccttgattgagttctactctactaaccacaagagctcggcgccattgccagggtggatcaagaggattcgtaatgggcagataaccgttgatggtgaagttgtcactgatccagatatgactctgggatgggtctaagttggtatatcatcgttttccttggcaggagccatttgcgccgtatttgctggaagtgctctacgaggatgatgacatggttgcccttaataagccttctggcttgcaagttctgcctaaaggactgtttcagcagcgaactgttttagcacagcttcaattgaaagactggaagatggcctcatcttgccggttcaagagaaaagatgtgcagtcacatccagtacctgttcatcgtttagggaggggaacatcaggcctcctgctttgtgccaagacaaaagttgccaaagttcgacttgcatcttattttgctgaaggtgctataaatgctgcaaagaaaagggataaatcagagttcagtgaagagcgaaaaatttcaaaattttatcgagccttagtgactggcatacttgatgatgatgaggttgttgttacgcaacctatagggttagttcattatcctggagttgcagagggactttatgcagcatgttcctcaggaaagccagcaatgagcaaagtatgtgttcttgagagacttgcacaccaaaatcacacactggtccaggttgaaattcattcaggacgacctcaccaaataaggatacaccttgcatacattgggcacccacttgtagatgaccctctctatggtattggtgggcaccccaattttgttgagccagaatctactggcacagatagttcttttgcatctgatgggggttatgagagacctttgcaacctgttcctggagactgtgggtatcacctgcatgcacattggctggttctttgccacccaacaaccaataaggtgattaaacatatatataatcttgggcagatggtaaaaattaccgctcctcttccacaaattctacagacacgggaggaacgccgcgctgcagctgagcaaaccggtggttgaacatgtagaatcttgaaaatgtatatttcttgaagttagcaagcagcaggttctcacagacgttagagttagacactcagacctctgctcctctgtcaactgtacaacggcgagctatggttccgcttgatgcagcgccgtctcatgtgacgtttaggccaggctaccgagatggagaaataacattaggtatttaaaaataaatagagtactagctaatgagctcacacaaatcttgttcagtctattcgaagcgcaattcgctgaaaaaatgtttcttcgctcacacaaatatgatttggtttgaaatggagggaggtgataattgtagaagaagatttccaatgaattcatttgcgtgcaatggacttggcgttacgcataactcccaaacattcctccccccaaaacctcccgaacaaagaggattcgaggggaattaaaggagggcgcggcggtggcgagcaccttccgctcagcgaggtagctgcacctgcaccggcgagctagccgcggcctctatgctcgcggggatctgaactagccgccgctgccccatcgcggcgatgactgcggcgccctctcctcatatcccattcccaacacaacactcattttctccattcccacgtaaaagatagaaaggcgagcatcgcagtgcacacgcgcaatggaaggctcgccggtggcgcgcctcccggaggctaattctctccccgacggcttcgtccccgacagcgagagctcagacacggacgcggctcctccctcctccgcgcccatagttgacgatgcaatcgactccgatagtcccgacgccaccaaccccggtggtgaggaaaccctaagtgatccctcccttcccgcgtccaccgccgaagatgcctcctcagccgccgctgctgaagcattggacacactttgtctggacgttgttgcggatccggagcgcgctctaggggagcacggacccaccactgctgcaagaggtgattctctgtagtcctctctcgattttagttttcttcattcaccatgagtttcctgagcctagtcactatttctgaatggcagccattactatagcggttcagtgcaaacataggaaaataaggttttcatcgtggtagagtttgagctccagatgtgccttacgggctgtgtttccttaccatgttttaatgttcttttgtcaggtgaaggatccttgaaggaaaatcgtgcatcagagcaagtgggcgctccaagtgatcaaaaggtggtcaaggttgtttatcatatactgtaagtgtttgcaagaagaattagtctttgcgagatgggattgatttgcttgcttttgtaggggagcggtgagccaaaacgcaaggtcatcaagcatagcaagcttgagaaggacaaagagttatttcaactagcccagcaataccacaaagtggttgcagaaagggatcaagccattgcagtcaaagatagactagaatctctttgtagggaatttcagcgtcaaaacaaaatgctaaaggaagagtgccaaagggtatcgacagagggacagaacatgcgtacggaattgtctgaaaaatttgatcatgccataaagggtgtcagtgccaaacttgaggagcagagagttgagcgcatttctcagctagaagagaacaatacgttgagaagtaaactgaaagaccttgctgatcaatataacattactcagcagaaatatgctcaccaattgaaagagaaaatgctggaacttgaacttgctgatctgagacttcaacaacatcaagagaaggctgctcaggaacatacacaaatgcagttgtatgctgaacaagtttctcagcttatgactactgagaagaacctgcggttgcaactagcttctgacggggaaagatttcagcactttcaggatgccttgtcaaaaagcaatgaagtctttgaaacttacaagcaggagatggaaaagatgatttcagtgataaagaatcttaagaaggagaacgaatttctgaagggaaaatgtgagaactcagatattgctattgtgaagctcattgaagagcgtgagctaacaaagaagcaaatagagaaattgaaaaatcaaagggagaagctcgaatccctgtgtcgaacactacaggcagaaaggaaacaaggcccctccgccagtattccagatgccccttctagccaagaagtgtcagcgacaagtcaagaatcttaacattccagttgccccttctagccaagatgtgtcagcaacaagtcaagaatcttggcagttgtgcttgtcaatataccgttggtgccagctacagcttgcggagatttctgaagcctgacattcagctgtcaacctaccgtccgtctcaggccttttgatattgtggctagagcctagtggtgcattcctactcggtgttgttaccaagcatataagctctcggctgattccatctcttgtttttgtttgagacaaagcctgctgcattggagataattagatttttgccaatcataatattgtcttcttgttataattaccactgtgtctatgaattgtgggtctagctgggtctatgaaatgtgagtctgatgacaattttacaaacttgtttcttgctgatggtaaatatcagaatctctcgctgcattgtgagtgtgttaattattgtttgagacaaagctctcgcggctcccgttttggaatgat

SEQ ID NO: 1327 - DNA, 3875 bp, Zea Mays
aacctacaaacgtatattcttaaataccttccccggcgcgatggccgcggccgcggcagaaacacagatgggcgacggggctccgccgccaggggctctatactccttcggaacgccgtggccggagctcaatcaaggcctcacctacaccgacacgttccgttgcgctgatgcggacgccgctaccaccttgattgagttctactctactaaccacaagagctcggcgccattgccagggtggatcaagaggattcgtaatgggcagataaccgttgatggtgaagttgtcactgatccagatatgactctggtggatgggtctaagttggtatatcatcgttttccttggcaggagccatttgcgccgtatttgctggaagtgctctacgaggatgatgacatggttgcccttaataagccttctggcttgcaagttctgcctaaaggactgtttcagcagcgaactgttttagcacagcttcaattgaaagactggaagatggcctcatcttgccggttcaagagaaaagatgtgcagtcacatccagtacctgttcatcgtttagggaggggaacatcaggcctcctgctttgtgccaagacaaaagttgccaaagttcgacttgcatcttattttgctgaaggtgctataaatgctgcaaagaaaagggataaatcagagttcagtgaagagcgaaaaatttcaaaattttatcgagccttagtgactggcatacttgatgatgatgaggttgttgttacgcaacctatagggttagttcattatcctggagttgcagagggactttatgcagcatgttcctcaggaaagccagcaatgagcaaagtatgtgttcttgagagacttgcacaccaaaatcacacactggtccaggttgaaattcattcaggacgacctcaccaaataaggatacaccttgcatacattgggcacccacttgtagatgaccctctctatggtattggtgggcaccccaattttgttgagccagaatctactggcacagatagttcttttgcatctgatgggggttatgagagacctttgcaacctgttcctggagactgtgggtatcacctgcatgcacattggctggttctttgccacccaacaaccaataagatggtaaaaattaccgctcctcttccacaaattctacagacacgggaggaacgccgcgctgcagctgagcaaaccggtggttgaacatgtagaatcttgaaaatgtatatttcttgaagttagcaagcagcaggttctcacagacgttagagttagacactcagacctctgctcctctgtcaactgtacaacggcgagctatggttccgcttgatgcagcgccgtctcatgtgacgtttaggccaggctaccgagatggagaaataacattaggtatttaaaaataaatagagtactagctaatgagctcacacaaatcttgttcagtctattcgaagcgcaattcgctgaaaaaatgtttcttcgctcacacaaatatgatttggtttgaaatggagggaggtgataattgtagaagaagatttccaatgaattcatttgcgtgcaatggacttggcgttacgcataactcccaaacattcctccccccaaaacctcccgaacaaagaggattcgaggggaattaaaggagggcgcggcggtggcgagcaccttccgctcagcgaggtagctgcacctgcaccggcgagctagccgcggcctctatgctcgcggggatctgaactagccgccgctgccccatcgcggcgatgactgcggcgccctctcctcatatcccattcccaacacaacactcattttctccattcccacgtaaaagatagaaaggcgagcatcgcagtgcacacgcgcaatggaaggctcgccggtggcgcgcctcccggaggctaattctctccccgacggcttcgtccccgacagcgagagctcagacacggacgcggctcctccctcctccgcgcccatagttgacgatgcaatcgactccgatagtcccgacgccaccaaccccggtggtgaggaaaccctaagtgatccctcccttcccgcgtccaccgccgaagatgcctcctcagccgccgctgctgaagcattggacacactttgtctggacgttgttgcggatccggagcgcgctctaggggagcacggacccaccactgctgcaagaggtgattctctgtagtcctctctcgattttagttttcttcattcaccatgagtttcctgagcctagtcactatttctgaatggcagccattactatagcggttcagtgcaaacataggaaaataaggttttcatcgtggtagagtttgagctccagatgtgccttacgggctgtgtttccttaccatgttttaatgttcttttgtcaggtgaaggatccttgaaggaaaatcgtgcatcagagcaagtgggcgctccaagtgatcaaaaggtggtcaaggggagcggtgagccaaaacgcaaggtcatcaagcatagcaagcttgagaaggacaaagagttatttcaactagcccagcaataccacaaagtggttgcagaaagggatcaagccattgcagtcaaagatagactagaatctctttgtagggaatttcagcgtcaaaacaaaatgctaaaggaagagtgccaaagggtatcgacagagggacagaacatgcgtacggaattgtctgaaaaatttgatcatgccataaagggtgtcagtgccaaacttgaggagcagagagttgagcgcatttctcagctagaagagaacaatacgttgagaagtaaactgaaagaccttgctgatcaatataacattactcagcagaaatatgctcaccaattgaaagagaaaatgctggaacttgaacttgctgatctgagacttcaacaacatcaagagaaggctgctcaggaacatacacaaatgcagttgtatgctgaacaagtttctcagcttatgactactgagaagaacctgcggttgcaactagcttctgacggggaaagatttcagcactttcaggatgccttgtcaaaaagcaatgaagtctttgaaacttacaagcaggagatggaaaagatgatttcagtgataaagaatcttaagaaggagaacgaatttctgaagggaaaatgtgagaactcagatattgctattgtgaagctcattgaagagcgtgagctaacaaagaagcaaatagagaaattgaaaaatcaaagggagaagctcgaatccctgtgtcgaacactacaggcagaaaggaaacaaggcccctccgccagtattccagatgccccttctagccaagaagtgtcagcgacaagtcaagaatcttaacattccagttgccccttctagccaagatgtgtcagcaacaagtcaagaatcttggcagttgtgcttgtcaatataccgttggtgccagctacagcttgcggagatttctgaagcctgacattcagctgtcaacctaccgtccgtctcaggccttttgatattgtggctagagcctagtggtgcattcctactcggtgttgttaccaagcatataagctctcggctgattccatctcttgtttttgtttgagacaaagcctgctgcattggagataattagatttttgccaatcataatattgtcttcttgttataattaccactgtgtctatgaattgtgggtctagctgggtctatgaaatgtgagtctgatgacaattttacaaacttgtttcttgctgatggtaaatatcagaatctctcgctgcattgtgagtgtgttaattattgtttgagacaaagctctcgcggctcccgttttggaatgat

SEQ ID NO: 1328 - DNA, 3655 bp, Zea Mays
aacctacaaacgtatattcttaaataccttccccggcgcgatggccgcggccgcggcagaaacacagatgggcgacggggctccgccgccaggggctctatactccttcggaacgccgtggccggagctcaatcaaggcctcacctacaccgacacgttccgttgcgctgatgcggacgccgctaccaccttgattgagttctactctactaaccacaagagctcggcgccattgccagggtggatcaagaggattcgtaatgggcagataaccgttgatggtgaagttgtcactgatccagatatgactctgggatgggtctaagttggtatatcatcgttttccttggcaggagccatttgcgccgtatttgctggaagtgctctacgaggatgatgacatggttgcccttaataagccttctggcttgcaagttctgcctaaaggactgtttcagcagcgaactgttttagcacagcttcaattgaaagactggaagatggcctcatcttgccggttcaagagaaaagatgtgcagtcacatccagtacctgttcatcgtttagggaggggaacatcaggcctcctgctttgtgccaagacaaaagttgccaaagttcgacttgcatcttattttgctgaaggtgctataaatgctgcaaagaaaagagttcagtgaagagcgaaaaatttcaaaattttatcgagccttagtgactggcatacttgatgatgatgaggttgttgttacgcaacctatagggttagttcattatcctggagttgcagagggactttatgcagcatgttcctcaggaaagccagcaatgagcaaagtatgtgttcttgagagacttgcacaccaaaatcacacactggtccaggttgaaattcattcaggacgacctcaccaaataaggatacaccttgcatacattgggcacccacttgtagatgaccctctctatggtattggtgggcaccccaattttgttgagccagaatctactggcacagatagttcttttgcatctgatgggggttatgagagacctttgcaacctgttcctggagactgtgggtatcacctgcatgcacattggctggttctttgccacccaacaaccaataagatggtaaaaattaccgctcctcttccacaaattctacagacacgggaggaacgccgcgctgcagctgagcaaaccggtggttgaacatgtagaatcttgaaaatgtatatttcttgaagttagcaagcagcaggttctcacagacgttagagttagacactcagacctctgctcctctgtcaactgtacaacggcgagctatggttccgcttgatgcagcgccgtctcatgtgacgtttaggccaggctaccgagatggagaaataacattaggtatttaaaaataaatagagtactagctaatgagctcacacaaatcttgttcagtctattcgaagcgcaattcgctgaaaaaatgtttcttcgctcacacaaatatgatttggtttgaaatggagggaggtgataattgtagaagaagatttccaatgaattcatttgcgtgcaatggacttggcgttacgcataactcccaaacattcctccccccaaaacctcccgaacaaagaggattcgaggggaattaaaggagggcgcggcggtggcgagcaccttccgctcagcgaggtagctgcacctgcaccggcgagctagccgcggcctctatgctcgcggggatctgaactagccgccgctgccccatcgcggcgatgactgcggcgccctctcctcatatcccattcccaacacaacactcattttctccattcccacgtaaaagatagaaaggcgagcatcgcagtgcacacgcgcaatggaaggctcgccggtggcgcgcctcccggaggctaattctctccccgacggcttcgtccccgacagcgagagctcagacacggacgcggctcctccctcctccgcgcccatagttgacgatgcaatcgactccgatagtcccgacgccaccaaccccggtggtgaggaaaccctaagtgatccctcccttcccgcgtccaccgccgaagatgcctcctcagccgccgctgctgaagcattggacacactttgtctggacgttgttgcggatccggagcgcgctctaggggagcacggacccaccactgctgcaagaggtgaaggatccttgaaggaaaatcgtgcatcagagcaagtgggcgctccaagtgatcaaaaggtggtcaaggggagcggtgagccaaaacgcaaggtcatcaagcatagcaagcttgagaaggacaaagagttatttcaactagcccagcaataccacaaagtggttgcagaaagggatcaagccattgcagtcaaagatagactagaatctctttgtagggaatttcagcgtcaaaacaaaatgctaaaggaagagtgccaaagggtatcgacagagggacagaacatgcgtacggaattgtctgaaaaatttgatcatgccataaagggtgtcagtgccaaacttgaggagcagagagttgagcgcatttctcagctagaagagaacaatacgttgagaagtaaactgaaagaccttgctgatcaatataacattactcagcagaaatatgctcaccaattgaaagagaaaatgctggaacttgaacttgctgatctgagacttcaacaacatcaagagaaggctgctcaggaacatacacaaatgcagttgtatgctgaacaagtttctcagcttatgactactgagaagaacctgcggttgcaactagcttctgacggggaaagatttcagcactttcaggatgccttgtcaaaaagcaatgaagtctttgaaacttacaagcaggagatggaaaagatgatttcagtgataaagaatcttaagaaggagaacgaatttctgaagggaaaatgtgagaactcagatattgctattgtgaagctcattgaagagcgtgagctaacaaagaagcaaatagagaaattgaaaaatcaaagggagaagctcgaatccctgtgtcgaacactacaggcagaaaggaaacaaggcccctccgccagtattccagatgccccttctagccaagaagtgtcagcgacaagtcaagaatcttaacattccagttgccccttctagccaagatgtgtcagcaacaagtcaagaatcttggcagttgtgcttgtcaatataccgttggtgccagctacagcttgcggagatttctgaagcctgacattcagctgtcaacctaccgtccgtctcaggccttttgatattgtggctagagcctagtggtgcattcctactcggtgttgttaccaagcatataagctctcggctgattccatctcttgtttttgtttgagacaaagcctgctgcattggagataattagatttttgccaatcataatattgtcttcttgttataattaccactgtgtctatgaattgtgggtctagctgggtctatgaaatgtgagtctgatgacaattttacaaacttgtttcttgctgatggtaaatatcagaatctctcgctgcattgtgagtgtgttaattattgtttgagacaaagctctcgcggctcccgttttggaatgat

SEQ ID NO: 1329 - DNA, 3657 bp, Zea Mays
aacctacaaacgtatattcttaaataccttccccggcgcgatggccgcggccgcggcagaaacacagatgggcgacggggctccgccgccaggggctctatactccttcggaacgccgtggccggagctcaatcaaggcctcacctacaccgacacgttccgttgcgctgatgcggacgccgctaccaccttgattgagttctactctactaaccacaagagctcggcgccattgccagggtggatcaagaggattcgtaatgggcagataaccgttgatggtgaagttgtcactgatccagatatgactctgggatgggtctaagttggtatatcatcgttttccttggcaggagccatttgcgccgtatttgctggaagtgctctacgaggatgatgacatggttgcccttaataagccttctggcttgcaagttctgcctaaaggactgtttcagcagcgaactgttttagcacagcttcaattgaaagactggaagatggcctcatcttgccggttcaagagaaaagatgtgcagtcacatccagtacctgttcatcgtttagggaggggaacatcaggcctcctgctttgtgccaagacaaaagttgccaaagttcgacttgcatcttattttgctgaaggtgctataaatgctgcaaagaaaagggataaatcagagttcagtgaagagcgaaaaatttcaaaattttatcgagccttagtgactggcatacttgatgatgatgaggttgttgttacgcaacctatagggttagttcattatcctggagttgcagagggactttatgcagcatgttcctcaggaaagccagcaatgagcaaagtatgtgttcttgagagacttgcacaccaaaatcacacactggtccaggttgaaattcattcaggacgacctcaccaaataaggatacaccttgcatacattgggcacccacttgtagatgaccctctctatggtattggtgggcaccccaattttgttgagccagaatctactggcacagatagttcttttgcatctgatgggggttatgagagacctttgcaacctgttcctggagactgtgggtatcacctgcatgcacattggctggttctttgccacccaacaaccaataagatggtaaaaattaccgctcctcttccacaaattctacagacacgggaggaacgccgcgctgcagctgagcaaaccggtggttgaacatgtagaatcttgaaaatgtatatttcttgaagttagcaagcagcaggttctcacagacgttagagttagacactcagacctctgctcctctgtcaactgtacaacggcgagctatggttccgcttgatgcagcgccgtctcatgtgacgtttaggccaggctaccgagatggagaaataacattaggtatttaaaaataaatagagtactagctaatgagctcacacaaatcttgttcagtctattcgaagcgcaattcgctgaaaaaatgtttcttcgctcacacaaatatgatttggtttgaaatggagggaggtgataattgtagaagaagatttccaatgaattcatttgcgtgcaatggacttggcgttacgcataactcccaaacattcctccccccaaaacctcccgaacaaagaggattcgaggggaattaaaggagggcgcggcggtggcgagcaccttccgctcagcgaggtagctgcacctgcaccggcgagctagccgcggcctctatgctcgcggggatctgaactagccgccgctgccccatcgcggcgatgactgcggcgccctctcctcatatcccattcccaacacaacactcattttctccattcccacgtaaaagatagaaaggcgagcatcgcagtgcacacgcgcaatggaaggctcgccggtggcgcgcctcccggaggctaattctctccccgacggcttcgtccccgacagcgagagctcagacacggacgcggctcctccctcctccgcgcccatagttgacgatgcaatcgactccgatagtcccgacgccaccaaccccggtggtgaggaaaccctaagtgatccctcccttcccgcgtccaccgccgaagatgcctcctcagccgccgctgctgaagcattggacacactttgtctggacgttgttgcggatccggagcgcgctctaggggagcacggacccaccactgctgcaagaggtgaaggatccttgaaggaaaatcgtgcatcagagcaagtgggcgctccaagtgatcaaaaggggagcggtgagccaaaacgcaaggtcatcaagcatagcaagcttgagaaggacaaagagttatttcaactagcccagcaataccacaaagtggttgcagaaagggatcaagccattgcagtcaaagatagactagaatctctttgtagggaatttcagcgtcaaaacaaaatgctaaaggaagagtgccaaagggtatcgacagagggacagaacatgcgtacggaattgtctgaaaaatttgatcatgccataaagggtgtcagtgccaaacttgaggagcagagagttgagcgcatttctcagctagaagagaacaatacgttgagaagtaaactgaaagaccttgctgatcaatataacattactcagcagaaatatgctcaccaattgaaagagaaaatgctggaacttgaacttgctgatctgagacttcaacaacatcaagagaaggctgctcaggaacatacacaaatgcagttgtatgctgaacaagtttctcagcttatgactactgagaagaacctgcggttgcaactagcttctgacggggaaagatttcagcactttcaggatgccttgtcaaaaagcaatgaagtctttgaaacttacaagcaggagatggaaaagatgatttcagtgataaagaatcttaagaaggagaacgaatttctgaagggaaaatgtgagaactcagatattgctattgtgaagctcattgaagagcgtgagctaacaaagaagcaaatagagaaattgaaaaatcaaagggagaagctcgaatccctgtgtcgaacactacaggcagaaaggaaacaaggcccctccgccagtattccagatgccccttctagccaagaagtgtcagcgacaagtcaagaatcttaacattccagttgccccttctagccaagatgtgtcagcaacaagtcaagaatcttggcagttgtgcttgtcaatataccgttggtgccagctacagcttgcggagatttctgaagcctgacattcagctgtcaacctaccgtccgtctcaggccttttgatattgtggctagagcctagtggtgcattcctactcggtgttgttaccaagcatataagctctcggctgattccatctcttgtttttgtttgagacaaagcctgctgcattggagataattagatttttgccaatcataatattgtcttcttgttataattaccactgtgtctatgaattgtgggtctagctgggtctatgaaatgtgagtctgatgacaattttacaaacttgtttcttgctgatggtaaatatcagaatctctcgctgcattgtgagtgtgttaattattgtttgagacaaagctctcgcggctcccgttttggaatgat

SEQ ID NO: 1330 - DNA, 3659 bp, Zea Mays
aacctacaaacgtatattcttaaataccttccccggcgcgatggccgcggccgcggcagaaacacagatgggcgacggggctccgccgccaggggctctatactccttcggaacgccgtggccggagctcaatcaaggcctcacctacaccgacacgttccgttgcgctgatgcggacgccgctaccaccttgattgagttctactctactaaccacaagagctcggcgccattgccagggtggatcaagaggattcgtaatgggcagataaccgttgatggtgaagttgtcactgatccagatatgactctggtggatgggtctaagttggtatatcatcgttttccttggcaggagccatttgcgccgtatttgctggaagtgctctacgaggatgatgacatggttgcccttaataagccttctggcttgcaagttctgcctaaaggactgtttcagcagcgaactgttttagcacagcttcaattgaaagactggaagatggcctcatcttgccggttcaagagaaaagatgtgcagtcacatccagtacctgttcatcgtttagggaggggaacatcaggcctcctgctttgtgccaagacaaaagttgccaaagttcgacttgcatcttattttgctgaaggtgctataaatgctgcaaagaaaagggataaatcagagttcagtgaagagcgaaaaatttcaaaattttatcgagccttagtgactggcatacttgatgatgatgaggttgttgttacgcaacctatagggttagttcattatcctggagttgcagagggactttatgcagcatgttcctcaggaaagccagcaatgagcaaagtatgtgttcttgagagacttgcacaccaaaatcacacactggtccaggttgaaattcattcaggacgacctcaccaaataaggatacaccttgcatacattgggcacccacttgtagatgaccctctctatggtattggtgggcaccccaattttgttgagccagaatctactggcacagatagttcttttgcatctgatgggggttatgagagacctttgcaacctgttcctggagactgtgggtatcacctgcatgcacattggctggttctttgccacccaacaaccaataagatggtaaaaattaccgctcctcttccacaaattctacagacacgggaggaacgccgcgctgcagctgagcaaaccggtggttgaacatgtagaatcttgaaaatgtatatttcttgaagttagcaagcagcaggttctcacagacgttagagttagacactcagacctctgctcctctgtcaactgtacaacggcgagctatggttccgcttgatgcagcgccgtctcatgtgacgtttaggccaggctaccgagatggagaaataacattaggtatttaaaaataaatagagtactagctaatgagctcacacaaatcttgttcagtctattcgaagcgcaattcgctgaaaaaatgtttcttcgctcacacaaatatgatttggtttgaaatggagggaggtgataattgtagaagaagatttccaatgaattcatttgcgtgcaatggacttggcgttacgcataactcccaaacattcctccccccaaaacctcccgaacaaagaggattcgaggggaattaaaggagggcgcggcggtggcgagcaccttccgctcagcgaggtagctgcacctgcaccggcgagctagccgcggcctctatgctcgcggggatctgaactagccgccgctgccccatcgcggcgatgactgcggcgccctctcctcatatcccattcccaacacaacactcattttctccattcccacgtaaaagatagaaaggcgagcatcgcagtgcacacgcgcaatggaaggctcgccggtggcgcgcctcccggaggctaattctctccccgacggcttcgtccccgacagcgagagctcagacacggacgcggctcctccctcctccgcgcccatagttgacgatgcaatcgactccgatagtcccgacgccaccaaccccggtggtgaggaaaccctaagtgatccctcccttcccgcgtccaccgccgaagatgcctcctcagccgccgctgctgaagcattggacacactttgtctggacgttgttgcggatccggagcgcgctctaggggagcacggacccaccactgctgcaagaggtgaaggatccttgaaggaaaatcgtgcatcagagcaagtgggcgctccaagtgatcaaaaggggagcggtgagccaaaacgcaaggtcatcaagcatagcaagcttgagaaggacaaagagttatttcaactagcccagcaataccacaaagtggttgcagaaagggatcaagccattgcagtcaaagatagactagaatctctttgtagggaatttcagcgtcaaaacaaaatgctaaaggaagagtgccaaagggtatcgacagagggacagaacatgcgtacggaattgtctgaaaaatttgatcatgccataaagggtgtcagtgccaaacttgaggagcagagagttgagcgcatttctcagctagaagagaacaatacgttgagaagtaaactgaaagaccttgctgatcaatataacattactcagcagaaatatgctcaccaattgaaagagaaaatgctggaacttgaacttgctgatctgagacttcaacaacatcaagagaaggctgctcaggaacatacacaaatgcagttgtatgctgaacaagtttctcagcttatgactactgagaagaacctgcggttgcaactagcttctgacggggaaagatttcagcactttcaggatgccttgtcaaaaagcaatgaagtctttgaaacttacaagcaggagatggaaaagatgatttcagtgataaagaatcttaagaaggagaacgaatttctgaagggaaaatgtgagaactcagatattgctattgtgaagctcattgaagagcgtgagctaacaaagaagcaaatagagaaattgaaaaatcaaagggagaagctcgaatccctgtgtcgaacactacaggcagaaaggaaacaaggcccctccgccagtattccagatgccccttctagccaagaagtgtcagcgacaagtcaagaatcttaacattccagttgccccttctagccaagatgtgtcagcaacaagtcaagaatcttggcagttgtgcttgtcaatataccgttggtgccagctacagcttgcggagatttctgaagcctgacattcagctgtcaacctaccgtccgtctcaggccttttgatattgtggctagagcctagtggtgcattcctactcggtgttgttaccaagcatataagctctcggctgattccatctcttgtttttgtttgagacaaagcctgctgcattggagataattagatttttgccaatcataatattgtcttcttgttataattaccactgtgtctatgaattgtgggtctagctgggtctatgaaatgtgagtctgatgacaattttacaaacttgtttcttgctgatggtaaatatcagaatctctcgctgcattgtgagtgtgttaattattgtttgagacaaagctctcgcggctcccgttttggaatgat

SEQ ID NO: 1331 - DNA, 2886 bp, Zea Mays
atggtattggtgggcaccccaattttgttgagccagaatctactggcacagatagttcttttgcatctgatgggggttatgagagacctttgcaacctgttcctggagactgtgggtatcacctgcatgcacattggctggttctttgccacccaacaaccaataagatggtaaaaattaccgctcctcttccacaaattctacagacacgggaggaacgccgcgctgcagctgagcaaaccggtggttgaacatgtagaatcttgaaaatgtatatttcttgaagttagcaagcagcaggttctcacagacgttagagttagacactcagacctctgctcctctgtcaactgtacaacggcgagctatggttccgcttgatgcagcgccgtctcatgtgacgtttaggccaggctaccgagatggagaaataacattaggtatttaaaaataaatagagtactagctaatgagctcacacaaatcttgttcagtctattcgaagcgcaattcgctgaaaaaatgtttcttcgctcacacaaatatgatttggtttgaaatggagggaggtgataattgtagaagaagatttccaatgaattcatttgcgtgcaatggacttggcgttacgcataactcccaaacattcctccccccaaaacctcccgaacaaagaggattcgaggggaattaaaggagggcgcggcggtggcgagcaccttccgctcagcgaggtagctgcacctgcaccggcgagctagccgcggcctctatgctcgcggggatctgaactagccgccgctgccccatcgcggcgatgactgcggcgccctctcctcatatcccattcccaacacaacactcattttctccattcccacgtaaaagatagaaaggcgagcatcgcagtgcacacgcgcaatggaaggctcgccggtggcgcgcctcccggaggctaattctctccccgacggcttcgtccccgacagcgagagctcagacacggacgcggctcctccctcctccgcgcccatagttgacgatgcaatcgactccgatagtcccgacgccaccaaccccggtggtgaggaaaccctaagtgatccctcccttcccgcgtccaccgccgaagatgcctcctcagccgccgctgctgaagcattggacacactttgtctggacgttgttgcggatccggagcgcgctctaggggagcacggacccaccactgctgcaagaggtgattctctgtagtcctctctcgattttagttttcttcattcaccatgagtttcctgagcctagtcactatttctgaatggcagccattactatagcggttcagtgcaaacataggaaaataaggttttcatcgtggtagagtttgagctccagatgtgccttacgggctgtgtttccttaccatgttttaatgttcttttgtcaggtgaaggatccttgaaggaaaatcgtgcatcagagcaagtgggcgctccaagtgatcaaaaggggagcggtgagccaaaacgcaaggtcatcaagcatagcaagcttgagaaggacaaagagttatttcaactagcccagcaataccacaaagtggttgcagaaagggatcaagccattgcagtcaaagatagactagaatctctttgtagggaatttcagcgtcaaaacaaaatgctaaaggaagagtgccaaagggtatcgacagagggacagaacatgcgtacggaattgtctgaaaaatttgatcatgccataaagggtgtcagtgccaaacttgaggagcagagagttgagcgcatttctcagctagaagagaacaatacgttgagaagtaaactgaaagaccttgctgatcaatataacattactcagcagaaatatgctcaccaattgaaagagaaaatgctggaacttgaacttgctgatctgagacttcaacaacatcaagagaaggctgctcaggaacatacacaaatgcagttgtatgctgaacaagtttctcagcttatgactactgagaagaacctgcggttgcaactagcttctgacggggaaagatttcagcactttcaggatgccttgtcaaaaagcaatgaagtctttgaaacttacaagcaggagatggaaaagatgatttcagtgataaagaatcttaagaaggagaacgaatttctgaagggaaaatgtgagaactcagatattgctattgtgaagctcattgaagagcgtgagctaacaaagaagcaaatagagaaattgaaaaatcaaagggagaagctcgaatccctgtgtcgaacactacaggcagaaaggaaacaaggcccctccgccagtattccagatgccccttctagccaagaagtgtcagcgacaagtcaagaatcttaacattccagttgccccttctagccaagatgtgtcagcaacaagtcaagaatcttggcagttgtgcttgtcaatataccgttggtgccagctacagcttgcggagatttctgaagcctgacattcagctgtcaacctaccgtccgtctcaggccttttgatattgtggctagagcctagtggtgcattcctactcggtgttgttaccaagcatataagctctcggctgattccatctcttgtttttgtttgagacaaagcctgctgcattggagataattagatttttgccaatcataatattgtcttcttgttataattaccactgtgtctatgaattgtgggtctagctgggtctatgaaatgtgagtctgatgacaattttacaaacttgtttcttgctgatggtaaatatcagaatctctcgctgcattgtgagtgtgttaattattgtttgagacaaagctctcgcggctcccgttttggaatgat

SEQ ID NO: 1332 - DNA, 2987 bp, Zea Mays
atggtattggtgggcaccccaattttgttgagccagaatctactggcacagatagttcttttgcatctgatgggggttatgagagacctttgcaacctgttcctggagactgtgggtatcacctgcatgcacattggctggttctttgccacccaacaaccaataagatggtaaaaattaccgctcctcttccacaaattctacagacacgggaggaacgccgcgctgcagctgagcaaaccggtggttgaacatgtagaatcttgaaaatgtatatttcttgaagttagcaagcagcaggttctcacagacgttagagttagacactcagacctctgctcctctgtcaactgtacaacggcgagctatggttccgcttgatgcagcgccgtctcatgtgacgtttaggccaggctaccgagatggagaaataacattaggtatttaaaaataaatagagtactagctaatgagctcacacaaatcttgttcagtctattcgaagcgcaattcgctgaaaaaatgtttcttcgctcacacaaatatgatttggtttgaaatggagggaggtgataattgtagaagaagatttccaatgaattcatttgcgtgcaatggacttggcgttacgcataactcccaaacattcctccccccaaaacctcccgaacaaagaggattcgaggggaattaaaggagggcgcggcggtggcgagcaccttccgctcagcgaggtagctgcacctgcaccggcgagctagccgcggcctctatgctcgcggggatctgaactagccgccgctgccccatcgcggcgatgactgcggcgccctctcctcatatcccattcccaacacaacactcattttctccattcccacgtaaaagatagaaaggcgagcatcgcagtgcacacgcgcaatggaaggctcgccggtggcgcgcctcccggaggctaattctctccccgacggcttcgtccccgacagcgagagctcagacacggacgcggctcctccctcctccgcgcccatagttgacgatgcaatcgactccgatagtcccgacgccaccaaccccggtggtgaggaaaccctaagtgatccctcccttcccgcgtccaccgccgaagatgcctcctcagccgccgctgctgaagcattggacacactttgtctggacgttgttgcggatccggagcgcgctctaggggagcacggacccaccactgctgcaagaggtgattctctgtagtcctctctcgattttagttttcttcattcaccatgagtttcctgagcctagtcactatttctgaatggcagccattactatagcggttcagtgcaaacataggaaaataaggttttcatcgtggtagagtttgagctccagatgtgccttacgggctgtgtttccttaccatgttttaatgttcttttgtcaggtgaaggatccttgaaggaaaatcgtgcatcagagcaagtgggcgctccaagtgatcaaaaggtggtcaaggttgtttatcatatactgtaagtgtttgcaagaagaattagtctttgcgagatgggattgatttgcttgcttttgtaggggagcggtgagccaaaacgcaaggtcatcaagcatagcaagcttgagaaggacaaagagttatttcaactagcccagcaataccacaaagtggttgcagaaagggatcaagccattgcagtcaaagatagactagaatctctttgtagggaatttcagcgtcaaaacaaaatgctaaagcgtctttgtctcaggaagagtgccaaagggtatcgacagagggacagaacatgcgtacggaattgtctgaaaaatttgatcatgccataaagggtgtcagtgccaaacttgaggagcagagagttgagcgcatttctcagctagaagagaacaatacgttgagaagtaaactgaaagaccttgctgatcaatataacattactcagcagaaatatgctcaccaattgaaagagaaaatgctggaacttgaacttgctgatctgagacttcaacaacatcaagagaaggctgctcaggaacatacacaaatgcagttgtatgctgaacaagtttctcagcttatgactactgagaagaacctgcggttgcaactagcttctgacggggaaagatttcagcactttcaggatgccttgtcaaaaagcaatgaagtctttgaaacttacaagcaggagatggaaaagatgatttcagtgataaagaatcttaagaaggagaacgaatttctgaagggaaaatgtgagaactcagatattgctattgtgaagctcattgaagagcgtgagctaacaaagaagcaaatagagaaattgaaaaatcaaagggagaagctcgaatccctgtgtcgaacactacaggcagaaaggaaacaaggcccctccgccagtattccagatgccccttctagccaagaagtgtcagcgacaagtcaagaatcttaacattccagttgccccttctagccaagatgtgtcagcaacaagtcaagaatcttggcagttgtgcttgtcaatataccgttggtgccagctacagcttgcggagatttctgaagcctgacattcagctgtcaacctaccgtccgtctcaggccttttgatattgtggctagagcctagtggtgcattcctactcggtgttgttaccaagcatataagctctcggctgattccatctcttgtttttgtttgagacaaagcctgctgcattggagataattagatttttgccaatcataatattgtcttcttgttataattaccactgtgtctatgaattgtgggtctagctgggtctatgaaatgtgagtctgatgacaattttacaaacttgtttcttgctgatggtaaatatcagaatctctcgctgcattgtgagtgtgttaattattgtttgagacaaagctctcgcggctcccgttttggaatgat

SEQ ID NO: 1333 - DNA, 1853 bp, Zea Mays
ggcggtgttcgtctccacggacgcaacaccagcccaccagcagagtgaaaatggatggaagtagtaaagggagtgggcattctgaagcattaaggaactacaacctgggaagaactttaggtatcggtacatttggaaaagtgaagattgcagagcataagcttactggacatagggttgctataaagatcatcaactgccgccaaatgagaaatatggaaatggaagagaaagcaaagagagaattcaagatattgaagttgttcattcacccccatatcattcggctttatgaggtcatatacacacctacagatatatatgttgtgatggaatattgtaagtatggcgagttatttgattacattgttgagaaaggcagattacaggaagatgaagctcgtcgaatcttccagcagatcatatctggcgtcgaatactgccatagaaacatggttgtccaccgtgacctaaagccggaaaacttgttacttgattcaaagtataatgtaaaacttgcggattttggtctgagcaatgtcatgcatgatggccattttctgaagactagctgtgggagtccgaactatgctgctccagaggtaatatctggtaaactatatgctggacctgaggtcgatgtatggagttgtggggtgattctttatgctcttctttgtggaactcttccatttgatgatgagaatattcccaatctgttcaaaaaaattaagggaggtatctacacacttccaagtcatttgtctgctttggccagggatttgatcccacgaatgcttgttgttgagcctatgaagagaatcacaattagggaaattcgggagcatcaatggttccagattcgccttccacgttacttggcagtgcctccaccagatacgacacaacaagccaaaatgattgatgaagatacacttcgagatgttgttaatatgggatttaacaagaaccatgtgtgtgaatcactgtgcagcagacttcaaaatgaggcaactgttgcatattatttactattggacaatcggtttagagcaactagtggctatcttggggcagattatcaagaatcaatggacaggaatttaaatcagctggcgtcatctgaatcatctagttctggtacgaggaattatgttccaggaagcagtgatcctcatagcagtggtttgcggccatattatcctgttgaaagaaaatgggcgcttggacttcagtctcgggcccaccctcgtgaaataatggttgaggtcttaaaagcacttcaagaattaaacgtcagatggaagaagaatgggcactacaacgtgaaatgcagatggtgcccagggtttcctgaagttaatgacacgttagatgccagcaacagctttcttggtgactctaccatcatggataatgatgatgctaatgggaggctacctactgtgatcaagtttgaattccagctttacaagacgaaggacgacaagtacctcttagatatgcagagagttactggacctcagctgctcttccttgacttctgtgcggccttccttaccaagcttagggttctatagtggtctaccatgtgcaaattttcactgtggtgatgaataaccgaaagcatgtaaataggaaccttgttctcgtcttttggacaacgaacatgtttgagtgactggtcttgtgttgagcgcgtaaagttcatttttgaactaaaacgttacgaataaaaaaagagtatattactgtctgcatggacatggctgtttcagtaggccgtggcaccgcagatggcgatgctcactgcaacctattatgaaaaaaaatgcaagattcaacttttgttc

SEQ ID NO: 1334 - DNA, 810 bp, Zea Mays
aaacaaaagccgaaaaccgcagtacgctgtacgcagctgtccctcgcagttgggcgcaccggtctactcctcgatcggcaaggccgcaactacctagatctcgaaccctcgccgccgcttctttcccgatcgccgcggccatggcgaaggagttccccgtgccgccggtggtcttcacgccgtccacaccgacgcaccgccgattatgtgcctaatttgtttaggggatgctgtggacagtggactgccttttaccagtcacggagtgtttttgttgtgttgtcacagaactacatacgatctggccagttgatctcttagttccattgggcatggttggtgttcggtaaaaagaaaaggaaatcaaggtccagaaacagcaaatgtgcagtaattaggttttaccgaagtattggtggaaatctaattactttctaaaggtcgtggtatgtgcaaatctgtttattatgattacttaccacgactttattttaggatcatcgtggtagtttcttttcttttaatgcattttggcagagataattgttctatctttaggtatcatgttagatacttaatcatcataaatcaaagggacgttagttttctttttatttgttacaagttgtgaccctcgcaatgaatttatcttctggggtaacaatatatgttatttacaatttgtgcctttgtgtgattacgcataaccattttatggttaatatatgtgaatgtgaaaaggccagcattatttttttaaaggaaatgatgtgtcattattcatcaaatccatttgttgcaactgttaag

SEQ ID NO: 1335 - DNA, 790 bp, Zea Mays
tttcttttcatatgttacctaaaggaatctgtgtgtgctttgtccattatgtatctcaggccaggtcttatattgcttgtttaatatgctaagtagaaatgttctggtgatgagatatgagcatggttatcaaagtggtaaaacgaggcgtggcgactaactactgccttacgcataagcgaattatgtgcctaatttgtttaggggatgctgtggacagtggactgccttttaccagtcacggagtgtttttgttgtgttgtcacagaactacatacgatctggccagttgatctcttagttccattgggcatggttggtgttcggtaaaaagaaaaggaaatcaaggtccagaaacagcaaatgtgcagtaattaggttttaccgaagtattggtggaaatctaattactttctaaaggtcgtggtatgtgcaaatctgtttattatgattacttaccacgactttattttaggatcatcgtggtagtttcttttcttttaatgcattttggcagagataattgttctatctttaggtatcatgttagatacttaatcatcataaatcaaagggacgttagttttctttttatttgttacaagttgtgaccctcgcaatgaatttatcttctggggtaacaatatatgttatttacaatttgtgcctttgtgtgattacgcataaccattttatggttaatatatgtgaatgtgaaaaggccagcattatttttttaaaggaaatgatgtgtcattattcatcaaatccatttgttgcaactgttaag

SEQ ID NO: 1336 - DNA, 4565 bp, Zea Mays
atcaccgtgcccccgccgtcccgtgtgcgtcttcctccacgcatcacacatgccacacgcgcgccagcaatcgcccccggtatctcgcccgcgccccaccaactctgcccttgaacccgcctgccaccaatctcgtcgccgggtatcccgcccgccaccaaaccgcgccccctgtcctcgccctcgacggcgctgccctttgtgatggtgcccttccttccccagctcccccaaatgctgccaagtcccccaccaacgccgcccttccttccccggcagcccgcccccactagctccgcgctccgcgtgccccaccagccacgctagctgccgccgggatactcaccacctccgcgcccccaccaaaccgaaaggcgagatccgccgccagttccacgctccgcgcgtcaagagcagccatcacagtgatgccgcgcgagggagaggaaggaaggccgcgtgagtcgccgcagggaaagctgccaggcatcaccgtaaggtgagatccggttgcgcgtgagggagaggaaggaaggccgcgtgagtcgccgccgagaaagccacagggaaagccgccagtgtgagtcgccgccgggaaagccgccagtgtatgatggttcggtcatccagatgtgggtggcgtacaacgttgtcactcatttcctcctgcactgtaccgactgcaaggcgcaagctcactggcgtgttcgacctcctgaagattatgctatacaaggtgtgcgcaaatggctcatcggcgcttcccgattgggagatggaggccagcatcatggagttctacgctgttgcatcttctaagtggcatcaccgagctggacgacaggaaacagagaaaattgtgcctgaaaaaatttaggagcagggatgagcatttatcagaagtggacacaaagagggagcttgagtgtgggctctgcatgcggtgctttgagtattggtaatagctcttttctcctagcttaaaatcatgcataaagtttgattttttgtaggctccacatttaaacaaatttggtcatgttagcttatggatggcataaaagtactatttctcatgggttctgaagcagaattatagtcaagtacttctcgtgttgaaactatggactgggaaacatgacaaatttgcttttagtaaaattacgaagtgttgtcttttttaaaaatattggtgtcatgtttttttaatgaagcagtttcaatgtatgtggtcggtttggagcatttttaggagacatgatatgtgggatagaaaagctgatggagataacctaaacatagacaaacagccacatacctccagcatggacattccagtagtaattgaagaagctgccaacaaatacaaagcaccatatctctgcaggacaaatcaagataatacactgctaaaataagttgtattagaccattaaagtatgagcatttagctaagagttgccctgtgttttttgttttacccatgataactgtcagtacaagtgtacaacaaattttatagtagtactttggaggacaaaactggtgctggtcattttagatattcgtgcctctcaaataccttaagatggcttgaattcttattgttcatatacattatcgtttttaggcacacaataatgaacctctacagattgtttgtggttatcatgctcttcctcaaccacctcatggtggtgaacttgtattccacacccttgaacatgtccaacctctgaaatactcctggcctggattacccttgttgggttttgtagaggcgatttgaacatttaaagtagatacttgacctatcatgactctagcctgcagtatcattcctccatttctctaatcttgaaacttagaatatagatcaatttacatttggcgactgcagaagaagctcaacactcaagaccttttcttatgatataatattgacaaccaagattttcttctatctttatttttttgctgtttgtgaaattccacagataagacctgtatgctctggcgtgagttatttttctcaatcaacaggaagaagtgaagtgagagatttcattagttcttgaaccaaccaaacatttttgaactgtaaatacagtagggcactgtaacaaaagtttattagaactaaagaaacaccaatattttagctactttaaggcaggtccattcaaaaagttttgtttctcaccctgctcaggctttgtacagtcttttttttgtttgctgacgccttcctaggaaaggggatcttctgcgacgatagcgatgaagacgaagacagtgaccaggagagggaggtgaacaaggagatggttgtctaccttatcgatgcctcgcccaaaatgttcacccctgccaccacctagggcaatgaaaagcaggagacacatttccataccattgttaactgcatcacagagtctctgaagacacaaattattggtagaacttatgatgaagtcgcaatatgtctctttaacactatgatgctccagttctgcaacttctttccgacaaaatgtccactcatatatttacaactctataagggtttagtgtgggcgtccacaccccttcaccatgcccccgcctcagcccccgtcaaccacgcaaggactccagcgtgaaagtcgggcccgtcgccggccttgcatcgtcgcgacacactccgtgcctcccttccatcatcgctcgatcgcggtttcgtcgcactccttccttcgatggcactcctttccatcctcgattcctcctgccccagcaccggccagcctcatcaggtcattcctcctcgctgtgccccctccaccgtattcaaccacctcttcctcggcaccaaacgtagacgcctcctccgcgatgccctcagaccgcccgtcctcgcccaacatctccttgccgcatatgcccgcagcggctgcctcgcatcccgcccgcacgccacctccttgcacccgcgcatggatgccactgcacgcctactatggaagggggacgcctactattgaagctcccatccacgatcccattccaaatccagcttcaaatttgccccaatctgcagtcaaccttccacccaacatcttccccttatatattgttgtctctgctataaaagacttgacagaggcgaggcctccaaaccactaccactctccaccgattcactggagtcgcgagacgttggaggccctgagacgttcaagcctcatctgcagtctcctccaaagaggtctacaaatgataatgcaacaaattctgattcatgcatttctttactgtgtggaggccatttaattacgcctatttgatttgagagctcgagtagacaagatcatgtaggctctgaaatctatcttctggaggaccaaggccattaaagtacagggttctttcagcagcaatggcctcactatttcttctaaattaccaagattctcggacatgtacactctcacgatagcaagtgtagacccacagtttatcgtagcaaacaagccaatccatttcactaagagcgtgacaaagtgtcacagagcccttcttcttcgctctgccacccacaccgtggcacctcgccgagctccgcatcgaaactgcgttgttgccttctccgtgctctgcgttgaagacatgcagcgcaagcgtcgctgcctcatcccggcctcctctagacgcaagacgacaagaggatgctgctcgagctgtccccttggatcccacgccgaacgccctgtcacctccgtcgacaacatcaagctcctgtccctcccccacctcactgcaatagattcttcggttgtggaacttagggagagttttgagtcgtggtggtgtataaagcagtcgtcaagcacaagctcctccaaagtaccatcaggatcctacagtagaagagttagccaaaacactcgattgttggccatcaatgaattattatatcacgggttgtaaatatgttcttatgccatgaaaattcaacgaatgtcacgcccttttcgtaatagatcatgttaaaagcatgtgacttttatcgactttacaccgactcaagattggtgtaaacacatgccatacaagaggtttgcggaagctattatcatggcctcaaagaaatataagattgcttacaacaagaaacgttctggatgggcggaggatatctttaagtgggaacatacaattcagactggtgttccaattgacttaagagggtttaataccagctacctcgttctacaagttatgaccatgtgggggaatgacagacgaatgaaatttgttgggaatgcaaatattcttcgaaggaactttgtgattgatctgttaagttatgaggacaattcgtgccgatatgccatccctgcaaacatacaacagagacttatcgatatcgctaaaaaggattagctgattagtgtacggttgtcgacacatttgtctgtaattaaaaattctaaattatctttttagaaataatttgtgtgatattgataatgaaaaacacggattttgcatattatatagtgatgtttgtcgttccgtatcaa

SEQ ID NO: 1337 - DNA, 4361 bp, Zea Mays
cgtgcccccgccgtcccgtgtgcgtcttcctccacgcatcacacatgccacacgcgcgccagcaatcgcccccggtatctcgcccgcgccccaccaactctgcccttgaacccgcctgccaccaatctcgtcgccgggtatcccgcccgccaccaaaccgcgccccctgtcctcgccctcgacggcgctgccctttgtgatggtgcccttccttccccagctcccccaaatgctgccaagtcccccaccaacgccgcccttccttccccggcagcccgcccccactagctccgcgctccgcgtgccccaccagccacgctagctgccgccgggatactcaccacctccgcgcccccaccaaaccgaaaggcgagatccgccgccagttccacgctccgcgcgtcaagagcagccatcacagtgatgccgcgcgagggagaggaaggaaggccgcgtgagtcgccgcagggaaagctgccaggcatcaccgtaaggtgagatccggttgcgcgtgagggagaggaaggaaggccgcgtgagtcgccgccgagaaagccacagggaaagccgccagtgtgagtcgccgccgggaaagccgccagtgtatgatggttcggtcatccagatgtgggtggcgtacaacgttgtcactcatttcctcctgcactgtaccgactgcaaggcgcaagctcactggcgtgttcgacctcctgaagattatgctatacaaggtgtgcgcaaatggctcatcggcgcttcccgattgggagatggaggccagcatcatggagttctacgctgttgcatcttctaagtggcatcaccgagctggacgacaggaaacagagaaaattgtgcctgaaaaaatttaggagcagggatgagcatttatcagaagtggacacaaagagggagcttgagtgtgggctctgcatgcggtgctttgagtattggtaatagctcttttctcctagcttaaaatcatgcataaagtttgattttttgtaggctccacatttaaacaaatttggtcatgttagcttatggatggcataaaagtactatttctcatgggttctgaagcagaattatagtcaagtacttctcgtgttgaaactatggactgggaaacatgacaaatttgcttttagtaaaattacgaagtgttgtcttttttaaaaatattggtgtcatgtttttttaatgaagcagtttcaatgtatgtggtcggtttggagcatttttaggagacatgatatgtgggatagaaaagctgatggagataacctaaacatagacaaacagccacatacctccagcatggacattccagtagtaattgaagaagctgccaacaaatacaaagcaccatatctctgcaggacaaatcaagataatacactgctaaaataagttgtattagaccattaaagtatgagcatttagctaagagttgccctgtgttttttgttttacccatgataactgtcagtacaagtgtacaacaaattttatagtagtactttggaggacaaaactggtgctggtcattttagatattcgtgcctctcaaataccttaagatggcttgaattcttattgttcatatacattatcgtttttaggcacacaataatgaacctctacagattgtttgtggttatcatgctcttcctcaaccacctcatggtggtgaacttgtattccacacccttgaacatgtccaacctctgaaatactcctggcctggattacccttgttgggttttgtagaggcgatttgaacatttaaagtagatacttgacctatcatgactctagcctgcagtatcattcctccatttctctaatcttgaaacttagaatatagatcaatttacatttggcgactgcagaagaagctcaacactcaagaccttttcttatgatataatattgacaaccaagattttcttctatctttatttttttgctgtttgtgaaattccacagataagacctgtatgctctggcgtgagttatttttctcaatcaacaggaagaagtgaagtgagagatttcattagttcttgaaccaaccaaacatttttgaactgtaaatacagtagggcactgtaacaaaagtttattagaactaaagaaacaccaatattttagctactttaaggcaggtccattcaaaaagttttgtttctcaccctgctcaggctttgtacagtcttttttttgtttgctgacgccttcctaggaaaggggatcttctgcgacgatagcgatgaagacgaagacagtgaccaggagagggaggtgaacaaggagatggttgtctaccttatcgatgcctcgcccaaaatgttcacccctgccaccacctagggcaatgaaaagcaggagacacatttccataccattgttaactgcatcacagagtctctgaagacacaaattattggtagaacttatgatgaagtcgcaatatgtctctttaacactatgatgctccagttctgcaacttctttccgacaaaatgtccactcatatatttacaactctataagggtttagtgtgggcgtccacaccccttcaccatgcccccgcctcagcccccgtcaaccacgcaaggactccagcgtgaaagtcgggcccgtcgccggccttgcatcgtcgcgacacactccgtgcctcccttccatcatcgctcgatcgcggtttcgtcgcactccttccttcgatggcactcctttccatcctcgattcctcctgccccagcaccggccagcctcatcaggtcattcctcctcgctgtgccccctccaccgtattcaaccacctcttcctcggcaccaaacgtagacgcctcctccgcgatgccctcagaccgcccgtcctcgcccaacatctccttgccgcatatgcccgcagcggctgcctcgcatcccgcccgcacgccacctccttgcacccgcgcatggatgccactgcacgcctactatggaagggggacgcctactattgaagctcccatccacgatcccattccaaatccagcttcaaatttgccccaatctgcagtcaaccttccacccaacatcttccccttatatattgttgtctctgctataaaagacttgacagaggcgaggcctccaaaccactaccactctccaccgattcactggagtcgcgagacgttggaggccctgagacgttcaagcctcatctgcagtctcctccaaagaggccatttaattacgcctatttgatttgagagctcgagtagacaagatcatgtaggctctgaaatctatcttctggaggaccaaggccattaaagtacagtcacagagcccttcttcttcgctctgccacccacaccgtggcacctcgccgagctccgcatcgaaactgcgttgttgccttctccgtgctctgcgttgaagacatgcagcgcaagcgtcgctgcctcatcccggcctcctctagacgcaagacgacaagaggatgctgctcgagctgtccccttggatcccacgccgaacgccctgtcacctccgtcgacaacatcaagctcctgtccctcccccacctcactgcaatagattcttcggttgtggaacttagggagagttttgagtcgtggtggtgtataaagcagtcgtcaagcacaagctcctccaaagtaccatcaggatcctacagtagaagagttagccaaaacactcgattgttggccatcaatgaattattatatcacgggttgtaaatatgttcttatgccatgaaaattcaacgaatgtcacgcccttttcgtaatagatcatgttaaaagcatgtgacttttatcgactttacaccgactcaagattggtgtaaacacatgccatacaagaggtttgcggaagctattatcatggcctcaaagaaatataagattgcttacaacaagaaacgttctggatgggcggaggatatctttaagtgggaacatacaattcagactggtgttccaattgacttaagagggtttaataccagctacctcgttctacaagttatgaccatgtgggggaatgacagacgaatgaaatttgttgggaatgcaaatattcttcgaaggaactttgtgattgatctgttaagttatgaggacaattcgtgccgatatgccatccctgcaaacatacaacagagacttatcgatatcgctaaaaaggattagctgattagtgtacggttgtcgacacatttgtctgtaattaaaaattctaaattatctttttagaaataatttgtgtgatattgataatgaaaaacacggattttgcatattatatagtgatgtttgtcgttccgtatcaa

SEQ ID NO: 1338 - DNA, 4504 bp, Zea Mays
cgtgcccccgccgtcccgtgtgcgtcttcctccacgcatcacacatgccacacgcgcgccagcaatcgcccccggtatctcgcccgcgccccaccaactctgcccttgaacccgcctgccaccaatctcgtcgccgggtatcccgcccgccaccaaaccgcgccccctgtcctcgccctcgacggcgctgccctttgtgatggtgcccttccttccccagctcccccaaatgctgccaagtcccccaccaacgccgcccttccttccccggcagcccgcccccactagctccgcgctccgcgtgccccaccagccacgctagctgccgccgggatactcaccacctccgcgcccccaccaaaccgaaaggcgagatccgccgccagttccacgctccgcgcgtcaagagcagccatcacagtgatgccgcgcgagggagaggaaggaaggccgcgtgagtcgccgcagggaaagctgccaggcatcaccgtaaggtgagatccggttgcgcgtgagggagaggaaggaaggccgcgtgagtcgccgccgagaaagccacagggaaagccgccagtgtgagtcgccgccgggaaagccgccagtgtatgatggttcggtcatccagatgtgggtggcgtacaacgttgtcactcatttcctcctgcactgtaccgactgcaaggcgcaagctcactggcgtgttcgacctcctgaagattatgctatacaaggtgtgcgcaaatggctcatcggcgcttcccgattgggagatggaggccagcatcatggagttctacgctgttgcatcttctaagtggcatcaccgagctggacgacaggaaacagagaaaattgtgcctgaaaaaatttaggagcagggatgagcatttatcagaagtggacacaaagagggagcttgagtgtgggctctgcatgcggtgctttgagtattggtaatagctcttttctcctagcttaaaatcatgcataaagtttgattttttgtaggctccacatttaaacaaatttggtcatgttagcttatggatggcataaaagtactatttctcatgggttctgaagcagaattatagtcaagtacttctcgtgttgaaactatggactgggaaacatgacaaatttgcttttagtaaaattacgaagtgttgtcttttttaaaaatattggtgtcatgtttttttaatgaagcagtttcaatgtatgtggtcggtttggagcatttttaggagacatgatatgtgggatagaaaagctgatggagataacctaaacatagacaaacagccacatacctccagcatggacattccagtagtaattgaagaagctgccaacaaatacaaagcaccatatctctgcaggacaaatcaagataatacactgctaaaataagttgtattagaccattaaagtatgagcatttagctaagagttgccctgtgttttttgttttacccatgataactgtcagtacaagtgtacaacaaattttatagtagtactttggaggacaaaactggtgctggtcattttagatattcgtgcctctcaaataccttaagatggcttgaattcttattgttcatatacattatcgtttttaggcacacaataatgaacctctacagattgtttgtggttatcatgctcttcctcaaccacctcatggtggtgaacttgtattccacacccttgaacatgtccaacctctgaaatactcctggcctggattacccttgttgggttttgtagaggcgatttgaacatttaaagtagatacttgacctatcatgactctagcctgcagtatcattcctccatttctctaatcttgaaacttagaatatagatcaatttacatttggcgactgcagaagaagctcaacactcaagaccttttcttatgatataatattgacaaccaagattttcttctatctttatttttttgctgtttgtgaaattccacagataagacctgtatgctctggcgtgagttatttttctcaatcaacaggaagaagtgaagtgagagatttcattagttcttgaaccaaccaaacatttttgaactgtaaatacagtagggcactgtaacaaaagtttattagaactaaagaaacaccaatattttagctactttaaggcaggtccattcaaaaagttttgtttctcaccctgctcaggctttgtacagtcttttttttgtttgctgacgccttcctaggaaaggggatcttctgcgacgatagcgatgaagacgaagacagtgaccaggagagggaggtgaacaaggagatggttgtctaccttatcgatgcctcgcccaaaatgttcacccctgccaccacctagggcaatgaaaagcaggagacacatttccataccattgttaactgcatcacagagtctctgaagacacaaattattggtagaacttatgatgaagtcgcaatatgtctctttaacactatgatgctccagttctgcaacttctttccgacaaaatgtccactcatatatttacaactctataagggtttagtgtgggcgtccacaccccttcaccatgcccccgcctcagcccccgtcaaccacgcaaggactccagcgtgaaagtcgggcccgtcgccggccttgcatcgtcgcgacacactccgtgcctcccttccatcatcgctcgatcgcggtttcgtcgcactccttccttcgatggcactcctttccatcctcgattcctcctgccccagcaccggccagcctcatcaggtcattcctcctcgctgtgccccctccaccgtattcaaccacctcttcctcggcaccaaacgtagacgcctcctccgcgatgccctcagaccgcccgtcctcgcccaacatctccttgccgcatatgcccgcagcggctgcctcgcatcccgcccgcacgccacctccttgcacccgcgcatggatgccactgcacgcctactatggaagggggacgcctactattgaagctcccatccacgatcccattccaaatccagcttcaaatttgccccaatctgcagtcaaccttccacccaacatcttccccttatatattgttgtctctgctataaaagacttgacagaggcgaggcctccaaaccactaccactctccaccgattcactggagtcgcgagacgttggaggccctgagacgttcaagcctcatctgcagtctcctccaaagaggccatttaattacgcctatttgatttgagagctcgagtagacaagatcatgtaggctctgaaatctatcttctggaggaccaaggccattaaagtacagggttctttcagcagcaatggcctcactatttcttctaaattaccaagattctcggacatgtacactctcacgatagcaagtgtagacccacagtttatcgtagcaaacaagccaatccatttcactaagagcgtgacaaagtgtcacagagcccttcttcttcgctctgccacccacaccgtggcacctcgccgagctccgcatcgaaactgcgttgttgccttctccgtgctctgcgttgaagacatgcagcgcaagcgtcgctgcctcatcccggcctcctctagacgcaagacgacaagaggatgctgctcgagctgtccccttggatcccacgccgaacgccctgtcacctccgtcgacaacatcaagctcctgtccctcccccacctcactgcaatagattcttcggttgtggaacttagggagagttttgagtcgtggtggtgtataaagcagtcgtcaagcacaagctcctccaaagtaccatcaggatcctacagtagaagagttagccaaaacactcgattgttggccatcaatgaattattatatcacgggttgtaaatatgttcttatgccatgaaaattcaacgaatgtcacgcccttttcgtaatagatcatgttaaaagcatgtgacttttatcgactttacaccgactcaagattggtgtaaacacatgccatacaagaggtttgcggaagctattatcatggcctcaaagaaatataagattgcttacaacaagaaacgttctggatgggcggaggatatctttaagtgggaacatacaattcagactggtgttccaattgacttaagagggtttaataccagctacctcgttctacaagttatgaccatgtgggggaatgacagacgaatgaaatttgttgggaatgcaaatattcttcgaaggaactttgtgattgatctgttaagttatgaggacaattcgtgccgatatgccatccctgcaaacatacaacagagacttatcgatatcgctaaaaaggattagctgattagtgtacggttgtcgacacatttgtctgtaattaaaaattctaaattatctttttagaaataatttgtgtgatattgataatgaaaaacacggattttgcatattatatagtgatgtttgtcgttccgtatcaa

SEQ ID NO: 1339 - DNA, 4470 bp, Zea Mays
cgtgcccccgccgtcccgtgtgcgtcttcctccacgcatcacacatgccacacgcgcgccagcaatcgcccccggtatctcgcccgcgccccaccaactctgcccttgaacccgcctgccaccaatctcgtcgccgggtatcccgcccgccaccaaaccgcgccccctgtcctcgccctcgacggcgctgccctttgtgatggtgcccttccttccccagctcccccaaatgctgccaagtcccccaccaacgccgcccttccttccccggcagcccgcccccactagctccgcgctccgcgtgccccaccagccacgctagctgccgccgggatactcaccacctccgcgcccccaccaaaccgaaaggcgagatccgccgccagttccacgctccgcgcgtcaagagcagccatcacagtgatgccgcgcgagggagaggaaggaaggccgcgtgagtcgccgcagggaaagctgccaggcatcaccgtaaggtgagatccggttgcgcgtgagggagaggaaggaaggccgcgtgagtcgccgccgagaaagccacagggaaagccgccagtgtgagtcgccgccgggaaagccgccagtgtatgatggttcggtcatccagatgtgggtggcgtacaacgttgtcactcatttcctcctgcactgtaccgactgcaaggcgcaagctcactggcgtgttcgacctcctgaagattatgctatacaaggtgtgcgcaaatggctcatcggcgcttcccgattgggagatggaggccagcatcatggagttctacgctgttgcatcttctaagtggcatcaccgagctggacgacaggaaacagagaaaattgtgcctgaaaaaatttaggagcagggatgagcatttatcagaagtggacacaaagagggagcttgagtgtgggctctgcatgcggtgctttgagtattggtaatagctcttttctcctagcttaaaatcatgcataaagtttgattttttgtaggctccacatttaaacaaatttggtcatgttagcttatggatggcataaaagtactatttctcatgggttctgaagcagaattatagtcaagtacttctcgtgttgaaactatggactgggaaacatgacaaatttgcttttagtaaaattacgaagtgttgtcttttttaaaaatattggtgtcatgtttttttaatgaagcagtttcaatgtatgtggtcggtttggagcatttttaggagacatgatatgtgggatagaaaagctgatggagataacctaaacatagacaaacagccacatacctccagcatggacattccagtagtaattgaagaagctgccaacaaatacaaagcaccatatctctgcaggacaaatcaagataatacactgctaaaataagttgtattagaccattaaagtatgagcatttagctaagagttgccctgtgttttttgttttacccatgataactgtcagtacaagtgtacaacaaattttatagtagtactttggaggacaaaactggtgctggtcattttagatattcgtgcctctcaaataccttaagatggcttgaattcttattgttcatatacattatcgtttttaggcacacaataatgaacctctacagattgtttgtggttatcatgctcttcctcaaccacctcatggtggtgaacttgtattccacacccttgaacatgtccaacctctgaaatactcctggcctggattacccttgttgggttttgtagaggcgatttgaacatttaaagtagatacttgacctatcatgactctagcctgcagtatcattcctccatttctctaatcttgaaacttagaatatagatcaatttacatttggcgactgcagaagaagctcaacactcaagaccttttcttatgatataatattgacaaccaagattttcttctatctttatttttttgctgtttgtgaaattccacagataagacctgtatgctctggcgtgagttatttttctcaatcaacaggaagaagtgaagtgagagatttcattagttcttgaaccaaccaaacatttttgaactgtaaatacagtagggcactgtaacaaaagtttattagaactaaagaaacaccaatattttagctactttaaggcaggtccattcaaaaagttttgtttctcaccctgctcaggctttgtacagtcttttttttgtttgctgacgccttcctaggaaaggggatcttctgcgacgatagcgatgaagacgaagacagtgaccaggagagggaggtgaacaaggagatggttgtctaccttatcgatgcctcgcccaaaatgttcacccctgccaccacctagggcaatgaaaagcaggagacacatttccataccattgttaactgcatcacagagtctctgaagacacaaattattggtagaacttatgatgaagtcgcaatatgtctctttaacacttttgatgaaaaactacaattccagatgatgctccagttctgcaacttctttccgacaaaatgtccactcatatatttacaactctataagggtttagtgtgggcgtccacaccccttcaccatgcccccgcctcagcccccgtcaaccacgcaaggactccagcgtgaaagtcgggcccgtcgccggccttgcatcgtcgcgacacactccgtgcctcccttccatcatcgctcgatcgcggtttcgtcgcactccttccttcgatggcactcctttccatcctcgattcctcctgccccagcaccggccagcctcatcaggtcattcctcctcgctgtgccccctccaccgtattcaaccacctcttcctcggcaccaaacgtagacgcctcctccgcgatgccctcagaccgcccgtcctcgcccaacatctccttgccgcatatgcccgcagcggctgcctcgcatcccgcccgcacgccacctccttgcacccgcgcatggatgccactgcacgcctactatggaagggggacgcctactattgaagctcccatccacgatcccattccaaatccagcttcaaatttgccccaatctgcagtcaaccttccacccaacatcttccccttatatattgttgtctctgctataaaagacttgacagaggcgaggcctccaaaccactaccactctccaccgattcactggagtcgcgagacgttggaggccctgagacgttcaagcctcatctgcagtctcctccaaagaggccatttaattacgcctatttgatttgagagctcgagtagacaagatcatgtaggctctgaaatctatcttctggaggaccaaggccattaaagtacagtcacagagcccttcttcttcgctctgccacccacaccgtggcacctcgccgagctccgcatcgaaactgcgttgttgccttctccgtgctctgcgttgaagacatgcagcgcaagcgtcgctgcctcatcccggcctcctctagacgcaagacgacaagaggatgctgctcgagctgtccccttggatcccacgccgaacgccctgtcacctccgtcgacaacatcaagctcctgtccctcccccacctcactgcaatagattcttcggttgtggaacttagggagagttttgagtcgtggtggtgtataaagcagtcgtcaagcacaagctcctccaaagtaccatcaggatcctacagtagaagagttagccaaaacactcgattgttggccatcaatgaattattatatcacgggttgtaaatatgttcttatgccatgaaaattcaacgaatgtcacgcccttttcgtaatagatcatgttaaaagcatgtgacttttatcgactttacaccgactcaagattggtgtaaacacatgccatacaagaggtttgcggaagctattatcatggcctcaaagaaatataagattgcttacaacaagaaacgttctggatgggcggaggatatctttaagtgggaacatacaattcagactggtgttccaattgacttaagagggtattttcttcgtaccttctcagcagtttaatttttttatgataatcattgtataaaacatagttggccaaacattattctataggtttaataccagctacctcgttctacaagttatgaccatgtgggggaatgacagacgaatgaaatttgttgggaatgcaaatattcttcgaaggaactttgtgattgatctgttaagttatgaggacaattcgtgccgatatgccatccctgcaaacatacaacagagacttatcgatatcgctaaaaaggattagctgattagtgtacggttgtcgacacatttgtctgtaattaaaaattctaaattatctttttagaaataatttgtgtgatattgataatgaaaaacacggattttgcatattatatagtgatgtttgtcgttccgtatcaa

SEQ ID NO: 1340 - DNA, 4575 bp, Zea Mays
cgtgcccccgccgtcccgtgtgcgtcttcctccacgcatcacacatgccacacgcgcgccagcaatcgcccccggtatctcgcccgcgccccaccaactctgcccttgaacccgcctgccaccaatctcgtcgccgggtatcccgcccgccaccaaaccgcgccccctgtcctcgccctcgacggcgctgccctttgtgatggtgcccttccttccccagctcccccaaatgctgccaagtcccccaccaacgccgcccttccttccccggcagcccgcccccactagctccgcgctccgcgtgccccaccagccacgctagctgccgccgggatactcaccacctccgcgcccccaccaaaccgaaaggcgagatccgccgccagttccacgctccgcgcgtcaagagcagccatcacagtgatgccgcgcgagggagaggaaggaaggccgcgtgagtcgccgcagggaaagctgccaggcatcaccgtaaggtgagatccggttgcgcgtgagggagaggaaggaaggccgcgtgagtcgccgccgagaaagccacagggaaagccgccagtgtgagtcgccgccgggaaagccgccagtgtatgatggttcggtcatccagatgtgggtggcgtacaacgttgtcactcatttcctcctgcactgtaccgactgcaaggcgcaagctcactggcgtgttcgacctcctgaagattatgctatacaaggtgtgcgcaaatggctcatcggcgcttcccgattgggagatggaggccagcatcatggagttctacgctgttgcatcttctaagtggcatcaccgagctggacgacaggaaacagagaaaattgtgcctgaaaaaatttaggagcagggatgagcatttatcagaagtggacacaaagagggagcttgagtgtgggctctgcatgcggtgctttgagtattggtaatagctcttttctcctagcttaaaatcatgcataaagtttgattttttgtaggctccacatttaaacaaatttggtcatgttagcttatggatggcataaaagtactatttctcatgggttctgaagcagaattatagtcaagtacttctcgtgttgaaactatggactgggaaacatgacaaatttgcttttagtaaaattacgaagtgttgtcttttttaaaaatattggtgtcatgtttttttaatgaagcagtttcaatgtatgtggtcggtttggagcatttttaggagacatgatatgtgggatagaaaagctgatggagataacctaaacatagacaaacagccacatacctccagcatggacattccagtagtaattgaagaagctgccaacaaatacaaagcaccatatctctgcaggacaaatcaagataatacactgctaaaataagttgtattagaccattaaagtatgagcatttagctaagagttgccctgtgttttttgttttacccatgataactgtcagtacaagtgtacaacaaattttatagtagtactttggaggacaaaactggtgctggtcattttagatattcgtgcctctcaaataccttaagatggcttgaattcttattgttcatatacattatcgtttttaggcacacaataatgaacctctacagattgtttgtggttatcatgctcttcctcaaccacctcatggtggtgaacttgtattccacacccttgaacatgtccaacctctgaaatactcctggcctggattacccttgttgggttttgtagaggcgatttgaacatttaaagtagatacttgacctatcatgactctagcctgcagtatcattcctccatttctctaatcttgaaacttagaatatagatcaatttacatttggcgactgcagaagaagctcaacactcaagaccttttcttatgatataatattgacaaccaagattttcttctatctttatttttttgctgtttgtgaaattccacagataagacctgtatgctctggcgtgagttatttttctcaatcaacaggaagaagtgaagtgagagatttcattagttcttgaaccaaccaaacatttttgaactgtaaatacagtagggcactgtaacaaaagtttattagaactaaagaaacaccaatattttagctactttaaggcaggtccattcaaaaagttttgtttctcaccctgctcaggctttgtacagtcttttttttgtttgctgacgccttcctaggaaaggggatcttctgcgacgatagcgatgaagacgaagacagtgaccaggagagggaggtgaacaaggagatggttgtctaccttatcgatgcctcgcccaaaatgttcacccctgccaccacctagggcaatgaaaagcaggagacacatttccataccattgttaactgcatcacagagtctctgaagacacaaattattggtagaacttatgatgaagtcgcaatatgtctctttaacactatgatgctccagttctgcaacttctttccgacaaaatgtccactcatatatttacaactctataagggtttagtgtgggcgtccacaccccttcaccatgcccccgcctcagcccccgtcaaccacgcaaggactccagcgtgaaagtcgggcccgtcgccggccttgcatcgtcgcgacacactccgtgcctcccttccatcatcgctcgatcgcggtttcgtcgcactccttccttcgatggcactcctttccatcctcgattcctcctgccccagcaccggccagcctcatcaggtcattcctcctcgctgtgccccctccaccgtattcaaccacctcttcctcggcaccaaacgtagacgcctcctccgcgatgccctcagaccgcccgtcctcgcccaacatctccttgccgcatatgcccgcagcggctgcctcgcatcccgcccgcacgccacctccttgcacccgcgcatggatgccactgcacgcctactatggaagggggacgcctactattgaagctcccatccacgatcccattccaaatccagcttcaaatttgccccaatctgcagtcaaccttccacccaacatcttccccttatatattgttgtctctgctataaaagacttgacagaggcgaggcctccaaaccactaccactctccaccgattcactggagtcgcgagacgttggaggccctgagacgttcaagcctcatctgcagtctcctccaaagaggtccacaaatgatttgagagctgtaggtctacaaatgataatgcaacaaattctgattcatgcatttctttactgtgtggaggccatttaattacgcctatttgatttgagagctcgagtagacaagatcatgtaggctctgaaatctatcttctggaggaccaaggccattaaagtacagcagcaatggcctcactatttcttctaaattaccaagattctcggacatgtacactctcacgatagcaagtgtagacccacagtttatcgtagcaaacaagccaatccatttcactaagagcgtgacaaagtgtcacagagcccttcttcttcgctctgccacccacaccgtggcacctcgccgagctccgcatcgaaactgcgttgttgccttctccgtgctctgcgttgaagacatgcagcgcaagcgtcgctgcctcatcccggcctcctctagacgcaagacgacaagaggatgctgctcgagctgtccccttggatcccacgccgaacgccctgtcacctccgtcgacaacatcaagctcctgtccctcccccacctcactgcaatagattcttcggttgtggaacttagggagagttttgagtcgtggtggtgtataaagcagtcgtcaagcacaagctcctccaaagtaccatcaggatcctacagtagaagagttagccaaaacactcgattgttggccatcaatgaattattatatcacgggttgtaaatatgttcttatgccatgaaaattcaacgaatgtcacgcccttttcgtaatagatcatgttaaaagcatgtgacttttatcgactttacaccgactcaagattggtgtaaacacatgccatacaagaggtttgcggaagctattatcatggcctcaaagaaatataagattgcttacaacaagaaacgttctggatgggcggaggatatctttaagtgggaacatacaattcagactggtgttccaattgacttaagagggtttaataccagctacctcgttctacaagttatgaccatgtgggggaatgacagacgaatgaaatttgttgggaatgcaaatattcttcgaaggaactttgtgattgatctgttaagttatgaggacaattcgtgccgatatgccatccctgcaaacatacaacagagacttatcgatatcgctaaaaaggattagctgattagtgtacggttgtcgacacatttgtctgtaattaaaaattctaaattatctttttagaaataatttgtgtgatattgataatgaaaaacacggattttgcatattatatagtgatgtttgtcgttccgtatcaa

SEQ ID NO: 1341 - DNA, 4700 bp, Zea Mays
cgtgcccccgccgtcccgtgtgcgtcttcctccacgcatcacacatgccacacgcgcgccagcaatcgcccccggtatctcgcccgcgccccaccaactctgcccttgaacccgcctgccaccaatctcgtcgccgggtatcccgcccgccaccaaaccgcgccccctgtcctcgccctcgacggcgctgccctttgtgatggtgcccttccttccccagctcccccaaatgctgccaagtcccccaccaacgccgcccttccttccccggcagcccgcccccactagctccgcgctccgcgtgccccaccagccacgctagctgccgccgggatactcaccacctccgcgcccccaccaaaccgaaaggcgagatccgccgccagttccacgctccgcgcgtcaagagcagccatcacagtgatgccgcgcgagggagaggaaggaaggccgcgtgagtcgccgcagggaaagctgccaggcatcaccgtaaggtgagatccggttgcgcgtgagggagaggaaggaaggccgcgtgagtcgccgccgagaaagccacagggaaagccgccagtgtgagtcgccgccgggaaagccgccagtgtatgatggttcggtcatccagatgtgggtggcgtacaacgttgtcactcatttcctcctgcactgtaccgactgcaaggcgcaagctcactggcgtgttcgacctcctgaagattatgctatacaaggtgtgcgcaaatggctcatcggcgcttcccgattgggagatggaggccagcatcatggagttctacgctgttgcatcttctaagtggcatcaccgagctggacgacaggaaacagagaaaattgtgcctgaaaaaatttaggagcagggatgagcatttatcagaagtggacacaaagagggagcttgagtgtgggctctgcatgcggtgctttgagtattggtaatagctcttttctcctagcttaaaatcatgcataaagtttgattttttgtaggctccacatttaaacaaatttggtcatgttagcttatggatggcataaaagtactatttctcatgggttctgaagcagaattatagtcaagtacttctcgtgttgaaactatggactgggaaacatgacaaatttgcttttagtaaaattacgaagtgttgtcttttttaaaaatattggtgtcatgtttttttaatgaagcagtttcaatgtatgtggtcggtttggagcatttttaggagacatgatatgtgggatagaaaagctgatggagataacctaaacatagacaaacagccacatacctccagcatggacattccagtagtaattgaagaagctgccaacaaatacaaagcaccatatctctgcaggacaaatcaagataatacactgctaaaataagttgtattagaccattaaagtatgagcatttagctaagagttgccctgtgttttttgttttacccatgataactgtcagtacaagtgtacaacaaattttatagtagtactttggaggacaaaactggtgctggtcattttagatattcgtgcctctcaaataccttaagatggcttgaattcttattgttcatatacattatcgtttttaggcacacaataatgaacctctacagattgtttgtggttatcatgctcttcctcaaccacctcatggtggtgaacttgtattccacacccttgaacatgtccaacctctgaaatactcctggcctggattacccttgttgggttttgtagaggcgatttgaacatttaaagtagatacttgacctatcatgactctagcctgcagtatcattcctccatttctctaatcttgaaacttagaatatagatcaatttacatttggcgactgcagaagaagctcaacactcaagaccttttcttatgatataatattgacaaccaagattttcttctatctttatttttttgctgtttgtgaaattccacagataagacctgtatgctctggcgtgagttatttttctcaatcaacaggaagaagtgaagtgagagatttcattagttcttgaaccaaccaaacatttttgaactgtaaatacagtagggcactgtaacaaaagtttattagaactaaagaaacaccaatattttagctactttaaggcaggtccattcaaaaagttttgtttctcaccctgctcaggctttgtacagtcttttttttgtttgctgacgccttcctaggaaaggggatcttctgcgacgatagcgatgaagacgaagacagtgaccaggagagggaggtgaacaaggagatggttgtctaccttatcgatgcctcgcccaaaatgttcacccctgccaccacctagggcaatgaaaagcaggagacacatttccataccattgttaactgcatcacagagtctctgaagacacaaattattggtagaacttatgatgaagtcgcaatatgtctctttaacactatgatgctccagttctgcaacttctttccgacaaaatgtccactcatatatttacaactctataagggtttagtgtgggcgtccacaccccttcaccatgcccccgcctcagcccccgtcaaccacgcaaggactccagcgtgaaagtcgggcccgtcgccggccttgcatcgtcgcgacacactccgtgcctcccttccatcatcgctcgatcgcggtttcgtcgcactccttccttcgatggcactcctttccatcctcgattcctcctgccccagcaccggccagcctcatcaggtcattcctcctcgctgtgccccctccaccgtattcaaccacctcttcctcggcaccaaacgtagacgcctcctccgcgatgccctcagaccgcccgtcctcgcccaacatctccttgccgcatatgcccgcagcggctgcctcgcatcccgcccgcacgccacctccttgcacccgcgcatggatgccactgcacgcctactatggaagggggacgcctactattgaagctcccatccacgatcccattccaaatccagcttcaaatttgccccaatctgcagtcaaccttccacccaacatcttccccttatatattgttgtctctgctataaaagacttgacagaggcgaggcctccaaaccactaccactctccaccgattcactggagtcgcgagacgttggaggccctgagacgttcaagcctcatctgcagtctcctccaaagaggtgagtctcacttaatgtttggtaccttctgttttttgggaatgtgggttcattttggatgcttccggggcagtggtaaacactttgctctgtatatattcttgcatctctttaatgtaggtccacaaatgatttgagagctgtaggtctacaaatgataatgcaacaaattctgattcatgcatttctttactgtgtggaggccatttaattacgcctatttgatttgagagctcgagtagacaagatcatgtaggctctgaaatctatcttctggaggaccaaggccattaaagtacagggttctttcagcagcaatggcctcactatttcttctaaattaccaagattctcggacatgtacactctcacgatagcaagtgtagacccacagtttatcgtagcaaacaagccaatccatttcactaagagcgtgacaaagtgagcccttcttcttcgctctgccacccacaccgtggcacctcgccgagctccgcatcgaaactgcgttgttgccttctccgtgctctgcgttgaagacatgcagcgcaagcgtcgctgcctcatcccggcctcctctagacgcaagacgacaagaggatgctgctcgagctgtccccttggatcccacgccgaacgccctgtcacctccgtcgacaacatcaagctcctgtccctcccccacctcactgcaatagattcttcggttgtggaacttagggagagttttgagtcgtggtggtgtataaagcagtcgtcaagcacaagctcctccaaagtaccatcaggatcctacagtagaagagttagccaaaacactcgattgttggccatcaatgaattattatatcacgggttgtaaatatgttcttatgccatgaaaattcaacgaatgtcacgcccttttcgtaatagatcatgttaaaagcatgtgacttttatcgactttacaccgactcaagattggtgtaaacacatgccatacaagaggtttgcggaagctattatcatggcctcaaagaaatataagattgcttacaacaagaaacgttctggatgggcggaggatatctttaagtgggaacatacaattcagactggtgttccaattgacttaagagggtttaataccagctacctcgttctacaagttatgaccatgtgggggaatgacagacgaatgaaatttgttgggaatgcaaatattcttcgaaggaactttgtgattgatctgttaagttatgaggacaattcgtgccgatatgccatccctgcaaacatacaacagagacttatcgatatcgctaaaaaggattagctgattagtgtacggttgtcgacacatttgtctgtaattaaaaattctaaattatctttttagaaataatttgtgtgatattgataatgaaaaacacggattttgcatattatatagtgatgtttgtcgttccgtatcaa

SEQ ID NO: 1342 - DNA, 4586 bp, Zea Mays
cgtgcccccgccgtcccgtgtgcgtcttcctccacgcatcacacatgccacacgcgcgccagcaatcgcccccggtatctcgcccgcgccccaccaactctgcccttgaacccgcctgccaccaatctcgtcgccgggtatcccgcccgccaccaaaccgcgccccctgtcctcgccctcgacggcgctgccctttgtgatggtgcccttccttccccagctcccccaaatgctgccaagtcccccaccaacgccgcccttccttccccggcagcccgcccccactagctccgcgctccgcgtgccccaccagccacgctagctgccgccgggatactcaccacctccgcgcccccaccaaaccgaaaggcgagatccgccgccagttccacgctccgcgcgtcaagagcagccatcacagtgatgccgcgcgagggagaggaaggaaggccgcgtgagtcgccgcagggaaagctgccaggcatcaccgtaaggtgagatccggttgcgcgtgagggagaggaaggaaggccgcgtgagtcgccgccgagaaagccacagggaaagccgccagtgtgagtcgccgccgggaaagccgccagtgtatgatggttcggtcatccagatgtgggtggcgtacaacgttgtcactcatttcctcctgcactgtaccgactgcaaggcgcaagctcactggcgtgttcgacctcctgaagattatgctatacaaggtgtgcgcaaatggctcatcggcgcttcccgattgggagatggaggccagcatcatggagttctacgctgttgcatcttctaagtggcatcaccgagctggacgacaggaaacagagaaaattgtgcctgaaaaaatttaggagcagggatgagcatttatcagaagtggacacaaagagggagcttgagtgtgggctctgcatgcggtgctttgagtattggtaatagctcttttctcctagcttaaaatcatgcataaagtttgattttttgtaggctccacatttaaacaaatttggtcatgttagcttatggatggcataaaagtactatttctcatgggttctgaagcagaattatagtcaagtacttctcgtgttgaaactatggactgggaaacatgacaaatttgcttttagtaaaattacgaagtgttgtcttttttaaaaatattggtgtcatgtttttttaatgaagcagtttcaatgtatgtggtcggtttggagcatttttaggagacatgatatgtgggatagaaaagctgatggagataacctaaacatagacaaacagccacatacctccagcatggacattccagtagtaattgaagaagctgccaacaaatacaaagcaccatatctctgcaggacaaatcaagataatacactgctaaaataagttgtattagaccattaaagtatgagcatttagctaagagttgccctgtgttttttgttttacccatgataactgtcagtacaagtgtacaacaaattttatagtagtactttggaggacaaaactggtgctggtcattttagatattcgtgcctctcaaataccttaagatggcttgaattcttattgttcatatacattatcgtttttaggcacacaataatgaacctctacagattgtttgtggttatcatgctcttcctcaaccacctcatggtggtgaacttgtattccacacccttgaacatgtccaacctctgaaatactcctggcctggattacccttgttgggttttgtagaggcgatttgaacatttaaagtagatacttgacctatcatgactctagcctgcagtatcattcctccatttctctaatcttgaaacttagaatatagatcaatttacatttggcgactgcagaagaagctcaacactcaagaccttttcttatgatataatattgacaaccaagattttcttctatctttatttttttgctgtttgtgaaattccacagataagacctgtatgctctggcgtgagttatttttctcaatcaacaggaagaagtgaagtgagagatttcattagttcttgaaccaaccaaacatttttgaactgtaaatacagtagggcactgtaacaaaagtttattagaactaaagaaacaccaatattttagctactttaaggcaggtccattcaaaaagttttgtttctcaccctgctcaggctttgtacagtcttttttttgtttgctgacgccttcctaggaaaggggatcttctgcgacgatagcgatgaagacgaagacagtgaccaggagagggaggtgaacaaggagatggttgtctaccttatcgatgcctcgcccaaaatgttcacccctgccaccacctagggcaatgaaaagcaggagacacatttccataccattgttaactgcatcacagagtctctgaagacacaaattattggtagaacttatgatgaagtcgcaatatgtctctttaacactatgatgctccagttctgcaacttctttccgacaaaatgtccactcatatatttacaactctataagggtttagtgtgggcgtccacaccccttcaccatgcccccgcctcagcccccgtcaaccacgcaaggactccagcgtgaaagtcgggcccgtcgccggccttgcatcgtcgcgacacactccgtgcctcccttccatcatcgctcgatcgcggtttcgtcgcactccttccttcgatggcactcctttccatcctcgattcctcctgccccagcaccggccagcctcatcaggtcattcctcctcgctgtgccccctccaccgtattcaaccacctcttcctcggcaccaaacgtagacgcctcctccgcgatgccctcagaccgcccgtcctcgcccaacatctccttgccgcatatgcccgcagcggctgcctcgcatcccgcccgcacgccacctccttgcacccgcgcatggatgccactgcacgcctactatggaagggggacgcctactattgaagctcccatccacgatcccattccaaatccagcttcaaatttgccccaatctgcagtcaaccttccacccaacatcttccccttatatattgttgtctctgctataaaagacttgacagaggcgaggcctccaaaccactaccactctccaccgattcactggagtcgcgagacgttggaggccctgagacgttcaagcctcatctgcagtctcctccaaagaggtccacaaatgatttgagagctgtaggtctacaaatgataatgcaacaaattctgattcatgcatttctttactgtgtggaggccatttaattacgcctatttgatttgagagctcgagtagacaagatcatgtaggctctgaaatctatcttctggaggaccaaggccattaaagtacagggttctttcagcagcaatggcctcactatttcttctaaattaccaagattctcggacatgtacactctcacgatagcaagtgtagacccacagtttatcgtagcaaacaagccaatccatttcactaagagcgtgacaaagtgtcacagagcccttcttcttcgctctgccacccacaccgtggcacctcgccgagctccgcatcgaaactgcgttgttgccttctccgtgctctgcgttgaagacatgcagcgcaagcgtcgctgcctcatcccggcctcctctagacgcaagacgacaagaggatgctgctcgagctgtccccttggatcccacgccgaacgccctgtcacctccgtcgacaacatcaagctcctgtccctcccccacctcactgcaatagattcttcggttgtggaacttagggagagttttgagtcgtggtggtgtataaagcagtcgtcaagcacaagctcctccaaagtaccatcaggatcctacagtagaagagttagccaaaacactcgattgttggccatcaatgaattattatatcacgggttgtaaatatgttcttatgccatgaaaattcaacgaatgtcacgcccttttcgtaatagatcatgttaaaagcatgtgacttttatcgactttacaccgactcaagattggtgtaaacacatgccatacaagaggtttgcggaagctattatcatggcctcaaagaaatataagattgcttacaacaagaaacgttctggatgggcggaggatatctttaagtgggaacatacaattcagactggtgttccaattgacttaagagggtttaataccagctacctcgttctacaagttatgaccatgtgggggaatgacagacgaatgaaatttgttgggaatgcaaatattcttcgaaggaactttgtgattgatctgttaagttatgaggacaattcgtgccgatatgccatccctgcaaacatacaacagagacttatcgatatcgctaaaaaggattagctgattagtgtacggttgtcgacacatttgtctgtaattaaaaattctaaattatctttttagaaataatttgtgtgatattgataatgaaaaacacggattttgcatattatatagtgatgtttgtcgttccgtatcaa

SEQ ID NO: 1343 - DNA, 4782 bp, Zea Mays
cgtgcccccgccgtcccgtgtgcgtcttcctccacgcatcacacatgccacacgcgcgccagcaatcgcccccggtatctcgcccgcgccccaccaactctgcccttgaacccgcctgccaccaatctcgtcgccgggtatcccgcccgccaccaaaccgcgccccctgtcctcgccctcgacggcgctgccctttgtgatggtgcccttccttccccagctcccccaaatgctgccaagtcccccaccaacgccgcccttccttccccggcagcccgcccccactagctccgcgctccgcgtgccccaccagccacgctagctgccgccgggatactcaccacctccgcgcccccaccaaaccgaaaggcgagatccgccgccagttccacgctccgcgcgtcaagagcagccatcacagtgatgccgcgcgagggagaggaaggaaggccgcgtgagtcgccgcagggaaagctgccaggcatcaccgtaaggtgagatccggttgcgcgtgagggagaggaaggaaggccgcgtgagtcgccgccgagaaagccacagggaaagccgccagtgtgagtcgccgccgggaaagccgccagtgtatgatggttcggtcatccagatgtgggtggcgtacaacgttgtcactcatttcctcctgcactgtaccgactgcaaggcgcaagctcactggcgtgttcgacctcctgaagattatgctatacaaggtgtgcgcaaatggctcatcggcgcttcccgattgggagatggaggccagcatcatggagttctacgctgttgcatcttctaagtggcatcaccgagctggacgacaggaaacagagaaaattgtgcctgaaaaaatttaggagcagggatgagcatttatcagaagtggacacaaagagggagcttgagtgtgggctctgcatgcggtgctttgagtattggtaatagctcttttctcctagcttaaaatcatgcataaagtttgattttttgtaggctccacatttaaacaaatttggtcatgttagcttatggatggcataaaagtactatttctcatgggttctgaagcagaattatagtcaagtacttctcgtgttgaaactatggactgggaaacatgacaaatttgcttttagtaaaattacgaagtgttgtcttttttaaaaatattggtgtcatgtttttttaatgaagcagtttcaatgtatgtggtcggtttggagcatttttaggagacatgatatgtgggatagaaaagctgatggagataacctaaacatagacaaacagccacatacctccagcatggacattccagtagtaattgaagaagctgccaacaaatacaaagcaccatatctctgcaggacaaatcaagataatacactgctaaaataagttgtattagaccattaaagtatgagcatttagctaagagttgccctgtgttttttgttttacccatgataactgtcagtacaagtgtacaacaaattttatagtagtactttggaggacaaaactggtgctggtcattttagatattcgtgcctctcaaataccttaagatggcttgaattcttattgttcatatacattatcgtttttaggcacacaataatgaacctctacagattgtttgtggttatcatgctcttcctcaaccacctcatggtggtgaacttgtattccacacccttgaacatgtccaacctctgaaatactcctggcctggattacccttgttgggttttgtagaggcgatttgaacatttaaagtagatacttgacctatcatgactctagcctgcagtatcattcctccatttctctaatcttgaaacttagaatatagatcaatttacatttggcgactgcagaagaagctcaacactcaagaccttttcttatgatataatattgacaaccaagattttcttctatctttatttttttgctgtttgtgaaattccacagataagacctgtatgctctggcgtgagttatttttctcaatcaacaggaagaagtgaagtgagagatttcattagttcttgaaccaaccaaacatttttgaactgtaaatacagtagggcactgtaacaaaagtttattagaactaaagaaacaccaatattttagctactttaaggcaggtccattcaaaaagttttgtttctcaccctgctcaggctttgtacagtcttttttttgtttgctgacgccttcctaggaaaggggatcttctgcgacgatagcgatgaagacgaagacagtgaccaggagagggaggtgaacaaggagatggttgtctaccttatcgatgcctcgcccaaaatgttcacccctgccaccacctagggcaatgaaaagcaggagacacatttccataccattgttaactgcatcacagagtctctgaagacacaaattattggtagaacttatgatgaagtcgcaatatgtctctttaacactttattagttattgtcaatgctaaccatttcacttattaagtgataattttgcacatatattagtattactcaagacgatattatgaagtacaactgtgtaaatgttcttacaataaataaaatttagaaggtgcctggatttgtttattagacaataatattttaataacagtttgatgaaaaactacaattccagatgatgctccagttctgcaacttctttccgacaaaatgtccactcatatatttacaactctataagggtttagtgtgggcgtccacaccccttcaccatgcccccgcctcagcccccgtcaaccacgcaaggactccagcgtgaaagtcgggcccgtcgccggccttgcatcgtcgcgacacactccgtgcctcccttccatcatcgctcgatcgcggtttcgtcgcactccttccttcgatggcactcctttccatcctcgattcctcctgccccagcaccggccagcctcatcaggtcattcctcctcgctgtgccccctccaccgtattcaaccacctcttcctcggcaccaaacgtagacgcctcctccgcgatgccctcagaccgcccgtcctcgcccaacatctccttgccgcatatgcccgcagcggctgcctcgcatcccgcccgcacgccacctccttgcacccgcgcatggatgccactgcacgcctactatggaagggggacgcctactattgaagctcccatccacgatcccattccaaatccagcttcaaatttgccccaatctgcagtcaaccttccacccaacatcttccccttatatattgttgtctctgctataaaagacttgacagaggcgaggcctccaaaccactaccactctccaccgattcactggagtcgcgagacgttggaggccctgagacgttcaagcctcatctgcagtctcctccaaagaggtccacaaatgatttgagagctgtaggtctacaaatgataatgcaacaaattctgattcatgcatttctttactgtgtggaggccatttaattacgcctatttgatttgagagctcgagtagacaagatcatgtaggctctgaaatctatcttctggaggaccaaggccattaaagtacagggttctttcagcagcaatggcctcactatttcttctaaattaccaagattctcggacatgtacactctcacgatagcaagtgtagacccacagtttatcgtagcaaacaagccaatccatttcactaagagcgtgacaaagtgtcacagagcccttcttcttcgctctgccacccacaccgtggcacctcgccgagctccgcatcgaaactgcgttgttgccttctccgtgctctgcgttgaagacatgcagcgcaagcgtcgctgcctcatcccggcctcctctagacgcaagacgacaagaggatgctgctcgagctgtccccttggatcccacgccgaacgccctgtcacctccgtcgacaacatcaagctcctgtccctcccccacctcactgcaatagattcttcggttgtggaacttagggagagttttgagtcgtggtggtgtataaagcagtcgtcaagcacaagctcctccaaagtaccatcaggatcctacagtagaagagttagccaaaacactcgattgttggccatcaatgaattattatatcacgggttgtaaatatgttcttatgccatgaaaattcaacgaatgtcacgcccttttcgtaatagatcatgttaaaagcatgtgacttttatcgactttacaccgactcaagattggtgtaaacacatgccatacaagaggtttgcggaagctattatcatggcctcaaagaaatataagattgcttacaacaagaaacgttctggatgggcggaggatatctttaagtgggaacatacaattcagactggtgttccaattgacttaagagggtttaataccagctacctcgttctacaagttatgaccatgtgggggaatgacagacgaatgaaatttgttgggaatgcaaatattcttcgaaggaactttgtgattgatctgttaagttatgaggacaattcgtgccgatatgccatccctgcaaacatacaacagagacttatcgatatcgctaaaaaggattagctgattagtgtacggttgtcgacacatttgtctgtaattaaaaattctaaattatctttttagaaataatttgtgtgatattgataatgaaaaacacggattttgcatattatatagtgatgtttgtcgttccgtatcaa

SEQ ID NO: 1344 - DNA, 4700 bp, Zea Mays
cgtgcccccgccgtcccgtgtgcgtcttcctccacgcatcacacatgccacacgcgcgccagcaatcgcccccggtatctcgcccgcgccccaccaactctgcccttgaacccgcctgccaccaatctcgtcgccgggtatcccgcccgccaccaaaccgcgccccctgtcctcgccctcgacggcgctgccctttgtgatggtgcccttccttccccagctcccccaaatgctgccaagtcccccaccaacgccgcccttccttccccggcagcccgcccccactagctccgcgctccgcgtgccccaccagccacgctagctgccgccgggatactcaccacctccgcgcccccaccaaaccgaaaggcgagatccgccgccagttccacgctccgcgcgtcaagagcagccatcacagtgatgccgcgcgagggagaggaaggaaggccgcgtgagtcgccgcagggaaagctgccaggcatcaccgtaaggtgagatccggttgcgcgtgagggagaggaaggaaggccgcgtgagtcgccgccgagaaagccacagggaaagccgccagtgtgagtcgccgccgggaaagccgccagtgtatgatggttcggtcatccagatgtgggtggcgtacaacgttgtcactcatttcctcctgcactgtaccgactgcaaggcgcaagctcactggcgtgttcgacctcctgaagattatgctatacaaggtgtgcgcaaatggctcatcggcgcttcccgattgggagatggaggccagcatcatggagttctacgctgttgcatcttctaagtggcatcaccgagctggacgacaggaaacagagaaaattgtgcctgaaaaaatttaggagcagggatgagcatttatcagaagtggacacaaagagggagcttgagtgtgggctctgcatgcggtgctttgagtattggtaatagctcttttctcctagcttaaaatcatgcataaagtttgattttttgtaggctccacatttaaacaaatttggtcatgttagcttatggatggcataaaagtactatttctcatgggttctgaagcagaattatagtcaagtacttctcgtgttgaaactatggactgggaaacatgacaaatttgcttttagtaaaattacgaagtgttgtcttttttaaaaatattggtgtcatgtttttttaatgaagcagtttcaatgtatgtggtcggtttggagcatttttaggagacatgatatgtgggatagaaaagctgatggagataacctaaacatagacaaacagccacatacctccagcatggacattccagtagtaattgaagaagctgccaacaaatacaaagcaccatatctctgcaggacaaatcaagataatacactgctaaaataagttgtattagaccattaaagtatgagcatttagctaagagttgccctgtgttttttgttttacccatgataactgtcagtacaagtgtacaacaaattttatagtagtactttggaggacaaaactggtgctggtcattttagatattcgtgcctctcaaataccttaagatggcttgaattcttattgttcatatacattatcgtttttaggcacacaataatgaacctctacagattgtttgtggttatcatgctcttcctcaaccacctcatggtggtgaacttgtattccacacccttgaacatgtccaacctctgaaatactcctggcctggattacccttgttgggttttgtagaggcgatttgaacatttaaagtagatacttgacctatcatgactctagcctgcagtatcattcctccatttctctaatcttgaaacttagaatatagatcaatttacatttggcgactgcagaagaagctcaacactcaagaccttttcttatgatataatattgacaaccaagattttcttctatctttatttttttgctgtttgtgaaattccacagataagacctgtatgctctggcgtgagttatttttctcaatcaacaggaagaagtgaagtgagagatttcattagttcttgaaccaaccaaacatttttgaactgtaaatacagtagggcactgtaacaaaagtttattagaactaaagaaacaccaatattttagctactttaaggcaggtccattcaaaaagttttgtttctcaccctgctcaggctttgtacagtcttttttttgtttgctgacgccttcctaggaaaggggatcttctgcgacgatagcgatgaagacgaagacagtgaccaggagagggaggtgaacaaggagatggttgtctaccttatcgatgcctcgcccaaaatgttcacccctgccaccacctagggcaatgaaaagcaggagacacatttccataccattgttaactgcatcacagagtctctgaagacacaaattattggtagaacttatgatgaagtcgcaatatgtctctttaacactttattagttattgtcaatgctaaccatttcacttattaagtgataattttgcacatatattagtattactcaagacgatattatgaagtacaactgtgtaaatgttcttacaataaataaaatttagaaggtgcctggatttgtttattagacaataatattttaataacagtttgatgaaaaactacaattccagatgatgctccagttctgcaacttctttccgacaaaatgtccactcatatatttacaactctataagggtttagtgtgggcgtccacaccccttcaccatgcccccgcctcagcccccgtcaaccacgcaaggactccagcgtgaaagtcgggcccgtcgccggccttgcatcgtcgcgacacactccgtgcctcccttccatcatcgctcgatcgcggtttcgtcgcactccttccttcgatggcactcctttccatcctcgattcctcctgccccagcaccggccagcctcatcaggtcattcctcctcgctgtgccccctccaccgtattcaaccacctcttcctcggcaccaaacgtagacgcctcctccgcgatgccctcagaccgcccgtcctcgcccaacatctccttgccgcatatgcccgcagcggctgcctcgcatcccgcccgcacgccacctccttgcacccgcgcatggatgccactgcacgcctactatggaagggggacgcctactattgaagctcccatccacgatcccattccaaatccagcttcaaatttgccccaatctgcagtcaaccttccacccaacatcttccccttatatattgttgtctctgctataaaagacttgacagaggcgaggcctccaaaccactaccactctccaccgattcactggagtcgcgagacgttggaggccctgagacgttcaagcctcatctgcagtctcctccaaagaggccatttaattacgcctatttgatttgagagctcgagtagacaagatcatgtaggctctgaaatctatcttctggaggaccaaggccattaaagtacagggttctttcagcagcaatggcctcactatttcttctaaattaccaagattctcggacatgtacactctcacgatagcaagtgtagacccacagtttatcgtagcaaacaagccaatccatttcactaagagcgtgacaaagtgtcacagagcccttcttcttcgctctgccacccacaccgtggcacctcgccgagctccgcatcgaaactgcgttgttgccttctccgtgctctgcgttgaagacatgcagcgcaagcgtcgctgcctcatcccggcctcctctagacgcaagacgacaagaggatgctgctcgagctgtccccttggatcccacgccgaacgccctgtcacctccgtcgacaacatcaagctcctgtccctcccccacctcactgcaatagattcttcggttgtggaacttagggagagttttgagtcgtggtggtgtataaagcagtcgtcaagcacaagctcctccaaagtaccatcaggatcctacagtagaagagttagccaaaacactcgattgttggccatcaatgaattattatatcacgggttgtaaatatgttcttatgccatgaaaattcaacgaatgtcacgcccttttcgtaatagatcatgttaaaagcatgtgacttttatcgactttacaccgactcaagattggtgtaaacacatgccatacaagaggtttgcggaagctattatcatggcctcaaagaaatataagattgcttacaacaagaaacgttctggatgggcggaggatatctttaagtgggaacatacaattcagactggtgttccaattgacttaagagggtttaataccagctacctcgttctacaagttatgaccatgtgggggaatgacagacgaatgaaatttgttgggaatgcaaatattcttcgaaggaactttgtgattgatctgttaagttatgaggacaattcgtgccgatatgccatccctgcaaacatacaacagagacttatcgatatcgctaaaaaggattagctgattagtgtacggttgtcgacacatttgtctgtaattaaaaattctaaattatctttttagaaataatttgtgtgatattgataatgaaaaacacggattttgcatattatatagtgatgtttgtcgttccgtatcaa

SEQ ID NO: 1345 - DNA, 4971 bp, Zea Mays
cgtgcccccgccgtcccgtgtgcgtcttcctccacgcatcacacatgccacacgcgcgccagcaatcgcccccggtatctcgcccgcgccccaccaactctgcccttgaacccgcctgccaccaatctcgtcgccgggtatcccgcccgccaccaaaccgcgccccctgtcctcgccctcgacggcgctgccctttgtgatggtgcccttccttccccagctcccccaaatgctgccaagtcccccaccaacgccgcccttccttccccggcagcccgcccccactagctccgcgctccgcgtgccccaccagccacgctagctgccgccgggatactcaccacctccgcgcccccaccaaaccgaaaggcgagatccgccgccagttccacgctccgcgcgtcaagagcagccatcacagtgatgccgcgcgagggagaggaaggaaggccgcgtgagtcgccgcagggaaagctgccaggcatcaccgtaaggtgagatccggttgcgcgtgagggagaggaaggaaggccgcgtgagtcgccgccgagaaagccacagggaaagccgccagtgtgagtcgccgccgggaaagccgccagtgtatgatggttcggtcatccagatgtgggtggcgtacaacgttgtcactcatttcctcctgcactgtaccgactgcaaggcgcaagctcactggcgtgttcgacctcctgaagattatgctatacaaggtgtgcgcaaatggctcatcggcgcttcccgattgggagatggaggccagcatcatggagttctacgctgttgcatcttctaagtggcatcaccgagctggacgacaggaaacagagaaaattgtgcctgaaaaaatttaggagcagggatgagcatttatcagaagtggacacaaagagggagcttgagtgtgggctctgcatgcggtgctttgagtattggtaatagctcttttctcctagcttaaaatcatgcataaagtttgattttttgtaggctccacatttaaacaaatttggtcatgttagcttatggatggcataaaagtactatttctcatgggttctgaagcagaattatagtcaagtacttctcgtgttgaaactatggactgggaaacatgacaaatttgcttttagtaaaattacgaagtgttgtcttttttaaaaatattggtgtcatgtttttttaatgaagcagtttcaatgtatgtggtcggtttggagcatttttaggagacatgatatgtgggatagaaaagctgatggagataacctaaacatagacaaacagccacatacctccagcatggacattccagtagtaattgaagaagctgccaacaaatacaaagcaccatatctctgcaggacaaatcaagataatacactgctaaaataagttgtattagaccattaaagtatgagcatttagctaagagttgccctgtgttttttgttttacccatgataactgtcagtacaagtgtacaacaaattttatagtagtactttggaggacaaaactggtgctggtcattttagatattcgtgcctctcaaataccttaagatggcttgaattcttattgttcatatacattatcgtttttaggcacacaataatgaacctctacagattgtttgtggttatcatgctcttcctcaaccacctcatggtggtgaacttgtattccacacccttgaacatgtccaacctctgaaatactcctggcctggattacccttgttgggttttgtagaggcgatttgaacatttaaagtagatacttgacctatcatgactctagcctgcagtatcattcctccatttctctaatcttgaaacttagaatatagatcaatttacatttggcgactgcagaagaagctcaacactcaagaccttttcttatgatataatattgacaaccaagattttcttctatctttatttttttgctgtttgtgaaattccacagataagacctgtatgctctggcgtgagttatttttctcaatcaacaggaagaagtgaagtgagagatttcattagttcttgaaccaaccaaacatttttgaactgtaaatacagtagggcactgtaacaaaagtttattagaactaaagaaacaccaatattttagctactttaaggcaggtccattcaaaaagttttgtttctcaccctgctcaggctttgtacagtcttttttttgtttgctgacgccttcctaggaaaggggatcttctgcgacgatagcgatgaagacgaagacagtgaccaggagagggaggtgaacaaggagatggttgtctaccttatcgatgcctcgcccaaaatgttcacccctgccaccacctagggcaatgaaaagcaggagacacatttccataccattgttaactgcatcacagagtctctgaagacacaaattattggtagaacttatgatgaagtcgcaatatgtctctttaacactgtaagctctttctcacatcagtaagcatacacctgtcacatttgcagttctatgttagatgtagatgagttgcagtattttgcttattttcttaaaagtgaaataatgagctgactatgcaactgtctttttgtattagttattagttattgtcaatgctaaccatttcacttattaagtgataattttgcacatatattagtattactcaagacgatattatgaagtacaactgtgtaaatgttcttacaataaataaaatttagaaggtgcctggatttgtttattagacaataatattttaataacagtttgatgaaaaactacaattccagatgatgctccagttctgcaacttctttccgacaaaatgtccactcatatatttacaactctataagggtttagtgtgggcgtccacaccccttcaccatgcccccgcctcagcccccgtcaaccacgcaaggactccagcgtgaaagtcgggcccgtcgccggccttgcatcgtcgcgacacactccgtgcctcccttccatcatcgctcgatcgcggtttcgtcgcactccttccttcgatggcactcctttccatcctcgattcctcctgccccagcaccggccagcctcatcaggtcattcctcctcgctgtgccccctccaccgtattcaaccacctcttcctcggcaccaaacgtagacgcctcctccgcgatgccctcagaccgcccgtcctcgcccaacatctccttgccgcatatgcccgcagcggctgcctcgcatcccgcccgcacgccacctccttgcacccgcgcatggatgccactgcacgcctactatggaagggggacgcctactattgaagctcccatccacgatcccattccaaatccagcttcaaatttgccccaatctgcagtcaaccttccacccaacatcttccccttatatattgttgtctctgctataaaagacttgacagaggcgaggcctccaaaccactaccactctccaccgattcactggagtcgcgagacgttggaggccctgagacgttcaagcctcatctgcagtctcctccaaagaggtgagtctcacttaatgtttggtaccttctgttttttgggaatgtgggttcattttggatgcttccggggcagtggtaaacactttgctctgtatatattcttgcatctctttaatgtaggtccacaaatgatttgagagctgtaggtctacaaatgataatgcaacaaattctgattcatgcatttctttactgtgtggaggccatttaattacgcctatttgatttgagagctcgagtagacaagatcatgtaggctctgaaatctatcttctggaggaccaaggccattaaagtacagtcacagagcccttcttcttcgctctgccacccacaccgtggcacctcgccgagctccgcatcgaaactgcgttgttgccttctccgtgctctgcgttgaagacatgcagcgcaagcgtcgctgcctcatcccggcctcctctagacgcaagacgacaagaggatgctgctcgagctgtccccttggatcccacgccgaacgccctgtcacctccgtcgacaacatcaagctcctgtccctcccccacctcactgcaatagattcttcggttgtggaacttagggagagttttgagtcgtggtggtgtataaagcagtcgtcaagcacaagctcctccaaagtaccatcaggatcctacagtagaagagttagccaaaacactcgattgttggccatcaatgaattattatatcacgggttgtaaatatgtaagtatgtgttcatttcgaatgtatttataaaggacccttctttgcaatcctaatgactgatattttgcaggttcttatgccatgaaaattcaacgaatgtcacgcccttttcgtaatagatcatgttaaaagcatgtgacttttatcgactttacaccgactcaagattggtgtaaacacatgccatacaagaggtttgcggaagctattatcatggcctcaaagaaatataagattgcttacaacaagaaacgttctggatgggcggaggatatctttaagtgggaacatacaattcagactggtgttccaattgacttaagagggtttaataccagctacctcgttctacaagttatgaccatgtgggggaatgacagacgaatgaaatttgttgggaatgcaaatattcttcgaaggaactttgtgattgatctgttaagttatgaggacaattcgtgccgatatgccatccctgcaaacatacaacagagacttatcgatatcgctaaaaaggattagctgattagtgtacggttgtcgacacatttgtctgtaattaaaaattctaaattatctttttagaaataatttgtgtgatattgataatgaaaaacacggattttgcatattatatagtgatgtttgtcgttccgtatcaa

SEQ ID NO: 1346 - DNA, 6487 bp, Zea Mays
cgtgcccccgccgtcccgtgtgcgtcttcctccacgcatcacacatgccacacgcgcgccagcaatcgcccccggtatctcgcccgcgccccaccaactctgcccttgaacccgcctgccaccaatctcgtcgccgggtatcccgcccgccaccaaaccgcgccccctgtcctcgccctcgacggcgctgccctttgtgatggtgcccttccttccccagctcccccaaatgctgccaagtcccccaccaacgccgcccttccttccccggcagcccgcccccactagctccgcgctccgcgtgccccaccagccacgctagctgccgccgggatactcaccacctccgcgcccccaccaaaccgaaaggcgagatccgccgccagttccacgctccgcgcgtcaagagcagccatcacagtgatgccgcgcgagggagaggaaggaaggccgcgtgagtcgccgcagggaaagctgccaggcatcaccgtaaggtgagatccggttgcgcgtgagggagaggaaggaaggccgcgtgagtcgccgccgagaaagccacagggaaagccgccagtgtgagtcgccgccgggaaagccgccagtgtatgatggttcggtcatccagatgtgggtggcgtacaacgttgtcactcatttcctcctgcactgtaccgactgcaaggcgcaagctcactggcgtgttcgacctcctgaagattatgctatacaaggtgtgcgcaaatggctcatcggcgcttcccgattgggagatggaggccagcatcatggagttctacgctgttgcatcttctaagtggcatcaccgagctggacgacaggaaacagagaaaattgtgcctgaaaaaatttaggagcagggatgagcatttatcagaagtggacacaaagagggagcttgagtgtgggctctgcatgcggtgctttgagtattggtaatagctcttttctcctagcttaaaatcatgcataaagtttgattttttgtaggctccacatttaaacaaatttggtcatgttagcttatggatggcataaaagtactatttctcatgggttctgaagcagaattatagtcaagtacttctcgtgttgaaactatggactgggaaacatgacaaatttgcttttagtaaaattacgaagtgttgtcttttttaaaaatattggtgtcatgtttttttaatgaagcagtttcaatgtatgtggtcggtttggagcatttttaggagacatgatatgtgggatagaaaagctgatggagataacctaaacatagacaaacagccacatacctccagcatggacattccagtagtaattgaagaagctgccaacaaatacaaagcaccatatctctgcaggacaaatcaagataatacactgctaaaataagttgtattagaccattaaagtatgagcatttagctaagagttgccctgtgttttttgttttacccatgataactgtcagtacaagtgtacaacaaattttatagtagtactttggaggacaaaactggtgctggtcattttagatattcgtgcctctcaaataccttaagatggcttgaattcttattgttcatatacattatcgtttttaggcacacaataatgaacctctacagattgtttgtggttatcatgctcttcctcaaccacctcatggtggtgaacttgtattccacacccttgaacatgtccaacctctgaaatactcctggcctggattacccttgttgggttttgtagaggcgatttgaacatttaaagtagatacttgacctatcatgactctagcctgcagtatcattcctccatttctctaatcttgaaacttagaatatagatcaatttacatttggcgactgcagaagaagctcaacactcaagaccttttcttatgatataatattgacaaccaagattttcttctatctttatttttttgctgtttgtgaaattccacagataagacctgtatgctctggcgtgagttatttttctcaatcaacaggaagaagtgaagtgagagatttcattagttcttgaaccaaccaaacatttttgaactgtaaatacagtagggcactgtaacaaaagtttattagaactaaagaaacaccaatattttagctactttaaggcaggtccattcaaaaagttttgtttctcaccctgctcaggctttgtacagtcttttttttgtttgctgacgccttcctaggaaaggggatcttctgcgacgatagcgatgaagacgaagacagtgaccaggagagggaggtgaacaaggagatggttgtctaccttatcgatgcctcgcccaaaatgttcacccctgccaccacctagggcaatgaaaagcaggagacacatttccataccattgttaactgcatcacagagtctctgaagacacaaattattggtagaacttatgatgaagtcgcaatatgtctctttaacactgtgctgagttgtgatcaaggactacgtggctcctggcataaggctattgttattggtattctggaaaatgctcgcgcagtcagatatactgatttcattgatgaaaatgggtcacctcttgttgagaatgttcaagtgtcagatgccattgatggtaagtcaagtatgcctgaggaactcattcgtggcaacattaggccaatgtgtccacatcaagcactgcaggtgtctcatgcaagctatggactttgtgttgacgcactcatagaaagttcctactgggaaggtgttattgctgatcatgctgaaggctctatggaaaggaaagtccttttccctgatgaaggtgatgaatgcattatagaagttgatcagctacgtcttactcaagactgggatgaagctacaggggaatggaaaccacgtggaatctggtcatttctgcagatacttttgtcacatgaagagagagatggtttacctgtgtcaatcaggcagatatggtttgacttaagatccaaaccttcttttaagactgatgccaaaatgtggatgtgtggaacagaagatttttgggagagatcacttgcagatgtcattgctgaattgtggtctctatgtgacaagcctaccctagatggatatcaagtggaagcagttcagaaggatacagttgagaccactgtcttggataggctggatccattccaagcattatcagaatacatctcatgctatcggaataataggaaaaatgctcttatcaaaaaagagtgggcaaagcaacaccttaaatcttcaggatggacctttctggatgacagacctaagaacaagttttacatctcacctgatggtaagcggtttccatcttttctaggagcatgccaggcgtgtttggctgcaaaagaagcaaatggttaccaatatgatcatacagaaaatttgcatctagacagtatgagtctggtgcacaagaatgcatgctacaaccagacacacatggatcttgccttggtaaagaacaagtccaatgataaatggatcacgagcccatcaagatcttgggaattggttcaactggatgctgaattttccccacagatagtttcccttcttgctagttatcaagatggcacaactgtccttcagaggacaattgatagaactctgagtgtgaagctgaagaagcatctattggcactgggttggagtattaagttcaaaaaggacgaaattcaagaaaatggccatcataaacacactacaagataccggtacgagtcaccttatgggaagacttatgtttctatcattcaggtaatatgcagtttgatagttggaggcgttaaacaagatgacaggcccagctatcggacagcagcaaaaggtgctcatttgacagtgtcaactggcctggcaaggctcaataaacgtaaacgaagggataaaactgatgctcttgaaaaatacatagactatatgaaaactgataagcaaaattccaggaggaggaaactgttgagatcaaatgctcagaagtttctcaaatctgctgggtggaatttttggttaaagaaaaagtctagaaacaaattggagttgaggtatggtgctccacatggcaagtcttacagctctttagtggcagcatgtaaaggttacttggaaaatggatatcaggaggacagtgatgcagacattaaaatcgccaaccatggttctgctgatggttctatgcgtccatcaaaattgatagcactcagcggtggattaaaggattcaagtaaaatacagggtatgcctgttgtagacagatgtagcaacatgtttaccttgtctgcacatcatggaaaatgtaggaaaagaaaaccatcttcagtttctttgaacagtgcacgagttctttgttcacatggacagatctttccctgtcggcatcacgtgaagacagttttgtctttgttggtagagaaaaatattgtggtaccaagggataaggttacatataagcgaagtgatggacctggtataaaggaaggttccatcagcagagatggaataaaatgcatgtgttgtaatgaattattcactgtggagaattttgaggttcatgctgggagcagtacaccattaccttcggctcatatgtttttaaaggatggaaggtccctatcacagtgtttagttgaattcatgggtggaaacaagcccagagatccactgcatgtgcgcttgaaggggagtagttctgatctggaaagtgattcgatatgctctgtgtgccatgatggtggggatttattactttgtgacaattgcccatcatcttatcattatgattgtgtcggcttggaggtagaggccattccagaaggaagctggtattgtccatcctgcagatgcggtatttgtaacttgagtgattatgatcctgatatcagccaattcactgagaagaccatagtgtactgtgatcagtgtgaacgggaatatcatgtcggttgcactagaaatagtgaccatcagcttatctgccgaccagaaggttgttggttttgcagcaggggatgctcaaatggtatttcaacatttgcaagaagtcattgggaaacaagttccaactccaatcgaaggcttatcttgcactatcttgaaattttgtagagcgaacggcagtgaccatggcgattatgatgatgagataatggcagagcattatggcaagttgtgcattgcagttgatattcttcatgaatgctttgttactattatcgagcctcgcacacagagtgatatttctgaggatattgtcttcaatagagaatcagaactcagacgactaaattttaggggattctacataatacttctccagaaaggtggtgaactagtatctgtcggcacttttaggatttgcggccagaagtttgctgagctgcctctgatcggtacaagatctctataccgtcgtcaaggaatgtgtcgacttctaattaatgaactggaaaagttgcttttagacttgggggtggaaagacttctattaccggcagttcctgaacttttgcaaacatggacatgctcatttggtttcacagttatgtcaaattctgagaggcttgagttggcagggaatagcattctcagtttccagggaaccaccatgtgtcagaagattttaaatgttgcacacaacatttcacaagatagaagtattccatcaatgtccaattctgagagaatggggttagcagagaacatggtggtgaagaaggcatttattccattgacagtggagccagaccatcatgttgatttgattgtggagcctgagctagtaatgaaaattgagaataacagcagtgaggagggtatttcttcaattgatccgctgactagtatgccagaccctcaagttggtttggcagtggggccagagatggtaccggtaagtcgggaaaacaaagataaagagggtatttgtttcattgatgctccaacttgtccgccagatcctcaagttgatttaacaacgggcattcatgagcaatcatttgtcagatcagtgcaacgagaattgcactttgaatataacacctaacacagcttcaggattggaatacaagttctcaggaaaatgctatgagcgggtaaaaaagggcgctcgcccaaggaatgtctggcttagaatctcgaccaaataataaccaaaggtagatctagtagagctacggatgaaggatgcttaactttcatgcaataagctttcagccatcgccttggcattgtccaagttcaagtcgaaactaacctaacctggttacggaagcgtgtgattgtgtatttcccacggtgtaaattaaggactatccaactgataacatactgtccagctacgaggaaaataagattatgttggagcaatttctggtgatggttttaccctgatgtgtcatattattatcagttctgtcgccatactgttcattgg

SEQ ID NO: 1347 - DNA, 3393 bp, Zea Mays
gtcccgtgtgcgtcttcctccacgcatcacacatgccacacgcgcgccagcaatcgcccccggtatctcgcccgcgccccaccaactctgcccttgaacccgcctgccaccaatctcgtcgccgggtatcccgcccgccaccaaaccgcgccccctgtcctcgccctcgacggcgctgccctttgtgatggtgcccttccttccccagctcccccaaatgctgccaagtcccccaccaacgccgcccttccttccccggcagcccgcccccactagctccgcgctccgcgtgccccaccagccacgctagctgccgccgggatactcaccacctccgcgcccccaccaaaccgaaaggcgagatccgccgccagttccacgctccgcgcgtcaagagcagccatcacagtgatgccgcgcgagggagaggaaggaaggccgcgtgagtcgccgcagggaaagctgccaggcatcaccgtaaggtgagatccggttgcgcgtgagggagaggaaggaaggccgcgtgagtcgccgccgagaaagccacagggaaagccgccagtgtgagtcgccgccgggaaagccgccagtgtatgatggttcggtcatccagatgtgggtggcgtacaacgttgtcactcatttcctcctgcactgtaccgactgcaaggcgcaagctcactggcgtgttcgacctcctgaagattatgctatacaaggtgtgcgcaaatggctcatcggcgcttcccgattgggagatggaggccagcatcatggagttctacgctgttgcatcttctaagtggcatcaccgagctggacgacaggaaacagagaaaattgtgcctgaaaaaatttaggagcagggatgagcatttatcagaagtggacacaaagagggagcttgagtgtgggctctgcatgcggtgctttgagtattggaaaggggatcttctgcgacgatagcgatgaagacgaagacagtgaccaggagagggaggtgaacaaggagatggttgtctaccttatcgatgcctcgcccaaaatgttcacccctgccaccacctagggcaatgaaaagcaggagacacatttccataccattgttaactgcatcacagagtctctgaagacacaaattattggtagaacttatgatgaagtcgcaatatgtctctttaacactttattagttattgtcaatgctaaccatttcacttattaagtgataattttgcacatatattagtattactcaagacgatattatgaagtacaactgtgtaaatgttcttacaataaataaaatttagaaggtgcctggatttgtttattagacaataatattttaataacagtttgatgaaaaactacaattccagatgatgctccagttctgcaacttctttccgacaaaatgtccactcatatatttacaactctataagggtttagtgtgggcgtccacaccccttcaccatgcccccgcctcagcccccgtcaaccacgcaaggactccagcgtgaaagtcgggcccgtcgccggccttgcatcgtcgcgacacactccgtgcctcccttccatcatcgctcgatcgcggtttcgtcgcactccttccttcgatggcactcctttccatcctcgattcctcctgccccagcaccggccagcctcatcaggtcattcctcctcgctgtgccccctccaccgtattcaaccacctcttcctcggcaccaaacgtagacgcctcctccgcgatgccctcagaccgcccgtcctcgcccaacatctccttgccgcatatgcccgcagcggctgcctcgcatcccgcccgcacgccacctccttgcacccgcgcatggatgccactgcacgcctactatggaagggggacgcctactattgaagctcccatccacgatcccattccaaatccagcttcaaatttgccccaatctgcagtcaaccttccacccaacatcttccccttatatattgttgtctctgctataaaagacttgacagaggcgaggcctccaaaccactaccactctccaccgattcactggagtcgcgagacgttggaggccctgagacgttcaagcctcatctgcagtctcctccaaagaggccatttaattacgcctatttgatttgagagctcgagtagacaagatcatgtaggctctgaaatctatcttctggaggaccaaggccattaaagtacagggttctttcagcagcaatggcctcactatttcttctaaattaccaagattctcggacatgtacactctcacgatagcaagtgtagacccacagtttatcgtagcaaacaagccaatccatttcactaagagcgtgacaaagtgtcacagagcccttcttcttcgctctgccacccacaccgtggcacctcgccgagctccgcatcgaaactgcgttgttgccttctccgtgctctgcgttgaagacatgcagcgcaagcgtcgctgcctcatcccggcctcctctagacgcaagacgacaagaggatgctgctcgagctgtccccttggatcccacgccgaacgccctgtcacctccgtcgacaacatcaagctcctgtccctcccccacctcactgcaatagattcttcggttgtggaacttagggagagttttgagtcgtggtggtgtataaagcagtcgtcaagcacaagctcctccaaagtaccatcaggatcctacagtagaagagttagccaaaacactcgattgttggccatcaatgaattattatatcacgggttgtaaatatgttcttatgccatgaaaattcaacgaatgtcacgcccttttcgtaatagatcatgttaaaagcatgtgacttttatcgactttacaccgactcaagattggtgtaaacacatgccatacaagaggtttgcggaagctattatcatggcctcaaagaaatataagattgcttacaacaagaaacgttctggatgggcggaggatatctttaagtgggaacatacaattcagactggtgttccaattgacttaagagggtttaataccagctacctcgttctacaagttatgaccatgtgggggaatgacagacgaatgaaatttgttgggaatgcaaatattcttcgaaggaactttgtgattgatctgttaagttatgaggacaattcgtgccgatatgccatccctgcaaacatacaacagagacttatcgatatcgctaaaaaggattagctgattagtgtacggttgtcgacacatttgtctgtaattaaaaattctaaattatctttttagaaataatttgtgtgatattgataatgaaaaacacggattttgcatattatatagtgatgtttgtcgttccgtatcaa

SEQ ID NO: 1348 - DNA, 3197 bp, Zea Mays
gtcccgtgtgcgtcttcctccacgcatcacacatgccacacgcgcgccagcaatcgcccccggtatctcgcccgcgccccaccaactctgcccttgaacccgcctgccaccaatctcgtcgccgggtatcccgcccgccaccaaaccgcgccccctgtcctcgccctcgacggcgctgccctttgtgatggtgcccttccttccccagctcccccaaatgctgccaagtcccccaccaacgccgcccttccttccccggcagcccgcccccactagctccgcgctccgcgtgccccaccagccacgctagctgccgccgggatactcaccacctccgcgcccccaccaaaccgaaaggcgagatccgccgccagttccacgctccgcgcgtcaagagcagccatcacagtgatgccgcgcgagggagaggaaggaaggccgcgtgagtcgccgcagggaaagctgccaggcatcaccgtaaggtgagatccggttgcgcgtgagggagaggaaggaaggccgcgtgagtcgccgccgagaaagccacagggaaagccgccagtgtgagtcgccgccgggaaagccgccagtgtatgatggttcggtcatccagatgtgggtggcgtacaacgttgtcactcatttcctcctgcactgtaccgactgcaaggcgcaagctcactggcgtgttcgacctcctgaagattatgctatacaaggtgtgcgcaaatggctcatcggcgcttcccgattgggagatggaggccagcatcatggagttctacgctgttgcatcttctaagtggcatcaccgagctggacgacaggaaacagagaaaattgtgcctgaaaaaatttaggagcagggatgagcatttatcagaagtggacacaaagagggagcttgagtgtgggctctgcatgcggtgctttgagtattggaaaggggatcttctgcgacgatagcgatgaagacgaagacagtgaccaggagagggaggtgaacaaggagatggttgtctaccttatcgatgcctcgcccaaaatgttcacccctgccaccacctagggcaatgaaaagcaggagacacatttccataccattgttaactgcatcacagagtctctgaagacacaaattattggtagaacttatgatgaagtcgcaatatgtctctttaacactatgatgctccagttctgcaacttctttccgacaaaatgtccactcatatatttacaactctataagggtttagtgtgggcgtccacaccccttcaccatgcccccgcctcagcccccgtcaaccacgcaaggactccagcgtgaaagtcgggcccgtcgccggccttgcatcgtcgcgacacactccgtgcctcccttccatcatcgctcgatcgcggtttcgtcgcactccttccttcgatggcactcctttccatcctcgattcctcctgccccagcaccggccagcctcatcaggtcattcctcctcgctgtgccccctccaccgtattcaaccacctcttcctcggcaccaaacgtagacgcctcctccgcgatgccctcagaccgcccgtcctcgcccaacatctccttgccgcatatgcccgcagcggctgcctcgcatcccgcccgcacgccacctccttgcacccgcgcatggatgccactgcacgcctactatggaagggggacgcctactattgaagctcccatccacgatcccattccaaatccagcttcaaatttgccccaatctgcagtcaaccttccacccaacatcttccccttatatattgttgtctctgctataaaagacttgacagaggcgaggcctccaaaccactaccactctccaccgattcactggagtcgcgagacgttggaggccctgagacgttcaagcctcatctgcagtctcctccaaagaggccatttaattacgcctatttgatttgagagctcgagtagacaagatcatgtaggctctgaaatctatcttctggaggaccaaggccattaaagtacagggttctttcagcagcaatggcctcactatttcttctaaattaccaagattctcggacatgtacactctcacgatagcaagtgtagacccacagtttatcgtagcaaacaagccaatccatttcactaagagcgtgacaaagtgtcacagagcccttcttcttcgctctgccacccacaccgtggcacctcgccgagctccgcatcgaaactgcgttgttgccttctccgtgctctgcgttgaagacatgcagcgcaagcgtcgctgcctcatcccggcctcctctagacgcaagacgacaagaggatgctgctcgagctgtccccttggatcccacgccgaacgccctgtcacctccgtcgacaacatcaagctcctgtccctcccccacctcactgcaatagattcttcggttgtggaacttagggagagttttgagtcgtggtggtgtataaagcagtcgtcaagcacaagctcctccaaagtaccatcaggatcctacagtagaagagttagccaaaacactcgattgttggccatcaatgaattattatatcacgggttgtaaatatgttcttatgccatgaaaattcaacgaatgtcacgcccttttcgtaatagatcatgttaaaagcatgtgacttttatcgactttacaccgactcaagattggtgtaaacacatgccatacaagaggtttgcggaagctattatcatggcctcaaagaaatataagattgcttacaacaagaaacgttctggatgggcggaggatatctttaagtgggaacatacaattcagactggtgttccaattgacttaagagggtttaataccagctacctcgttctacaagttatgaccatgtgggggaatgacagacgaatgaaatttgttgggaatgcaaatattcttcgaaggaactttgtgattgatctgttaagttatgaggacaattcgtgccgatatgccatccctgcaaacatacaacagagacttatcgatatcgctaaaaaggattagctgattagtgtacggttgtcgacacatttgtctgtaattaaaaattctaaattatctttttagaaataatttgtgtgatattgataatgaaaaacacggattttgcatattatatagtgatgtttgtcgttccgtatcaa

SEQ ID NO: 1349 - DNA, 3296 bp, Zea Mays
cttcctccacgcatcacacatgccacacgcgcgccagcaatcgcccccggtatctcgcccgcgccccaccaactctgcccttgaacccgcctgccaccaatctcgtcgccgggtatcccgcccgccaccaaaccgcgccccctgtcctcgccctcgacggcgctgccctttgtgatggtgcccttccttccccagctcccccaaatgctgccaagtcccccaccaacgccgcccttccttccccggcagcccgcccccactagctccgcgctccgcgtgccccaccagccacgctagctgccgccgggatactcaccacctccgcgcccccaccaaaccgaaaggcgagatccgccgccagttccacgctccgcgcgtcaagagcagccatcacagtgatgccgcgcgagggagaggaaggaaggccgcgtgagtcgccgcagggaaagctgccaggcatcaccgtaaggtgagatccggttgcgcgtgagggagaggaaggaaggccgcgtgagtcgccgccgagaaagccacagggaaagccgccagtgtgagtcgccgccgggaaagccgccagtgtatgatggttcggtcatccagatgtgggtggcgtacaacgttgtcactcatttcctcctgcactgtaccgactgcaaggcgcaagctcactggcgtgttcgacctcctgaagattatgctatacaaggtgtgcgcaaatggctcatcggcgcttcccgattgggagatggaggccagcatcatggagttctacgctgttgcatcttctaagtggcatcaccgagctggacgacaggaaacagagaaaattgtgcctgaaaaaatttaggagcagggatgagcatttatcagaagtggacacaaagagggagcttgagtgtgggctctgcatgcggtgctttgagtattgtcttttttttgtttgctgacgccttcctaggaaaggggatcttctgcgacgatagcgatgaagacgaagacagtgaccaggagagggaggtgaacaaggagatggttgtctaccttatcgatgcctcgcccaaaatgttcacccctgccaccacctagggcaatgaaaagcaggagacacatttccataccattgttaactgcatcacagagtctctgaagacacaaattattggtagaacttatgatgaagtcgcaatatgtctctttaacactatgatgctccagttctgcaacttctttccgacaaaatgtccactcatatatttacaactctataagggtttagtgtgggcgtccacaccccttcaccatgcccccgcctcagcccccgtcaaccacgcaaggactccagcgtgaaagtcgggcccgtcgccggccttgcatcgtcgcgacacactccgtgcctcccttccatcatcgctcgatcgcggtttcgtcgcactccttccttcgatggcactcctttccatcctcgattcctcctgccccagcaccggccagcctcatcaggtcattcctcctcgctgtgccccctccaccgtattcaaccacctcttcctcggcaccaaacgtagacgcctcctccgcgatgccctcagaccgcccgtcctcgcccaacatctccttgccgcatatgcccgcagcggctgcctcgcatcccgcccgcacgccacctccttgcacccgcgcatggatgccactgcacgcctactatggaagggggacgcctactattgaagctcccatccacgatcccattccaaatccagcttcaaatttgccccaatctgcagtcaaccttccacccaacatcttccccttatatattgttgtctctgctataaaagacttgacagaggcgaggcctccaaaccactaccactctccaccgattcactggagtcgcgagacgttggaggccctgagacgttcaagcctcatctgcagtctcctccaaagaggtccacaaatgatttgagagctgtaggtctacaaatgataatgcaacaaattctgattcatgcatttctttactgtgtggaggccatttaattacgcctatttgatttgagagctcgagtagacaagatcatgtaggctctgaaatctatcttctggaggaccaaggccattaaagtacagggttctttcagcagcaatggcctcactatttcttctaaattaccaagattctcggacatgtacactctcacgatagcaagtgtagacccacagtttatcgtagcaaacaagccaatccatttcactaagagcgtgacaaagtgtcacagagcccttcttcttcgctctgccacccacaccgtggcacctcgccgagctccgcatcgaaactgcgttgttgccttctccgtgctctgcgttgaagacatgcagcgcaagcgtcgctgcctcatcccggcctcctctagacgcaagacgacaagaggatgctgctcgagctgtccccttggatcccacgccgaacgccctgtcacctccgtcgacaacatcaagctcctgtccctcccccacctcactgcaatagattcttcggttgtggaacttagggagagttttgagtcgtggtggtgtataaagcagtcgtcaagcacaagctcctccaaagtaccatcaggatcctacagtagaagagttagccaaaacactcgattgttggccatcaatgaattattatatcacgggttgtaaatatgttcttatgccatgaaaattcaacgaatgtcacgcccttttcgtaatagatcatgttaaaagcatgtgacttttatcgactttacaccgactcaagattggtgtaaacacatgccatacaagaggtttgcggaagctattatcatggcctcaaagaaatataagattgcttacaacaagaaacgttctggatgggcggaggatatctttaagtgggaacatacaattcagactggtgttccaattgacttaagagggtttaataccagctacctcgttctacaagttatgaccatgtgggggaatgacagacgaatgaaatttgttgggaatgcaaatattcttcgaaggaactttgtgattgatctgttaagttatgaggacaattcgtgccgatatgccatccctgcaaacatacaacagagacttatcgatatcgctaaaaaggattagctgattagtgtacggttgtcgacacatttgtctgtaattaaaaattctaaattatctttttagaaataatttgtgtgatattgataatgaaaaacacggattttgcatattatatagtgatgtttgtcgttccgtatcaa

SEQ ID NO: 1350 - DNA, 3264 bp, Zea Mays
tcctccacgcatcacacatgccacacgcgcgccagcaatcgcccccggtatctcgcccgcgccccaccaactctgcccttgaacccgcctgccaccaatctcgtcgccgggtatcccgcccgccaccaaaccgcgccccctgtcctcgccctcgacggcgctgccctttgtgatggtgcccttccttccccagctcccccaaatgctgccaagtcccccaccaacgccgcccttccttccccggcagcccgcccccactagctccgcgctccgcgtgccccaccagccacgctagctgccgccgggatactcaccacctccgcgcccccaccaaaccgaaaggcgagatccgccgccagttccacgctccgcgcgtcaagagcagccatcacagtgatgccgcgcgagggagaggaaggaaggccgcgtgagtcgccgcagggaaagctgccaggcatcaccgtaaggtgagatccggttgcgcgtgagggagaggaaggaaggccgcgtgagtcgccgccgagaaagccacagggaaagccgccagtgtgagtcgccgccgggaaagccgccagtgtatgatggttcggtcatccagatgtgggtggcgtacaacgttgtcactcatttcctcctgcactgtaccgactgcaaggcgcaagctcactggcgtgttcgacctcctgaagattatgctatacaaggtgtgcgcaaatggctcatcggcgcttcccgattgggagatggaggccagcatcatggagttctacgctgttgcatcttctaagtggcatcaccgagctggacgacaggaaacagagaaaattgtgcctgaaaaaatttaggagcagggatgagcatttatcagaagtggacacaaagagggagcttgagtgtgggctctgcatgcggtgctttgagtattggaaaggggatcttctgcgacgatagcgatgaagacgaagacagtgaccaggagagggaggtgaacaaggagatggttgtctaccttatcgatgcctcgcccaaaatgttcacccctgccaccacctagggcaatgaaaagcaggagacacatttccataccattgttaactgcatcacagagtctctgaagacacaaattattggtagaacttatgatgaagtcgcaatatgtctctttaacactatgatgctccagttctgcaacttctttccgacaaaatgtccactcatatatttacaactctataagggtttagtgtgggcgtccacaccccttcaccatgcccccgcctcagcccccgtcaaccacgcaaggactccagcgtgaaagtcgggcccgtcgccggccttgcatcgtcgcgacacactccgtgcctcccttccatcatcgctcgatcgcggtttcgtcgcactccttccttcgatggcactcctttccatcctcgattcctcctgccccagcaccggccagcctcatcaggtcattcctcctcgctgtgccccctccaccgtattcaaccacctcttcctcggcaccaaacgtagacgcctcctccgcgatgccctcagaccgcccgtcctcgcccaacatctccttgccgcatatgcccgcagcggctgcctcgcatcccgcccgcacgccacctccttgcacccgcgcatggatgccactgcacgcctactatggaagggggacgcctactattgaagctcccatccacgatcccattccaaatccagcttcaaatttgccccaatctgcagtcaaccttccacccaacatcttccccttatatattgttgtctctgctataaaagacttgacagaggcgaggcctccaaaccactaccactctccaccgattcactggagtcgcgagacgttggaggccctgagacgttcaagcctcatctgcagtctcctccaaagaggtccacaaatgatttgagagctgtaggtctacaaatgataatgcaacaaattctgattcatgcatttctttactgtgtggaggccatttaattacgcctatttgatttgagagctcgagtagacaagatcatgtaggctctgaaatctatcttctggaggaccaaggccattaaagtacagggttctttcagcagcaatggcctcactatttcttctaaattaccaagattctcggacatgtacactctcacgatagcaagtgtagacccacagtttatcgtagcaaacaagccaatccatttcactaagagcgtgacaaagtgtcacagagcccttcttcttcgctctgccacccacaccgtggcacctcgccgagctccgcatcgaaactgcgttgttgccttctccgtgctctgcgttgaagacatgcagcgcaagcgtcgctgcctcatcccggcctcctctagacgcaagacgacaagaggatgctgctcgagctgtccccttggatcccacgccgaacgccctgtcacctccgtcgacaacatcaagctcctgtccctcccccacctcactgcaatagattcttcggttgtggaacttagggagagttttgagtcgtggtggtgtataaagcagtcgtcaagcacaagctcctccaaagtaccatcaggatcctacagtagaagagttagccaaaacactcgattgttggccatcaatgaattattatatcacgggttgtaaatatgttcttatgccatgaaaattcaacgaatgtcacgcccttttcgtaatagatcatgttaaaagcatgtgacttttatcgactttacaccgactcaagattggtgtaaacacatgccatacaagaggtttgcggaagctattatcatggcctcaaagaaatataagattgcttacaacaagaaacgttctggatgggcggaggatatctttaagtgggaacatacaattcagactggtgttccaattgacttaagagggtttaataccagctacctcgttctacaagttatgaccatgtgggggaatgacagacgaatgaaatttgttgggaatgcaaatattcttcgaaggaactttgtgattgatctgttaagttatgaggacaattcgtgccgatatgccatccctgcaaacatacaacagagacttatcgatatcgctaaaaaggattagctgattagtgtacggttgtcgacacatttgtctgtaattaaaaattctaaattatctttttagaaataatttgtgtgatattgataatgaaaaacacggattttgcatattatatagtgatgtttgtcgttccgtatcaa

SEQ ID NO: 1351 - DNA, 3561 bp, Zea Mays
acatgccacacgcgcgccagcaatcgcccccggtatctcgcccgcgccccaccaactctgcccttgaacccgcctgccaccaatctcgtcgccgggtatcccgcccgccaccaaaccgcgccccctgtcctcgccctcgacggcgctgccctttgtgatggtgcccttccttccccagctcccccaaatgctgccaagtcccccaccaacgccgcccttccttccccggcagcccgcccccactagctccgcgctccgcgtgccccaccagccacgctagctgccgccgggatactcaccacctccgcgcccccaccaaaccgaaaggcgagatccgccgccagttccacgctccgcgcgtcaagagcagccatcacagtgatgccgcgcgagggagaggaaggaaggccgcgtgagtcgccgcagggaaagctgccaggcatcaccgtaaggtgagatccggttgcgcgtgagggagaggaaggaaggccgcgtgagtcgccgccgagaaagccacagggaaagccgccagtgtgagtcgccgccgggaaagccgccagtgtatgatggttcggtcatccagatgtgggtggcgtacaacgttgtcactcatttcctcctgcactgtaccgactgcaaggcgcaagctcactggcgtgttcgacctcctgaagattatgctatacaaggtgtgcgcaaatggctcatcggcgcttcccgattgggagatggaggccagcatcatggagttctacgctgttgcatcttctaagtggcatcaccgagctggacgacaggaaacagagaaaattgtgcctgaaaaaatttaggagcagggatgagcatttatcagaagtggacacaaagagggagcttgagtgtgggctctgcatgcggtgctttgagtattggaaaggggatcttctgcgacgatagcgatgaagacgaagacagtgaccaggagagggaggtgaacaaggagatggttgtctaccttatcgatgcctcgcccaaaatgttcacccctgccaccacctagggcaatgaaaagcaggagacacatttccataccattgttaactgcatcacagagtctctgaagacacaaattattggtagaacttatgatgaagtcgcaatatgtctctttaacactgtaagctctttctcacatcagtaagcatacacctgtcacatttgcagttctatgttagatgtagatgagttgcagtattttgcttattttcttaaaagtgaaataatgagctgactatgcaactgtctttttgtattagttattagttattgtcaatgctaaccatttcacttattaagtgataattttgcacatatattagtattactcaagacgatattatgaagtacaactgtgtaaatgttcttacaataaataaaatttagaaggtgcctggatttgtttattagacaataatattttaataacagtttgatgaaaaactacaattccagatgatgctccagttctgcaacttctttccgacaaaatgtccactcatatatttacaactctataagggtttagtgtgggcgtccacaccccttcaccatgcccccgcctcagcccccgtcaaccacgcaaggactccagcgtgaaagtcgggcccgtcgccggccttgcatcgtcgcgacacactccgtgcctcccttccatcatcgctcgatcgcggtttcgtcgcactccttccttcgatggcactcctttccatcctcgattcctcctgccccagcaccggccagcctcatcaggtcattcctcctcgctgtgccccctccaccgtattcaaccacctcttcctcggcaccaaacgtagacgcctcctccgcgatgccctcagaccgcccgtcctcgcccaacatctccttgccgcatatgcccgcagcggctgcctcgcatcccgcccgcacgccacctccttgcacccgcgcatggatgccactgcacgcctactatggaagggggacgcctactattgaagctcccatccacgatcccattccaaatccagcttcaaatttgccccaatctgcagtcaaccttccacccaacatcttccccttatatattgttgtctctgctataaaagacttgacagaggcgaggcctccaaaccactaccactctccaccgattcactggagtcgcgagacgttggaggccctgagacgttcaagcctcatctgcagtctcctccaaagaggtgagtctcacttaatgtttggtaccttctgttttttgggaatgtgggttcattttggatgcttccggggcagtggtaaacactttgctctgtatatattcttgcatctctttaatgtaggtccacaaatgatttgagagctgtaggtctacaaatgataatgcaacaaattctgattcatgcatttctttactgtgtggaggccatttaattacgcctatttgatttgagagctcgagtagacaagatcatgtaggctctgaaatctatcttctggaggaccaaggccattaaagtacagtcacagagcccttcttcttcgctctgccacccacaccgtggcacctcgccgagctccgcatcgaaactgcgttgttgccttctccgtgctctgcgttgaagacatgcagcgcaagcgtcgctgcctcatcccggcctcctctagacgcaagacgacaagaggatgctgctcgagctgtccccttggatcccacgccgaacgccctgtcacctccgtcgacaacatcaagctcctgtccctcccccacctcactgcaatagattcttcggttgtggaacttagggagagttttgagtcgtggtggtgtataaagcagtcgtcaagcacaagctcctccaaagtaccatcaggatcctacagtagaagagttagccaaaacactcgattgttggccatcaatgaattattatatcacgggttgtaaatatgttcttatgccatgaaaattcaacgaatgtcacgcccttttcgtaatagatcatgttaaaagcatgtgacttttatcgactttacaccgactcaagattggtgtaaacacatgccatacaagaggtttgcggaagctattatcatggcctcaaagaaatataagattgcttacaacaagaaacgttctggatgggcggaggatatctttaagtgggaacatacaattcagactggtgttccaattgacttaagagggtttaataccagctacctcgttctacaagttatgaccatgtgggggaatgacagacgaatgaaatttgttgggaatgcaaatattcttcgaaggaactttgtgattgatctgttaagttatgaggacaattcgtgccgatatgccatccctgcaaacatacaacagagacttatcgatatcgctaaaaaggattagctgattagtgtacggttgtcgacacatttgtctgtaattaaaaattctaaattatctttttagaaataatttgtgtgatattgataatgaaaaacacggattttgcatattatatagtgatgtttgtcgttccgtatcaa

SEQ ID NO: 1352 - DNA, 3487 bp, Zea Mays
agcaatcgcccccggtatctcgcccgcgccccaccaactctgcccttgaacccgcctgccaccaatctcgtcgccgggtatcccgcccgccaccaaaccgcgccccctgtcctcgccctcgacggcgctgccctttgtgatggtgcccttccttccccagctcccccaaatgctgccaagtcccccaccaacgccgcccttccttccccggcagcccgcccccactagctccgcgctccgcgtgccccaccagccacgctagctgccgccgggatactcaccacctccgcgcccccaccaaaccgaaaggcgagatccgccgccagttccacgctccgcgcgtcaagagcagccatcacagtgatgccgcgcgagggagaggaaggaaggccgcgtgagtcgccgcagggaaagctgccaggcatcaccgtaaggtgagatccggttgcgcgtgagggagaggaaggaaggccgcgtgagtcgccgccgagaaagccacagggaaagccgccagtgtgagtcgccgccgggaaagccgccagtgtatgatggttcggtcatccagatgtgggtggcgtacaacgttgtcactcatttcctcctgcactgtaccgactgcaaggcgcaagctcactggcgtgttcgacctcctgaagattatgctatacaaggtgtgcgcaaatggctcatcggcgcttcccgattgggagatggaggccagcatcatggagttctacgctgttgcatcttctaagtggcatcaccgagctggacgacaggaaacagagaaaattgtgcctgaaaaaatttaggagcagggatgagcatttatcagaagtggacacaaagagggagcttgagtgtgggctctgcatgcggtgctttgagtattgataagacctgtatgctctggcgtgagttatttttctcaatcaacaggaagaagtgaagtgagagatttcattagttcttgaaccaaccaaacatttttgaactgtaaatacagtagggcactgtaacaaaagtttattagaactaaagaaacaccaatattttagctactttaaggcaggtccattcaaaaagttttgtttctcaccctgctcaggctttgtacagtcttttttttgtttgctgacgccttcctaggaaaggggatcttctgcgacgatagcgatgaagacgaagacagtgaccaggagagggaggtgaacaaggagatggttgtctaccttatcgatgcctcgcccaaaatgttcacccctgccaccacctagggcaatgaaaagcaggagacacatttccataccattgttaactgcatcacagagtctctgaagacacaaattattggtagaacttatgatgaagtcgcaatatgtctctttaacactatgatgctccagttctgcaacttctttccgacaaaatgtccactcatatatttacaactctataagggtttagtgtgggcgtccacaccccttcaccatgcccccgcctcagcccccgtcaaccacgcaaggactccagcgtgaaagtcgggcccgtcgccggccttgcatcgtcgcgacacactccgtgcctcccttccatcatcgctcgatcgcggtttcgtcgcactccttccttcgatggcactcctttccatcctcgattcctcctgccccagcaccggccagcctcatcaggtcattcctcctcgctgtgccccctccaccgtattcaaccacctcttcctcggcaccaaacgtagacgcctcctccgcgatgccctcagaccgcccgtcctcgcccaacatctccttgccgcatatgcccgcagcggctgcctcgcatcccgcccgcacgccacctccttgcacccgcgcatggatgccactgcacgcctactatggaagggggacgcctactattgaagctcccatccacgatcccattccaaatccagcttcaaatttgccccaatctgcagtcaaccttccacccaacatcttccccttatatattgttgtctctgctataaaagacttgacagaggcgaggcctccaaaccactaccactctccaccgattcactggagtcgcgagacgttggaggccctgagacgttcaagcctcatctgcagtctcctccaaagaggtccacaaatgatttgagagctgtaggtctacaaatgataatgcaacaaattctgattcatgcatttctttactgtgtggaggccatttaattacgcctatttgatttgagagctcgagtagacaagatcatgtaggctctgaaatctatcttctggaggaccaaggccattaaagtacagggttctttcagcagcaatggcctcactatttcttctaaattaccaagattctcggacatgtacactctcacgatagcaagtgtagacccacagtttatcgtagcaaacaagccaatccatttcactaagagcgtgacaaagtgtcacagagcccttcttcttcgctctgccacccacaccgtggcacctcgccgagctccgcatcgaaactgcgttgttgccttctccgtgctctgcgttgaagacatgcagcgcaagcgtcgctgcctcatcccggcctcctctagacgcaagacgacaagaggatgctgctcgagctgtccccttggatcccacgccgaacgccctgtcacctccgtcgacaacatcaagctcctgtccctcccccacctcactgcaatagattcttcggttgtggaacttagggagagttttgagtcgtggtggtgtataaagcagtcgtcaagcacaagctcctccaaagtaccatcaggatcctacagtagaagagttagccaaaacactcgattgttggccatcaatgaattattatatcacgggttgtaaatatgttcttatgccatgaaaattcaacgaatgtcacgcccttttcgtaatagatcatgttaaaagcatgtgacttttatcgactttacaccgactcaagattggtgtaaacacatgccatacaagaggtttgcggaagctattatcatggcctcaaagaaatataagattgcttacaacaagaaacgttctggatgggcggaggatatctttaagtgggaacatacaattcagactggtgttccaattgacttaagagggtttaataccagctacctcgttctacaagttatgaccatgtgggggaatgacagacgaatgaaatttgttgggaatgcaaatattcttcgaaggaactttgtgattgatctgttaagttatgaggacaattcgtgccgatatgccatccctgcaaacatacaacagagacttatcgatatcgctaaaaaggattagctgattagtgtacggttgtcgacacatttgtctgtaattaaaaattctaaattatctttttagaaataatttgtgtgatattgataatgaaaaacacggattttgcatattatatagtgatgtttgtcgttccgtatcaa

SEQ ID NO: 1353 - DNA, 3172 bp, Zea Mays
gcccccggtatctcgcccgcgccccaccaactctgcccttgaacccgcctgccaccaatctcgtcgccgggtatcccgcccgccaccaaaccgcgccccctgtcctcgccctcgacggcgctgccctttgtgatggtgcccttccttccccagctcccccaaatgctgccaagtcccccaccaacgccgcccttccttccccggcagcccgcccccactagctccgcgctccgcgtgccccaccagccacgctagctgccgccgggatactcaccacctccgcgcccccaccaaaccgaaaggcgagatccgccgccagttccacgctccgcgcgtcaagagcagccatcacagtgatgccgcgcgagggagaggaaggaaggccgcgtgagtcgccgcagggaaagctgccaggcatcaccgtaaggtgagatccggttgcgcgtgagggagaggaaggaaggccgcgtgagtcgccgccgagaaagccacagggaaagccgccagtgtgagtcgccgccgggaaagccgccagtgtatgatggttcggtcatccagatgtgggtggcgtacaacgttgtcactcatttcctcctgcactgtaccgactgcaaggcgcaagctcactggcgtgttcgacctcctgaagattatgctatacaaggtgtgcgcaaatggctcatcggcgcttcccgattgggagatggaggccagcatcatggagttctacgctgttgcatcttctaagtggcatcaccgagctggacgacaggaaacagagaaaattgtgcctgaaaaaatttaggagcagggatgagcatttatcagaagtggacacaaagagggagcttgagtgtgggctctgcatgcggtgctttgagtattgtcttttttttgtttgctgacgccttcctaggaaaggggatcttctgcgacgatagcgatgaagacgaagacagtgaccaggagagggaggtgaacaaggagatggttgtctaccttatcgatgcctcgcccaaaatgttcacccctgccaccacctagggcaatgaaaagcaggagacacatttccataccattgttaactgcatcacagagtctctgaagacacaaattattggtagaacttatgatgaagtcgcaatatgtctctttaacactatgatgctccagttctgcaacttctttccgacaaaatgtccactcatatatttacaactctataagggtttagtgtgggcgtccacaccccttcaccatgcccccgcctcagcccccgtcaaccacgcaaggactccagcgtgaaagtcgggcccgtcgccggccttgcatcgtcgcgacacactccgtgcctcccttccatcatcgctcgatcgcggtttcgtcgcactccttccttcgatggcactcctttccatcctcgattcctcctgccccagcaccggccagcctcatcaggtcattcctcctcgctgtgccccctccaccgtattcaaccacctcttcctcggcaccaaacgtagacgcctcctccgcgatgccctcagaccgcccgtcctcgcccaacatctccttgccgcatatgcccgcagcggctgcctcgcatcccgcccgcacgccacctccttgcacccgcgcatggatgccactgcacgcctactatggaagggggacgcctactattgaagctcccatccacgatcccattccaaatccagcttcaaatttgccccaatctgcagtcaaccttccacccaacatcttccccttatatattgttgtctctgctataaaagacttgacagaggcgaggcctccaaaccactaccactctccaccgattcactggagtcgcgagacgttggaggccctgagacgttcaagcctcatctgcagtctcctccaaagaggccatttaattacgcctatttgatttgagagctcgagtagacaagatcatgtaggctctgaaatctatcttctggaggaccaaggccattaaagtacagggttctttcagcagcaatggcctcactatttcttctaaattaccaagattctcggacatgtacactctcacgatagcaagtgtagacccacagtttatcgtagcaaacaagccaatccatttcactaagagcgtgacaaagtgtcacagagcccttcttcttcgctctgccacccacaccgtggcacctcgccgagctccgcatcgaaactgcgttgttgccttctccgtgctctgcgttgaagacatgcagcgcaagcgtcgctgcctcatcccggcctcctctagacgcaagacgacaagaggatgctgctcgagctgtccccttggatcccacgccgaacgccctgtcacctccgtcgacaacatcaagctcctgtccctcccccacctcactgcaatagattcttcggttgtggaacttagggagagttttgagtcgtggtggtgtataaagcagtcgtcaagcacaagctcctccaaagtaccatcaggatcctacagtagaagagttagccaaaacactcgattgttggccatcaatgaattattatatcacgggttgtaaatatgttcttatgccatgaaaattcaacgaatgtcacgcccttttcgtaatagatcatgttaaaagcatgtgacttttatcgactttacaccgactcaagattggtgtaaacacatgccatacaagaggtttgcggaagctattatcatggcctcaaagaaatataagattgcttacaacaagaaacgttctggatgggcggaggatatctttaagtgggaacatacaattcagactggtgttccaattgacttaagagggtttaataccagctacctcgttctacaagttatgaccatgtgggggaatgacagacgaatgaaatttgttgggaatgcaaatattcttcgaaggaactttgtgattgatctgttaagttatgaggacaattcgtgccgatatgccatccctgcaaacatacaacagagacttatcgatatcgctaaaaaggattagctgattagtgtacggttgtcgacacatttgtctgtaattaaaaattctaaattatctttttagaaataatttgtgtgatattgataatgaaaaacacggattttgcatattatatagtgatgtttgtcgttccgtatcaa

SEQ ID NO: 1354 - DNA, 3072 bp, Zea Mays
ccggtatctcgcccgcgccccaccaactctgcccttgaacccgcctgccaccaatctcgtcgccgggtatcccgcccgccaccaaaccgcgccccctgtcctcgccctcgacggcgctgccctttgtgatggtgcccttccttccccagctcccccaaatgctgccaagtcccccaccaacgccgcccttccttccccggcagcccgcccccactagctccgcgctccgcgtgccccaccagccacgctagctgccgccgggatactcaccacctccgcgcccccaccaaaccgaaaggcgagatccgccgccagttccacgctccgcgcgtcaagagcagccatcacagtgatgccgcgcgagggagaggaaggaaggccgcgtgagtcgccgcagggaaagctgccaggcatcaccgtaaggtgagatccggttgcgcgtgagggagaggaaggaaggccgcgtgagtcgccgccgagaaagccacagggaaagccgccagtgtgagtcgccgccgggaaagccgccagtgtatgatggttcggtcatccagatgtgggtggcgtacaacgttgtcactcatttcctcctgcactgtaccgactgcaaggcgcaagctcactggcgtgttcgacctcctgaagattatgctatacaaggtgtgcgcaaatggctcatcggcgcttcccgattgggagatggaggccagcatcatggagttctacgctgttgcatcttctaagtggcatcaccgagctggacgacaggaaacagagaaaattgtgcctgaaaaaatttaggagcagggatgagcatttatcagaagtggacacaaagagggagcttgagtgtgggctctgcatgcggtgctttgagtattggaaaggggatcttctgcgacgatagcgatgaagacgaagacagtgaccaggagagggaggtgaacaaggagatggttgtctaccttatcgatgcctcgcccaaaatgttcacccctgccaccacctagggcaatgaaaagcaggagacacatttccataccattgttaactgcatcacagagtctctgaagacacaaattattggtagaacttatgatgaagtcgcaatatgtctctttaacactggtttagtgtgggcgtccacaccccttcaccatgcccccgcctcagcccccgtcaaccacgcaaggactccagcgtgaaagtcgggcccgtcgccggccttgcatcgtcgcgacacactccgtgcctcccttccatcatcgctcgatcgcggtttcgtcgcactccttccttcgatggcactcctttccatcctcgattcctcctgccccagcaccggccagcctcatcaggtcattcctcctcgctgtgccccctccaccgtattcaaccacctcttcctcggcaccaaacgtagacgcctcctccgcgatgccctcagaccgcccgtcctcgcccaacatctccttgccgcatatgcccgcagcggctgcctcgcatcccgcccgcacgccacctccttgcacccgcgcatggatgccactgcacgcctactatggaagggggacgcctactattgaagctcccatccacgatcccattccaaatccagcttcaaatttgccccaatctgcagtcaaccttccacccaacatcttccccttatatattgttgtctctgctataaaagacttgacagaggcgaggcctccaaaccactaccactctccaccgattcactggagtcgcgagacgttggaggccctgagacgttcaagcctcatctgcagtctcctccaaagaggccatttaattacgcctatttgatttgagagctcgagtagacaagatcatgtaggctctgaaatctatcttctggaggaccaaggccattaaagtacagggttctttcagcagcaatggcctcactatttcttctaaattaccaagattctcggacatgtacactctcacgatagcaagtgtagacccacagtttatcgtagcaaacaagccaatccatttcactaagagcgtgacaaagtgtcacagagcccttcttcttcgctctgccacccacaccgtggcacctcgccgagctccgcatcgaaactgcgttgttgccttctccgtgctctgcgttgaagacatgcagcgcaagcgtcgctgcctcatcccggcctcctctagacgcaagacgacaagaggatgctgctcgagctgtccccttggatcccacgccgaacgccctgtcacctccgtcgacaacatcaagctcctgtccctcccccacctcactgcaatagattcttcggttgtggaacttagggagagttttgagtcgtggtggtgtataaagcagtcgtcaagcacaagctcctccaaagtaccatcaggatcctacagtagaagagttagccaaaacactcgattgttggccatcaatgaattattatatcacgggttgtaaatatgttcttatgccatgaaaattcaacgaatgtcacgcccttttcgtaatagatcatgttaaaagcatgtgacttttatcgactttacaccgactcaagattggtgtaaacacatgccatacaagaggtttgcggaagctattatcatggcctcaaagaaatataagattgcttacaacaagaaacgttctggatgggcggaggatatctttaagtgggaacatacaattcagactggtgttccaattgacttaagagggtttaataccagctacctcgttctacaagttatgaccatgtgggggaatgacagacgaatgaaatttgttgggaatgcaaatattcttcgaaggaactttgtgattgatctgttaagttatgaggacaattcgtgccgatatgccatccctgcaaacatacaacagagacttatcgatatcgctaaaaaggattagctgattagtgtacggttgtcgacacatttgtctgtaattaaaaattctaaattatctttttagaaataatttgtgtgatattgataatgaaaaacacggattttgcatattatatagtgatgtttgtcgttccgtatcaa

SEQ ID NO: 1355 - DNA, 3407 bp, Zea Mays
ccggtatctcgcccgcgccccaccaactctgcccttgaacccgcctgccaccaatctcgtcgccgggtatcccgcccgccaccaaaccgcgccccctgtcctcgccctcgacggcgctgccctttgtgatggtgcccttccttccccagctcccccaaatgctgccaagtcccccaccaacgccgcccttccttccccggcagcccgcccccactagctccgcgctccgcgtgccccaccagccacgctagctgccgccgggatactcaccacctccgcgcccccaccaaaccgaaaggcgagatccgccgccagttccacgctccgcgcgtcaagagcagccatcacagtgatgccgcgcgagggagaggaaggaaggccgcgtgagtcgccgcagggaaagctgccaggcatcaccgtaaggtgagatccggttgcgcgtgagggagaggaaggaaggccgcgtgagtcgccgccgagaaagccacagggaaagccgccagtgtgagtcgccgccgggaaagccgccagtgtatgatggttcggtcatccagatgtgggtggcgtacaacgttgtcactcatttcctcctgcactgtaccgactgcaaggcgcaagctcactggcgtgttcgacctcctgaagattatgctatacaaggtgtgcgcaaatggctcatcggcgcttcccgattgggagatggaggccagcatcatggagttctacgctgttgcatcttctaagtggcatcaccgagctggacgacaggaaacagagaaaattgtgcctgaaaaaatttaggagcagggatgagcatttatcagaagtggacacaaagagggagcttgagtgtgggctctgcatgcggtgctttgagtattgtcttttttttgtttgctgacgccttcctaggaaaggggatcttctgcgacgatagcgatgaagacgaagacagtgaccagggcaatgaaaagcaggagacacatttccataccattgttaactgcatcacagagtctctgaagacacaaattattggtagaacttatgatgaagtcgcaatatgtctctttaacactttattagttattgtcaatgctaaccatttcacttattaagtgataattttgcacatatattagtattactcaagacgatattatgaagtacaactgtgtaaatgttcttacaataaataaaatttagaaggtgcctggatttgtttattagacaataatattttaataacagtttgatgaaaaactacaattccagatgatgctccagttctgcaacttctttccgacaaaatgtccactcatatatttacaactctataagggtttagtgtgggcgtccacaccccttcaccatgcccccgcctcagcccccgtcaaccacgcaaggactccagcgtgaaagtcgggcccgtcgccggccttgcatcgtcgcgacacactccgtgcctcccttccatcatcgctcgatcgcggtttcgtcgcactccttccttcgatggcactcctttccatcctcgattcctcctgccccagcaccggccagcctcatcaggtcattcctcctcgctgtgccccctccaccgtattcaaccacctcttcctcggcaccaaacgtagacgcctcctccgcgatgccctcagaccgcccgtcctcgcccaacatctccttgccgcatatgcccgcagcggctgcctcgcatcccgcccgcacgccacctccttgcacccgcgcatggatgccactgcacgcctactatggaagggggacgcctactattgaagctcccatccacgatcccattccaaatccagcttcaaatttgccccaatctgcagtcaaccttccacccaacatcttccccttatatattgttgtctctgctataaaagacttgacagaggcgaggcctccaaaccactaccactctccaccgattcactggagtcgcgagacgttggaggccctgagacgttcaagcctcatctgcagtctcctccaaagaggtccacaaatgatttgagagctgtaggtctacaaatgataatgcaacaaattctgattcatgcatttctttactgtgtggaggccatttaattacgcctatttgatttgagagctcgagtagacaagatcatgtaggctctgaaatctatcttctggaggaccaaggccattaaagtacagtcacagagcccttcttcttcgctctgccacccacaccgtggcacctcgccgagctccgcatcgaaactgcgttgttgccttctccgtgctctgcgttgaagacatgcagcgcaagcgtcgctgcctcatcccggcctcctctagacgcaagacgacaagaggatgctgctcgagctgtccccttggatcccacgccgaacgccctgtcacctccgtcgacaacatcaagctcctgtccctcccccacctcactgcaatagattcttcggttgtggaacttagggagagttttgagtcgtggtggtgtataaagcagtcgtcaagcacaagctcctccaaagtaccatcaggatcctacagtagaagagttagccaaaacactcgattgttggccatcaatgaattattatatcacgggttgtaaatatgttcttatgccatgaaaattcaacgaatgtcacgcccttttcgtaatagatcatgttaaaagcatgtgacttttatcgactttacaccgactcaagattggtgtaaacacatgccatacaagaggtttgcggaagctattatcatggcctcaaagaaatataagattgcttacaacaagaaacgttctggatgggcggaggatatctttaagtgggaacatacaattcagactggtgttccaattgacttaagagggtattttcttcgtaccttctcagcagtttaatttttttatgataatcattgtataaaacatagttggccaaacattattctataggtttaataccagctacctcgttctacaagttatgaccatgtgggggaatgacagacgaatgaaatttgttggggtgagtgtagtacgttcgttttatgttcaaaacatacattccagctacctcgttttacaatataatacgttttgttctcttatgtctttgtctgtagaatgcaaatattcttcgaaggaactttgtgattgatctgttaagttatgaggacaattcgtgccgatatgccatccctgcaaacatacaacagagacttatcgatatcgctaaaaaggattagctgattagtgtacggttgtcgacacatttgtctgtaattaaaaattctaaattatctttttagaaataatttgtgtgatattgataatgaaaaacacggattttgcatattatatagtgatgtttgtcgttccgtatcaa

SEQ ID NO: 1356 - DNA, 4633 bp, Zea Mays
ccggtatctcgcccgcgccccaccaactctgcccttgaacccgcctgccaccaatctcgtcgccgggtatcccgcccgccaccaaaccgcgccccctgtcctcgccctcgacggcgctgccctttgtgatggtgcccttccttccccagctcccccaaatgctgccaagtcccccaccaacgccgcccttccttccccggcagcccgcccccactagctccgcgctccgcgtgccccaccagccacgctagctgccgccgggatactcaccacctccgcgcccccaccaaaccgaaaggcgagatccgccgccagttccacgctccgcgcgtcaagagcagccatcacagtgatgccgcgcgagggagaggaaggaaggccgcgtgagtcgccgcagggaaagctgccaggcatcaccgtaaggtgagatccggttgcgcgtgagggagaggaaggaaggccgcgtgagtcgccgccgagaaagccacagggaaagccgccagtgtgagtcgccgccgggaaagccgccagtgtatgatggttcggtcatccagatgtgggtggcgtacaacgttgtcactcatttcctcctgcactgtaccgactgcaaggcgcaagctcactggcgtgttcgacctcctgaagattatgctatacaaggtgtgcgcaaatggctcatcggcgcttcccgattgggagatggaggccagcatcatggagttctacgctgttgcatcttctaagtggcatcaccgagctggacgacaggaaacagagaaaattgtgcctgaaaaaatttaggagcagggatgagcatttatcagaagtggacacaaagagggagcttgagtgtgggctctgcatgcggtgctttgagtattggtaatagctcttttctcctagcttaaaatcatgcataaagtttgattttttgtaggctccacatttaaacaaatttggtcatgttagcttatggatggcataaaagtactatttctcatgggttctgaagcagaattatagtcaagtacttctcgtgttgaaactatggactgggaaacatgacaaatttgcttttagtaaaattacgaagtgttgtcttttttaaaaatattggtgtcatgtttttttaatgaagcagtttcaatgtatgtggtcggtttggagcatttttaggagacatgatatgtgggatagaaaagctgatggagataacctaaacatagacaaacagccacatacctccagcatggacattccagtagtaattgaagaagctgccaacaaatacaaagcaccatatctctgcaggacaaatcaagataatacactgctaaaataagttgtattagaccattaaagtatgagcatttagctaagagttgccctgtgttttttgttttacccatgataactgtcagtacaagtgtacaacaaattttatagtagtactttggaggacaaaactggtgctggtcattttagatattcgtgcctctcaaataccttaagatggcttgaattcttattgttcatatacattatcgtttttaggcacacaataatgaacctctacagattgtttgtggttatcatgctcttcctcaaccacctcatggtggtgaacttgtattccacacccttgaacatgtccaacctctgaaatactcctggcctggattacccttgttgggttttgtagaggcgatttgaacatttaaagtagatacttgacctatcatgactctagcctgcagtatcattcctccatttctctaatcttgaaacttagaatatagatcaatttacatttggcgactgcagaagaagctcaacactcaagaccttttcttatgatataatattgacaaccaagattttcttctatctttatttttttgctgtttgtgaaattccacagataagacctgtatgctctggcgtgagttatttttctcaatcaacaggaagaagtgaagtgagagatttcattagttcttgaaccaaccaaacatttttgaactgtaaatacagtagggcactgtaacaaaagtttattagaactaaagaaacaccaatattttagctactttaaggcaggtccattcaaaaagttttgtttctcaccctgctcaggctttgtacagtcttttttttgtttgctgacgccttcctaggaaaggggatcttctgcgacgatagcgatgaagacgaagacagtgaccagggcaatgaaaagcaggagacacatttccataccattgttaactgcatcacagagtctctgaagacacaaattattggtagaacttatgatgaagtcgcaatatgtctctttaacactttattagttattgtcaatgctaaccatttcacttattaagtgataattttgcacatatattagtattactcaagacgatattatgaagtacaactgtgtaaatgttcttacaataaataaaatttagaaggtgcctggatttgtttattagacaataatattttaataacagtttgatgaaaaactacaattccagatgatgctccagttctgcaacttctttccgacaaaatgtccactcatatatttacaactctataagggtttagtgtgggcgtccacaccccttcaccatgcccccgcctcagcccccgtcaaccacgcaaggactccagcgtgaaagtcgggcccgtcgccggccttgcatcgtcgcgacacactccgtgcctcccttccatcatcgctcgatcgcggtttcgtcgcactccttccttcgatggcactcctttccatcctcgattcctcctgccccagcaccggccagcctcatcaggtcattcctcctcgctgtgccccctccaccgtattcaaccacctcttcctcggcaccaaacgtagacgcctcctccgcgatgccctcagaccgcccgtcctcgcccaacatctccttgccgcatatgcccgcagcggctgcctcgcatcccgcccgcacgccacctccttgcacccgcgcatggatgccactgcacgcctactatggaagggggacgcctactattgaagctcccatccacgatcccattccaaatccagcttcaaatttgccccaatctgcagtcaaccttccacccaacatcttccccttatatattgttgtctctgctataaaagacttgacagaggcgaggcctccaaaccactaccactctccaccgattcactggagtcgcgagacgttggaggccctgagacgttcaagcctcatctgcagtctcctccaaagaggtccacaaatgatttgagagctgtaggtctacaaatgataatgcaacaaattctgattcatgcatttctttactgtgtggaggccatttaattacgcctatttgatttgagagctcgagtagacaagatcatgtaggctctgaaatctatcttctggaggaccaaggccattaaagtacagggttctttcagcagcaatggcctcactatttcttctaaattaccaagattctcggacatgtacactctcacgatagcaagtgtagacccacagtttatcgtagcaaacaagccaatccatttcactaagagcgtgacaaagtgtcacagagcccttcttcttcgctctgccacccacaccgtggcacctcgccgagctccgcatcgaaactgcgttgttgccttctccgtgctctgcgttgaagacatgcagcgcaagcgtcgctgcctcatcccggcctcctctagacgcaagacgacaagaggatgctgctcgagctgtccccttggatcccacgccgaacgccctgtcacctccgtcgacaacatcaagctcctgtccctcccccacctcactgcaatagattcttcggttgtggaacttagggagagttttgagtcgtggtggtgtataaagcagtcgtcaagcacaagctcctccaaagtaccatcaggatcctacagtagaagagttagccaaaacactcgattgttggccatcaatgaattattatatcacgggttgtaaatatgttcttatgccatgaaaattcaacgaatgtcacgcccttttcgtaatagatcatgttaaaagcatgtgacttttatcgactttacaccgactcaagattggtgtaaacacatgccatacaagaggtttgcggaagctattatcatggcctcaaagaaatataagattgcttacaacaagaaacgttctggatgggcggaggatatctttaagtgggaacatacaattcagactggtgttccaattgacttaagagggtttaataccagctacctcgttctacaagttatgaccatgtgggggaatgacagacgaatgaaatttgttgggaatgcaaatattcttcgaaggaactttgtgattgatctgttaagttatgaggacaattcgtgccgatatgccatccctgcaaacatacaacagagacttatcgatatcgctaaaaaggattagctgattagtgtacggttgtcgacacatttgtctgtaattaaaaattctaaattatctttttagaaataatttgtgtgatattgataatgaaaaacacggattttgcatattatatagtgatgtttgtcgttccgtatcaa

SEQ ID NO: 1357 - DNA, 3510 bp, Zea Mays
ctcgcccgcgccccaccaactctgcccttgaacccgcctgccaccaatctcgtcgccgggtatcccgcccgccaccaaaccgcgccccctgtcctcgccctcgacggcgctgccctttgtgatggtgcccttccttccccagctcccccaaatgctgccaagtcccccaccaacgccgcccttccttccccggcagcccgcccccactagctccgcgctccgcgtgccccaccagccacgctagctgccgccgggatactcaccacctccgcgcccccaccaaaccgaaaggcgagatccgccgccagttccacgctccgcgcgtcaagagcagccatcacagtgatgccgcgcgagggagaggaaggaaggccgcgtgagtcgccgcagggaaagctgccaggcatcaccgtaaggtgagatccggttgcgcgtgagggagaggaaggaaggccgcgtgagtcgccgccgagaaagccacagggaaagccgccagtgtgagtcgccgccgggaaagccgccagtgtatgatggttcggtcatccagatgtgggtggcgtacaacgttgtcactcatttcctcctgcactgtaccgactgcaaggcgcaagctcactggcgtgttcgacctcctgaagattatgctatacaaggtgtgcgcaaatggctcatcggcgcttcccgattgggagatggaggccagcatcatggagttctacgctgttgcatcttctaagtggcatcaccgagctggacgacaggaaacagagaaaattgtgcctgaaaaaatttaggagcagggatgagcatttatcagaagtggacacaaagagggagcttgagtgtgggctctgcatgcggtgctttgagtattggctttgtacagtcttttttttgtttgctgacgccttcctaggaaaggggatcttctgcgacgatagcgatgaagacgaagacagtgaccagcaggagagggaggtgaacaaggagatggttgtctaccttatcgatgcctcgcccaaaatgttcacccctgccaccacctagggcaatgaaaagcaggagacacatttccataccattgttaactgcatcacagagtctctgaagacacaaattattggtagaacttatgatgaagtcgcaatatgtctctttaacactgtaagctctttctcacatcagtaagcatacacctgtcacatttgcagttctatgttagatgtagatgagttgcagtattttgcttattttcttaaaagtgaaataatgagctgactatgcaactgtctttttgtattagttattagttattgtcaatgctaaccatttcacttattaagtgataattttgcacatatattagtattactcaagacgatattatgaagtacaactgtgtaaatgttcttacaataaataaaatttagaaggtgcctggatttgtttattagacaataatattttaataacagtttgatgaaaaactacaattccagatgatgctccagttctgcaacttctttccgacaaaatgtccactcatatatttacaactctataagggtttagtgtgggcgtccacaccccttcaccatgcccccgcctcagcccccgtcaaccacgcaaggactccagcgtgaaagtcgggcccgtcgccggccttgcatcgtcgcgacacactccgtgcctcccttccatcatcgctcgatcgcggtttcgtcgcactccttccttcgatggcactcctttccatcctcgattcctcctgccccagcaccggccagcctcatcaggtcattcctcctcgctgtgccccctccaccgtattcaaccacctcttcctcggcaccaaacgtagacgcctcctccgcgatgccctcagaccgcccgtcctcgcccaacatctccttgccgcatatgcccgcagcggctgcctcgcatcccgcccgcacgccacctccttgcacccgcgcatggatgccactgcacgcctactatggaagggggacgcctactattgaagctcccatccacgatcccattccaaatccagcttcaaatttgccccaatctgcagtcaaccttccacccaacatcttccccttatatattgttgtctctgctataaaagacttgacagaggcgaggcctccaaaccactaccactctccaccgattcactggagtcgcgagacgttggaggccctgagacgttcaagcctcatctgcagtctcctccaaagaggccatttaattacgcctatttgatttgagagctcgagtagacaagatcatgtaggctctgaaatctatcttctggaggaccaaggccattaaagtacagggttctttcagcagcaatggcctcactatttcttctaaattaccaagattctcggacatgtacactctcacgatagcaagtgtagacccacagtttatcgtagcaaacaagccaatccatttcactaagagcgtgacaaagtgtcacagagcccttcttcttcgctctgccacccacaccgtggcacctcgccgagctccgcatcgaaactgcgttgttgccttctccgtgctctgcgttgaagacatgcagcgcaagcgtcgctgcctcatcccggcctcctctagacgcaagacgacaagaggatgctgctcgagctgtccccttggatcccacgccgaacgccctgtcacctccgtcgacaacatcaagctcctgtccctcccccacctcactgcaatagattcttcggttgtggaacttagggagagttttgagtcgtggtggtgtataaagcagtcgtcaagcacaagctcctccaaagtaccatcaggatcctacagtagaagagttagccaaaacactcgattgttggccatcaatgaattattatatcacgggttgtaaatatgttcttatgccatgaaaattcaacgaatgtcacgcccttttcgtaatagatcatgttaaaagcatgtgacttttatcgactttacaccgactcaagattggtgtaaacacatgccatacaagaggtttgcggaagctattatcatggcctcaaagaaatataagattgcttacaacaagaaacgttctggatgggcggaggatatctttaagtgggaacatacaattcagactggtgttccaattgacttaagagggtttaataccagctacctcgttctacaagttatgaccatgtgggggaatgacagacgaatgaaatttgttgggaatgcaaatattcttcgaaggaactttgtgattgatctgttaagttatgaggacaattcgtgccgatatgccatccctgcaaacatacaacagagacttatcgatatcgctaaaaaggattagctgattagtgtacggttgtcgacacatttgtctgtaattaaaaattctaaattatctttttagaaataatttgtgtgatattgataatgaaaaacacggattttgcatattatatagtgatgtttgtcgttccgtatcaa

SEQ ID NO: 1358 - DNA, 2847 bp, Zea Mays
ccgcgccccaccaactctgcccttgaacccgcctgccaccaatctcgtcgccgggtatcccgcccgccaccaaaccgcgccccctgtcctcgccctcgacggcgctgccctttgtgatggtgcccttccttccccagctcccccaaatgctgccaagtcccccaccaacgccgcccttccttccccggcagcccgcccccactagctccgcgctccgcgtgccccaccagccacgctagctgccgccgggatactcaccacctccgcgcccccaccaaaccgaaaggcgagatccgccgccagttccacgctccgcgcgtcaagagcagccatcacagtgatgccgcgcgagggagaggaaggaaggccgcgtgagtcgccgcagggaaagctgccaggcatcaccgtaaggtgagatccggttgcgcgtgagggagaggaaggaaggccgcgtgagtcgccgccgagaaagccacagggaaagccgccagtgtgagtcgccgccgggaaagccgccagtgtatgatggttcggtcatccagatgtgggtggcgtacaacgttgtcactcatttcctcctgcactgtaccgactgcaaggcgcaagctcactggcgtgttcgacctcctgaagattatgctatacaaggtgtgcgcaaatggctcatcggcgcttcccgattgggagatggaggccagcatcatggagttctacgctgttgcatcttctaagtggcatcaccgagctggacgacaggaaacagagaaaattgtgcctgaaaaaatttaggagcagggatgagcatttatcagaagtggacacaaagagggagcttgagtgtgggctctgcatgcggtgctttgagtattggctttgtacagtcttttttttgtttgctgacgccttcctaggaaaggggatcttctgcgacgatagcgatgaagacgaagacagtgaccagggcaatgaaaagcaggagacacatttccataccattgttaactgcatcacagagtctctgaagacacaaattattggtagaacttatgatgaagtcgcaatatgtctctttaacactatgatgctccagttctgcaacttctttccgacaaaatgtccactcatatatttacaactctataagggtttagtgtgggcgtccacaccccttcaccatgcccccgcctcagcccccgtcaaccacgcaaggactccagcgtgaaagtcgggcccgtcgccggccttgcatcgtcgcgacacactccgtgcctcccttccatcatcgctcgatcgcggtttcgtcgcactccttccttcgatggcactcctttccatcctcgattcctcctgccccagcaccggccagcctcatcaggtcattcctcctcgctgtgccccctccaccgtattcaaccacctcttcctcggcaccaaacgtagacgcctcctccgcgatgccctcagaccgcccgtcctcgcccaacatctccttgccgcatatgcccgcagcggctgcctcgcatcccgcccgcacgccacctccttgcacccgcgcatggatgccactgcacgcctactatggaagggggacgcctactattgaagctcccatccacgatcccattccaaatccagcttcaaatttgccccaatctgcagtcaaccttccacccaacatcttccccttatatattgttgtctctgctataaaagacttgacagaggcgaggcctccaaaccactaccactctccaccgattcactggagtcgcgagacgttggaggccctgagacgttcaagcctcatctgcagtctcctccaaagagtcacagagcccttcttcttcgctctgccacccacaccgtggcacctcgccgagctccgcatcgaaactgcgttgttgccttctccgtgctctgcgttgaagacatgcagcgcaagcgtcgctgcctcatcccggcctcctctagacgcaagacgacaagaggatgctgctcgagctgtccccttggatcccacgccgaacgccctgtcacctccgtcgacaacatcaagctcctgtccctcccccacctcactgcaatagattcttcggttgtggaacttagggagagttttgagtcgtggtggtgtataaagcagtcgtcaagcacaagctcctccaaagtaccatcaggatcctacagtagaagagttagccaaaacactcgattgttggccatcaatgaattattatatcacgggttgtaaatatgttcttatgccatgaaaattcaacgaatgtcacgcccttttcgtaatagatcatgttaaaagcatgtgacttttatcgactttacaccgactcaagattggtgtaaacacatgccatacaagaggtttgcggaagctattatcatggcctcaaagaaatataagattgcttacaacaagaaacgttctggatgggcggaggatatctttaagtgggaacatacaattcagactggtgttccaattgacttaagagggtttaataccagctacctcgttctacaagttatgaccatgtgggggaatgacagacgaatgaaatttgttgggaatgcaaatattcttcgaaggaactttgtgattgatctgttaagttatgaggacaattcgtgccgatatgccatccctgcaaacatacaacagagacttatcgatatcgctaaaaaggattagctgattagtgtacggttgtcgacacatttgtctgtaattaaaaattctaaattatctttttagaaataatttgtgtgatattgataatgaaaaacacggattttgcatattatatagtgatgtttgtcgttccgtatcaa

SEQ ID NO: 1359 - DNA, 3088 bp, Zea Mays
cgcgccccaccaactctgcccttgaacccgcctgccaccaatctcgtcgccgggtatcccgcccgccaccaaaccgcgccccctgtcctcgccctcgacggcgctgccctttgtgatggtgcccttccttccccagctcccccaaatgctgccaagtcccccaccaacgccgcccttccttccccggcagcccgcccccactagctccgcgctccgcgtgccccaccagccacgctagctgccgccgggatactcaccacctccgcgcccccaccaaaccgaaaggcgagatccgccgccagttccacgctccgcgcgtcaagagcagccatcacagtgatgccgcgcgagggagaggaaggaaggccgcgtgagtcgccgcagggaaagctgccaggcatcaccgtaaggtgagatccggttgcgcgtgagggagaggaaggaaggccgcgtgagtcgccgccgagaaagccacagggaaagccgccagtgtgagtcgccgccgggaaagccgccagtgtatgatggttcggtcatccagatgtgggtggcgtacaacgttgtcactcatttcctcctgcactgtaccgactgcaaggcgcaagctcactggcgtgttcgacctcctgaagattatgctatacaaggtgtgcgcaaatggctcatcggcgcttcccgattgggagatggaggccagcatcatggagttctacgctgttgcatcttctaagtggcatcaccgagctggacgacaggaaacagagaaaattgtgcctgaaaaaatttaggagcagggatgagcatttatcagaagtggacacaaagagggagcttgagtgtgggctctgcatgcggtgctttgagtattggctttgtacagtcttttttttgtttgctgacgccttcctaggaaaggggatcttctgcgacgatagcgatgaagacgaagacagtgaccagggcaatgaaaagcaggagacacatttccataccattgttaactgcatcacagagtctctgaagacacaaattattggtagaacttatgatgaagtcgcaatatgtctctttaacactatgatgctccagttctgcaacttctttccgacaaaatgtccactcatatatttacaactctataagggtttagtgtgggcgtccacaccccttcaccatgcccccgcctcagcccccgtcaaccacgcaaggactccagcgtgaaagtcgggcccgtcgccggccttgcatcgtcgcgacacactccgtgcctcccttccatcatcgctcgatcgcggtttcgtcgcactccttccttcgatggcactcctttccatcctcgattcctcctgccccagcaccggccagcctcatcaggtcattcctcctcgctgtgccccctccaccgtattcaaccacctcttcctcggcaccaaacgtagacgcctcctccgcgatgccctcagaccgcccgtcctcgcccaacatctccttgccgcatatgcccgcagcggctgcctcgcatcccgcccgcacgccacctccttgcacccgcgcatggatgccactgcacgcctactatggaagggggacgcctactattgaagctcccatccacgatcccattccaaatccagcttcaaatttgccccaatctgcagtcaaccttccacccaacatcttccccttatatattgttgtctctgctataaaagacttgacagaggcgaggcctccaaaccactaccactctccaccgattcactggagtcgcgagacgttggaggccctgagacgttcaagcctcatctgcagtctcctccaaagaggccatttaattacgcctatttgatttgagagctcgagtagacaagatcatgtaggctctgaaatctatcttctggaggaccaaggccattaaagtacagggttctttcagcagcaatggcctcactatttcttctaaattaccaagattctcggacatgtacactctcacgatagcaagtgtagacccacagtttatcgtagcaaacaagccaatccatttcactaagagcgtgacaaagtgtcacagagcccttcttcttcgctctgccacccacaccgtggcacctcgccgagctccgcatcgaaactgcgttgttgccttctccgtgctctgcgttgaagacatgcagcgcaagcgtcgctgcctcatcccggcctcctctagacgcaagacgacaagaggatgctgctcgagctgtccccttggatcccacgccgaacgccctgtcacctccgtcgacaacatcaagctcctgtccctcccccacctcactgcaatagattcttcggttgtggaacttagggagagttttgagtcgtggtggtgtataaagcagtcgtcaagcacaagctcctccaaagtaccatcaggatcctacagtagaagagttagccaaaacactcgattgttggccatcaatgaattattatatcacgggttgtaaatatgttcttatgccatgaaaattcaacgaatgtcacgcccttttcgtaatagatcatgttaaaagcatgtgacttttatcgactttacaccgactcaagattggtgtaaacacatgccatacaagaggtttgcggaagctattatcatggcctcaaagaaatataagattgcttacaacaagaaacgttctggatgggcggaggatatctttaagtgggaacatacaattcagactggtgttccaattgacttaagagggtttaataccagctacctcgttctacaagttatgaccatgtgggggaatgacagacgaatgaaatttgttgggaatgcaaatattcttcgaaggaactttgtgattgatctgttaagttatgaggacaattcgtgccgatatgccatccctgcaaacatacaacagagacttatcgatatcgctaaaaaggattagctgattagtgtacggttgtcgacacatttgtctgtaattaaaaattctaaattatctttttagaaataatttgtgtgatattgataatgaaaaacacggattttgcatattatatagtgatgtttgtcgttccgtatcaa

SEQ ID NO: 1360 - DNA, 3065 bp, Zea Mays
gccaccaaaccgcgccccctgtcctcgccctcgacggcgctgccctttgtgatggtgcccttccttccccagctcccccaaatgctgccaagtcccccaccaacgccgcccttccttccccggcagcccgcccccactagctccgcgctccgcgtgccccaccagccacgctagctgccgccgggatactcaccacctccgcgcccccaccaaaccgaaaggcgagatccgccgccagttccacgctccgcgcgtcaagagcagccatcacagtgatgccgcgcgagggagaggaaggaaggccgcgtgagtcgccgcagggaaagctgccaggcatcaccgtaaggtgagatccggttgcgcgtgagggagaggaaggaaggccgcgtgagtcgccgccgagaaagccacagggaaagccgccagtgtgagtcgccgccgggaaagccgccagtgtatgatggttcggtcatccagatgtgggtggcgtacaacgttgtcactcatttcctcctgcactgtaccgactgcaaggcgcaagctcactggcgtgttcgacctcctgaagattatgctatacaaggtgtgcgcaaatggctcatcggcgcttcccgattgggagatggaggccagcatcatggagttctacgctgttgcatcttctaagtggcatcaccgagctggacgacaggaaacagagaaaattgtgcctgaaaaaatttaggagcagggatgagcatttatcagaagtggacacaaagagggagcttgagtgtgggctctgcatgcggtgctttgagtattggaaaggggatcttctgcgacgatagcgatgaagacgaagacagtgaccagggcaatgaaaagcaggagacacatttccataccattgttaactgcatcacagagtctctgaagacacaaattattggtagaacttatgatgaagtcgcaatatgtctctttaacactatgatgctccagttctgcaacttctttccgacaaaatgtccactcatatatttacaactctataagggtttagtgtgggcgtccacaccccttcaccatgcccccgcctcagcccccgtcaaccacgcaaggactccagcgtgaaagtcgggcccgtcgccggccttgcatcgtcgcgacacactccgtgcctcccttccatcatcgctcgatcgcggtttcgtcgcactccttccttcgatggcactcctttccatcctcgattcctcctgccccagcaccggccagcctcatcaggtcattcctcctcgctgtgccccctccaccgtattcaaccacctcttcctcggcaccaaacgtagacgcctcctccgcgatgccctcagaccgcccgtcctcgcccaacatctccttgccgcatatgcccgcagcggctgcctcgcatcccgcccgcacgccacctccttgcacccgcgcatggatgccactgcacgcctactatggaagggggacgcctactattgaagctcccatccacgatcccattccaaatccagcttcaaatttgccccaatctgcagtcaaccttccacccaacatcttccccttatatattgttgtctctgctataaaagacttgacagaggcgaggcctccaaaccactaccactctccaccgattcactggagtcgcgagacgttggaggccctgagacgttcaagcctcatctgcagtctcctccaaagaggtccacaaatgatttgagagctgtaggtctacaaatgataatgcaacaaattctgattcatgcatttctttactgtgtggaggccatttaattacgcctatttgatttgagagctcgagtagacaagatcatgtaggctctgaaatctatcttctggaggaccaaggccattaaagtacagggttctttcagcagcaatggcctcactatttcttctaaattaccaagattctcggacatgtacactctcacgatagcaagtgtagacccacagtttatcgtagcaaacaagccaatccatttcactaagagcgtgacaaagtgtcacagagcccttcttcttcgctctgccacccacaccgtggcacctcgccgagctccgcatcgaaactgcgttgttgccttctccgtgctctgcgttgaagacatgcagcgcaagcgtcgctgcctcatcccggcctcctctagacgcaagacgacaagaggatgctgctcgagctgtccccttggatcccacgccgaacgccctgtcacctccgtcgacaacatcaagctcctgtccctcccccacctcactgcaatagattcttcggttgtggaacttagggagagttttgagtcgtggtggtgtataaagcagtcgtcaagcacaagctcctccaaagtaccatcaggatcctacagtagaagagttagccaaaacactcgattgttggccatcaatgaattattatatcacgggttgtaaatatgttcttatgccatgaaaattcaacgaatgtcacgcccttttcgtaatagatcatgttaaaagcatgtgacttttatcgactttacaccgactcaagattggtgtaaacacatgccatacaagaggtttgcggaagctattatcatggcctcaaagaaatataagattgcttacaacaagaaacgttctggatgggcggaggatatctttaagtgggaacatacaattcagactggtgttccaattgacttaagagggtttaataccagctacctcgttctacaagttatgaccatgtgggggaatgacagacgaatgaaatttgttgggaatgcaaatattcttcgaaggaactttgtgattgatctgttaagttatgaggacaattcgtgccgatatgccatccctgcaaacatacaacagagacttatcgatatcgctaaaaaggattagctgattagtgtacggttgtcgacacatttgtctgtaattaaaaattctaaattatctttttagaaataatttgtgtgatattgataatgaaaaacacggattttgcatattatatagtgatgtttgtcgttccgtatcaa

SEQ ID NO: 1361 - DNA, 2920 bp, Zea Mays
caaaccgcgccccctgtcctcgccctcgacggcgctgccctttgtgatggtgcccttccttccccagctcccccaaatgctgccaagtcccccaccaacgccgcccttccttccccggcagcccgcccccactagctccgcgctccgcgtgccccaccagccacgctagctgccgccgggatactcaccacctccgcgcccccaccaaaccgaaaggcgagatccgccgccagttccacgctccgcgcgtcaagagcagccatcacagtgatgccgcgcgagggagaggaaggaaggccgcgtgagtcgccgcagggaaagctgccaggcatcaccgtaaggtgagatccggttgcgcgtgagggagaggaaggaaggccgcgtgagtcgccgccgagaaagccacagggaaagccgccagtgtgagtcgccgccgggaaagccgccagtgtatgatggttcggtcatccagatgtgggtggcgtacaacgttgtcactcatttcctcctgcactgtaccgactgcaaggcgcaagctcactggcgtgttcgacctcctgaagattatgctatacaaggtgtgcgcaaatggctcatcggcgcttcccgattgggagatggaggccagcatcatggagttctacgctgttgcatcttctaagtggcatcaccgagctggacgacaggaaacagagaaaattgtgcctgaaaaaatttaggagcagggatgagcatttatcagaagtggacacaaagagggagcttgagtgtgggctctgcatgcggtgctttgagtattggctttgtacagtcttttttttgtttgctgacgccttcctaggaaaggggatcttctgcgacgatagcgatgaagacgaagacagtgaccagggcaatgaaaagcaggagacacatttccataccattgttaactgcatcacagagtctctgaagacacaaattattggtagaacttatgatgaagtcgcaatatgtctctttaacactatgatgctccagttctgcaacttctttccgacaaaatgtccactcatatatttacaactctataagggtttagtgtgggcgtccacaccccttcaccatgcccccgcctcagcccccgtcaaccacgcaaggactccagcgtgaaagtcgggcccgtcgccggccttgcatcgtcgcgacacactccgtgcctcccttccatcatcgctcgatcgcggtttcgtcgcactccttccttcgatggcactcctttccatcctcgattcctcctgccccagcaccggccagcctcatcaggtcattcctcctcgctgtgccccctccaccgtattcaaccacctcttcctcggcaccaaacgtagacgcctcctccgcgatgccctcagaccgcccgtcctcgcccaacatctccttgccgcatatgcccgcagcggctgcctcgcatcccgcccgcacgccacctccttgcacccgcgcatggatgccactgcacgcctactatggaagggggacgcctactattgaagctcccatccacgatcccattccaaatccagcttcaaatttgccccaatctgcagtcaaccttccacccaacatcttccccttatatattgttgtctctgctataaaagacttgacagaggcgaggcctccaaaccactaccactctccaccgattcactggagtcgcgagacgttggaggccctgagacgttcaagcctcatctgcagtctcctccaaagagggttctttcagcagcaatggcctcactatttcttctaaattaccaagattctcggacatgtacactctcacgatagcaagtgtagacccacagtttatcgtagcaaacaagccaatccatttcactaagagcgtgacaaagtgtcacagagcccttcttcttcgctctgccacccacaccgtggcacctcgccgagctccgcatcgaaactgcgttgttgccttctccgtgctctgcgttgaagacatgcagcgcaagcgtcgctgcctcatcccggcctcctctagacgcaagacgacaagaggatgctgctcgagctgtccccttggatcccacgccgaacgccctgtcacctccgtcgacaacatcaagctcctgtccctcccccacctcactgcaatagattcttcggttgtggaacttagggagagttttgagtcgtggtggtgtataaagcagtcgtcaagcacaagctcctccaaagtaccatcaggatcctacagtagaagagttagccaaaacactcgattgttggccatcaatgaattattatatcacgggttgtaaatatgttcttatgccatgaaaattcaacgaatgtcacgcccttttcgtaatagatcatgttaaaagcatgtgacttttatcgactttacaccgactcaagattggtgtaaacacatgccatacaagaggtttgcggaagctattatcatggcctcaaagaaatataagattgcttacaacaagaaacgttctggatgggcggaggatatctttaagtgggaacatacaattcagactggtgttccaattgacttaagagggtttaataccagctacctcgttctacaagttatgaccatgtgggggaatgacagacgaatgaaatttgttgggaatgcaaatattcttcgaaggaactttgtgattgatctgttaagttatgaggacaattcgtgccgatatgccatccctgcaaacatacaacagagacttatcgatatcgctaaaaaggattagctgattagtgtacggttgtcgacacatttgtctgtaattaaaaattctaaattatctttttagaaataatttgtgtgatattgataatgaaaaacacggattttgcatattatatagtgatgtttgtcgttccgtatcaa

SEQ ID NO: 1362 - DNA, 4181 bp, Zea Mays
aacaaacgccaccgcctcccacagcacgaaaccttctctcctcttctcgttctccccctctatagtcctccgccgcctccattgccttctcttgggctcctccccgtatcccgggactactagtccaacctcccaattctgcggcactcaccattcgacaagcactgaaccctaccccacccaccagtccccgcagccgcgctccgcaatggcgagcggggcggctagaaagcgccgccgcaagtcgtcgccccctgccgccgccgcggctgcacgggacgggaggaagctcctcgtcggcgaagtcgtcgaggtgctgagttgtgatcaaggactacgtggctcctggcataaggctattgttattggtattctggaaaatgctcgcgcagtcagatatactgatttcattgatgaaaatgggtcacctcttgttgagaatgttcaagtgtcagatgccattgatggtaagtcaagtatgcctgaggaactcattcgtggcaacattaggccaatgtgtccacatcaagcactgcaggtgtctcatgcaagctatggactttgtgttgacgcactcatagaaagttcctactgggaaggtgttattgctgatcatgctgaaggctctatggaaaggaaagtccttttccctgatgaaggtgatgaatgcattatagaagttgatcagctacgtcttactcaagactgggatgaagctacaggggaatggaaaccacgtggaatctggtcatttctgcagatacttttgtcacatgaagagagagatggtttacctgtgtcaatcaggcagatatggtttgacttaagatccaaaccttcttttaagactgatgccaaaatgtggatgtgtggaacagaagatttttgggagagatcacttgcagatgtcattgctgaattgtggtctctatgtgacaagcctaccctagatggatatcaagtggaagcagttcagaaggatacagttgagaccactgtcttggataggctggatccattccaagcattatcagaatacatctcatgctatcggaataataggaaaaatgctcttatcaaaaaagagtgggcaaagcaacaccttaaatcttcaggatggacctttctggatgacagacctaagaacaagttttacatctcacctgatggtaagcggtttccatcttttctaggagcatgccaggcgtgtttggctgcaaaagaagcaaatggttaccaatatgatcatacagaaaatttgcatctagacagtatgagtctggtgcacaagaatgcatgctacaaccagacacacatggatcttgccttggtaaagaacaagtccaatgataaatggatcacgagcccatcaagatcttgggaattggttcaactggatgctgaattttccccacagatagtttcccttcttgctagttatcaagatggcacaactgtccttcagaggacaattgatagaactctgagtgtgaagctgaagaagcatctattggcactgggttggagtattaagttcaaaaaggacgaaattcaagaaaatggccatcataaacacactacaagataccggtacgagtcaccttatgggaagacttatgtttctatcattcaggtaatatgcagtttgatagttggaggcgttaaacaagatgacaggcccagctatcggacagcagcaaaaggtgctcatttgacagtgtcaactggcctggcaaggctcaataaacgtaaacgaagggataaaactgatgctcttgaaaaatacatagactatatgaaaactgataagcaaaattccaggaggaggaaactgttgagatcaaatgctcagaagtttctcaaatctgctgggtggaatttttggttaaagaaaaagtctagaaacaaattggagttgaggtatggtgctccacatggcaagtcttacagctctttagtggcagcatgtaaaggttacttggaaaatggatatcaggaggacagtgatgcagacattaaaatcgccaaccatggttctgctgatggttctatgcgtccatcaaaattgatagcactcagcggtggattaaaggattcaagtaaaatacaggatctttccctgtcggcatcacgtgaagacagttttgtctttgttggtagagaaaaatattgtggtaccaagggataaggttacatataagcgaagtgatggacctggtataaaggaaggttccatcagcagagatggaataaaatgcatgtgttgtaatgaattattcactgtggagaattttgaggttcatgctgggagcagtacaccattaccttcggctcatatgtttttaaaggatggaaggtccctatcacagtgtttagttgaattcatgggtggaaacaagcccagagatccactgcatgtgcgcttgaaggggagtagttctgatctggaaagtgattcgatatgctctgtgtgccatgatggtggggatttattactttgtgacaattgcccatcatcttatcattatgattgtgtcggcttggaggtagaggccattccagaaggaagctggtattgtccatcctgcagatgcggtatttgtaacttgagtgattatgatcctgatatcagccaattcactgagaagaccatagtgtactgtgatcagtgtgaacgggaatatcatgtcggttgcactagaaatagtgaccatcagcttatctgccgaccagaaggttgttggttttgcagcaggggatgctcaaatgtatttcaacatttgcaagaagtcattgggaaacaagttccaactccaatcgaaggcttatcttgcactatcttgaaattttgtagagcgaacggcagtgaccatggcgattatgatgatgagataatggcagagcattatggcaagttgtgcattgcagttgatattcttcatgaatgctttgttactattatcgagcctcgcacacagagtgatatttctgaggatattgtcttcaatagagaatcagaactcagacgactaaattttaggggattctacataatacttctccagaaaggtggtgaactagtatctgtcggcacttttaggatttgcggccagaagtttgctgagctgcctctgatcggtacaagatctctataccgtcgtcaaggaatgtgtcgacttctaattaatgaactggaaaagttgcttttagacttgggggtggaaagacttctattaccggcagttcctgaacttttgcaaacatggacatgctcatttggtttcacagttatgtcaaattctgagaggcttgagttggcagggaatagcattctcagtttccagggaaccaccatgtgtcagaagattttaaatgttgcacacaacatttcacaagatagaagtattccatcaatgtccaattctgagagaatggggttagcagagaacatggtggtgaagaaggcatttattccattgacagtggagccagaccatcatgttgatttgattgtggagcctgagctagtaatgaaaattgagaataacagcagtgaggagggtatttcttcaattgatccgctgactagtatgccagaccctcaagttggtttggcagtggggccagagatggtaccggtaagtcgggaaaacaaagataaagagggtatttgtttcattgatgctccaacttgtccgccagatcctcaagttgatttaacaacgggcattcatgagcaatcatttgtcagatcagtgcaacgagaattgcactttgaatataacacctaacacagcttcaggattggaatacaagttctcaggaaaatgctatgagcgggtaaaaaagggcgctcgcccaaggaatgtctggcttagaatctcgaccaaataataaccaaaggtagatctagtagagctacggatgaaggatgcttaactttcatgcaataagctttcagccatcgccttggcattgtccaagttcaagtcgaaactaacctaacctggttacggaagcgtgtgattgtgtatttcccacggtgtaaattaaggactatccaactgataacatactgtccagctacgaggaaaataagattatgttggagcaatttctggtgatggttttaccctgatgtgtcatattattatcagttctgtcgccatactgttcattgg

SEQ ID NO: 1363 - DNA, 4213 bp, Zea Mays
cccacagcacgaaaccttctctcctcttctcgttctccccctctatagtcctccgccgcctccattgccttctcttgggctcctccccgtatcccgggactactagtccaacctcccaattctgcggcactcaccattcgacaagcactgaaccctaccccacccaccagtccccgcagccgcgctccgcaatggcgagcggggcggctagaaagcgccgccgcaagtcgtcgccccctgccgccgccgcggctgcacgggacgggaggaagctcctcgtcggcgaagtcgtcgaggtgctgagttgtgatcaaggactacgtggctcctggcataaggctattgttattggtattctggaaaatgctcgcgcagtcagatatactgatttcattgatgaaaatgggtcacctcttgttgagaatgttcaagtgtcagatgccattgatggtaagtcaagtatgcctgaggaactcattcgtggcaacattaggccaatgtgtccacatcaagcactgcaggtgtctcatgcaagctatggactttgtgttgacgcactcatagaaagttcctactgggaaggtgttattgctgatcatgctgaaggctctatggaaaggaaagtccttttccctgatgaaggtgatgaatgcattatagaagttgatcagctacgtcttactcaagactgggatgaagctacaggggaatggaaaccacgtggaatctggtcatttctgcagatacttttgtcacatgaagagagagatggtttacctgtgtcaatcaggcagatatggtttgacttaagatccaaaccttcttttaagactgatgccaaaatgtggatgtgtggaacagaagatttttgggagagatcacttgcagatgtcattgctgaattgtggtctctatgtgacaagcctaccctagatggatatcaagtggaagcagttcagaaggatacagttgagaccactgtcttggataggctggatccattccaagcattatcagaatacatctcatgctatcggaataataggaaaaatgctcttatcaaaaaagagtgggcaaagcaacaccttaaatcttcaggatggacctttctggatgacagacctaagaacaagttttacatctcacctgatggtaagcggtttccatcttttctaggagcatgccaggcgtgtttggctgcaaaagaagcaaatggttaccaatatgatcatacagaaaatttgcatctagacagtatgagtctggtgcacaagaatgcatgctacaaccagacacacatggatcttgccttggtaaagaacaagtccaatgataaatggatcacgagcccatcaagatcttgggaattggttcaactggatgctgaattttccccacagatagtttcccttcttgctagttatcaagatggcacaactgtccttcagaggacaattgatagaactctgagtgtgaagctgaagaagcatctattggcactgggttggagtattaagttcaaaaaggacgaaattcaagaaaatggccatcataaacacactacaagataccggtacgagtcaccttatgggaagacttatgtttctatcattcaggtaatatgcagtttgatagttggaggcgttaaacaagatgacaggcccagctatcggacagcagcaaaaggtgctcatttgacagtgtcaactggcctggcaaggctcaataaacgtaaacgaagggataaaactgatgctcttgaaaaatacatagactatatgaaaactgataagcaaaattccaggaggaggaaactgttgagatcaaatgctcagaagtttctcaaatctgctgggtggaatttttggttaaagaaaaagtctagaaacaaattggagttgaggtatggtgctccacatggcaagtcttacagctctttagtggcagcatgtaaaggttacttggaaaatggatatcaggaggacagtgatgcagacattaaaatcgccaaccatggttctgctgatggttctatgcgtccatcaaaattgatagcactcagcggtggattaaaggattcaagtaaaatacagggtatgcctgttgtagacagatgtagcaacatgtttaccttgtctgcacatcatggaaaatgtaggaaaagaaaaccatcttcagtttctttgaacagtgcacgagttctttgttcacatggacagatctttccctgtcggcatcacgtgaagacagttttgtctttgttggtagagaaaaatattgtggtaccaagggataaggttacatataagcgaagtgatggacctggtataaaggaaggttccatcagcagagatggaataaaatgcatgtgttgtaatgaattattcactgtggagaattttgaggttcatgctgggagcagtacaccattaccttcggctcatatgtttttaaaggatggaaggtccctatcacagtgtttagttgaattcatgggtggaaacaagcccagagatccactgcatgtgcgcttgaaggggagtagttctgatctggaaagtgattcgatatgctctgtgtgccatgatggtggggatttattactttgtgacaattgcccatcatcttatcattatgattgtgtcggcttggaggtagaggccattccagaaggaagctggtattgtccatcctgcagatgcggtatttgtaacttgagtgattatgatcctgatatcagccaattcactgagaagaccatagtgtactgtgatcagtgtgaacgggaatatcatgtcggttgcactagaaatagtgaccatcagcttatctgccgaccagaaggttgttggttttgcagcaggggatgctcaaatgtatttcaacatttgcaagaagtcattgggaaacaagttccaactccaatcgaaggcttatcttgcactatcttgaaattttgtagagcgaacggcagtgaccatggcgattatgatgatgagataatggcagagcattatggcaagttgtgcattgcagttgatattcttcatgaatgctttgttactattatcgagcctcgcacacagagtgatatttctgaggatattgtcttcaatagagagatttgcggccagaagtttgctgagctgcctctgatcggtacaagatctctataccgtcgtcaaggaatgtgtcgacttctaattaatgaactggaaaagttgcttttagacttgggggtggaaagacttctattaccggcagttcctgaacttttgcaaacatggacatgctcatttggtttcacagttatgtcaaattctgagaggcttgagttggcagggaatagcattctcagtttccagggaaccaccatgtgtcagaagattttaaatgttgcacacaacatttcacaagatagaagtattccatcaatgtccaattctgagagaatggggttagcagagaacatggtggtgaagaaggcatttattccattgacagtggagccagaccatcatgttgatttgattgtggagcctgagctagtaatgaaaattgagaataacagcagtgaggagggtatttcttcaattgatccgctgactagtatgccagaccctcaagttggtttggcagtggggccagagatggtaccggtaagtcgggaaaacaaagataaagagggtatttgtttcattgatgctccaacttgtccgccagatcctcaagttgatttaacaacgggcattcatgagcaatcatttgtcagtgctggtgcagatcagtgcaacgagaattgcactttgaatataacacctaacacagcttcaggattggaatacaagttctcaggaaaatgctatgagcgggtaaaaaagggcgctcgcccaaggaatgtctggcttagaatctcgaccaaataataaccaaaggtagatctagtagagctacggatgaaggatgcttaactttcatgcaataagctttcagccatcgccttggcattgtccaagttcaagtcgaaactaacctaacctggttacggaagcgtgtgattgtgtatttcccacggtgtaaattaaggactatccaactgataacatactgtccagctacgaggaaaataagattatgttggagcaatttctggtgatggttttaccctgatgtgtcatattattatcagttctgtcgccatactgttcattgg

SEQ ID NO: 1364 - DNA, 4163 bp, Zea Mays
aaccttctctcctcttctcgttctccccctctatagtcctccgccgcctccattgccttctcttgggctcctccccgtatcccgggactactagtccaacctcccaattctgcggcactcaccattcgacaagcactgaaccctaccccacccaccagtccccgcagccgcgctccgcaatggcgagcggggcggctagaaagcgccgccgcaagtcgtcgccccctgccgccgccgcggctgcacgggacgggaggaagctcctcgtcggcgaagtcgtcgaggtgctgagttgtgatcaaggactacgtggctcctggcataaggctattgttattggtattctggaaaatgctcgcgcagtcagatatactgatttcattgatgaaaatgggtcacctcttgttgagaatgttcaagtgtcagatgccattgatggtaagtcaagtatgcctgaggaactcattcgtggcaacattaggccaatgtgtccacatcaagcactgcaggtgtctcatgcaagctatggactttgtgttgacgcactcatagaaagttcctactgggaaggtgttattgctgatcatgctgaaggctctatggaaaggaaagtccttttccctgatgaaggtgatgaatgcattatagaagttgatcagctacgtcttactcaagactgggatgaagctacaggggaatggaaaccacgtggaatctggtcatttctgcagatacttttgtcacatgaagagagagatggtttacctgtgtcaatcaggcagatatggtttgacttaagatccaaaccttcttttaagactgatgccaaaatgtggatgtgtggaacagaagatttttgggagagatcacttgcagatgtcattgctgaattgtggtctctatgtgacaagcctaccctagatggatatcaagtggaagcagttcagaaggatacagttgagaccactgtcttggataggctggatccattccaagcattatcagaatacatctcatgctatcggaataataggaaaaatgctcttatcaaaaaagagtgggcaaagcaacaccttaaatcttcaggatggacctttctggatgacagacctaagaacaagttttacatctcacctgatggtaagcggtttccatcttttctaggagcatgccaggcgtgtttggctgcaaaagaagcaaatggttaccaatatgatcatacagaaaatttgcatctagacagtatgagtctggtgcacaagaatgcatgctacaaccagacacacatggatcttgccttggtaaagaacaagtccaatgataaatggatcacgagcccatcaagatcttgggaattggttcaactggatgctgaattttccccacagatagtttcccttcttgctagttatcaagatggcacaactgtccttcagaggacaattgatagaactctgagtgtgaagctgaagaagcatctattggcactgggttggagtattaagttcaaaaaggacgaaattcaagaaaatggccatcataaacacactacaagataccggtacgagtcaccttatgggaagacttatgtttctatcattcaggtaatatgcagtttgatagttggaggcgttaaacaagatgacaggcccagctatcggacagcagcaaaaggtgctcatttgacagtgtcaactggcctggcaaggctcaataaacgtaaacgaagggataaaactgatgctcttgaaaaatacatagactatatgaaaactgataagcaaaattccaggaggaggaaactgttgagatcaaatgctcagaagtttctcaaatctgctgggtggaatttttggttaaagaaaaagtctagaaacaaattggagttgaggtatggtgctccacatggcaagtcttacagctctttagtggcagcatgtaaaggttacttggaaaatggatatcaggaggacagtgatgcagacattaaaatcgccaaccatggttctgctgatggttctatgcgtccatcaaaattgatagcactcagcggtggattaaaggattcaagtaaaatacaggatctttccctgtcggcatcacgtgaagacagttttgtctttgttggtagagaaaaatattgtggtaccaagggataaggttacatataagcgaagtgatggacctggtataaaggaaggttccatcagcagagatggaataaaatgcatgtgttgtaatgaattattcactgtggagaattttgaggttcatgctgggagcagtacaccattaccttcggctcatatgtttttaaaggatggaaggtccctatcacagtgtttagttgaattcatgggtggaaacaagcccagagatccactgcatgtgcgcttgaaggggagtagttctgatctggaaagtgattcgatatgctctgtgtgccatgatggtggggatttattactttgtgacaattgcccatcatcttatcattatgattgtgtcggcttggaggtagaggccattccagaaggaagctggtattgtccatcctgcagatgcggtatttgtaacttgagtgattatgatcctgatatcagccaattcactgagaagaccatagtgtactgtgatcagtgtgaacgggaatatcatgtcggttgcactagaaatagtgaccatcagcttatctgccgaccagaaggttgttggttttgcagcaggggatgctcaaatgtatttcaacatttgcaagaagtcattgggaaacaagttccaactccaatcgaaggcttatcttgcactatcttgaaattttgtagagcgaacggcagtgaccatggcgattatgatgatgagataatggcagagcattatggcaagttgtgcattgcagttgatattcttcatgaatgctttgttactattatcgagcctcgcacacagagtgatatttctgaggatattgtcttcaatagagaatcagaactcagacgactaaattttaggggattctacataatacttctccagaaaggtggtgaactagtatctgtcggcacttttaggatttgcggccagaagtttgctgagctgcctctgatcggtacaagatctctataccgtcgtcaaggaatgtgtcgacttctaattaatgaactggaaaagttgcttttagacttgggggtggaaagacttctattaccggcagttcctgaacttttgcaaacatggacatgctcatttggtttcacagttatgtcaaattctgagaggcttgagttggcagggaatagcattctcagtttccagggaaccaccatgtgtcagaagattttaaatgttgcacacaacatttcacaagatagaagtattccatcaatgtccaattctgagagaatggggttagcagagaacatggtggtgaagaaggcatttattccattgacagtggagccagaccatcatgttgatttgattgtggagcctgagctagtaatgaaaattgagaataacagcagtgaggagggtatttcttcaattgatccgctgactagtatgccagaccctcaagttggtttggcagtggggccagagatggtaccggtaagtcgggaaaacaaagataaagagggtatttgtttcattgatgctccaacttgtccgccagatcctcaagttgatttaacaacgggcattcatgagcaatcatttgtcagtgctggtgcagatcagtgcaacgagaattgcactttgaatataacacctaacacagcttcaggattggaatacaagttctcaggaaaatgctatgagcgggtaaaaaagggcgctcgcccaaggaatgtctggcttagaatctcgaccaaataataaccaaaggtagatctagtagagctacggatgaaggatgcttaactttcatgcaataagctttcagccatcgccttggcattgtccaagttcaagtcgaaactaacctaacctggttacggaagcgtgtgattgtgtatttcccacggtgtaaattaaggactatccaactgataacatactgtccagctacgaggaaaataagattatgttggagcaatttctggtgatggttttaccctgatgtgtcatattattatcagttctgtcgccatactgttcattgg

SEQ ID NO: 1365 - DNA, 3920 bp, Zea Mays
ctcctcttctcgttctccccctctatagtcctccgccgcctccattgccttctcttgggctcctccccgtatcccgggactactagtccaacctcccaattctgcggcactcaccattcgacaagcactgaaccctaccccacccaccagtccccgcagccgcgctccgcaatggcgagcggggcggctagaaagcgccgccgcaagtcgtcgccccctgccgccgccgcggctgcacgggacgggaggaagctcctcgtcggcgaagtcgtcgaggtgagcgccatccgcgccgtcgtttgcgatgaggtccaccgcattgcggctaagggcgatggtccgcgggtgatgggcagggtgctgagttgtgatcaaggactacgtggctcctggcataaggctattgttattggtattctggaaaatgctcgcgcagtcagatatactgatttcattgatgaaaatgggtcacctcttgttgagaatgttcaagtgtcagatgccattgatggtaagtcaagtatgcctgaggaactcattcgtggcaacattaggccaatgtgtccacatcaagcactgcaggtgtctcatgcaagctatggactttgtgttgacgcactcatagaaagttcctactgggaaggtgttattgctgatcatgctgaaggctctatggaaaggaaagtccttttccctgatgaaggtgatgaatgcattatagaagttgatcagctacgtcttactcaagactgggatgaagctacaggggaatggaaaccacgtggaatctggtcatttctgcagatacttttgtcacatgaagagagagatggtttacctgtgtcaatcaggcagatatggtttgacttaagatccaaaccttcttttaagactgatgccaaaatgtggatgtgtggaacagaagatttttgggagagatcacttgcagatgtcattgctgaattgtggtctctatgtgacaagcctaccctagatggatatcaagtggaagcagttcagaaggatacagttgagaccactgtcttggataggctggatccattccaagcattatcagaatacatctcatgctatcggaataataggaaaaatgctcttatcaaaaaagagtgggcaaagcaacaccttaaatcttcaggatggacctttctggatgacagacctaagaacaagttttacatctcacctgatggtaagcggtttccatcttttctaggagcatgccaggcgtgtttggctgcaaaagaagcaaatggttaccaatatgatcatacagaaaatttgcatctagacagtatgagtctggtgcacaagaatgcatgctacaaccagacacacatggatcttgccttggtaaagaacaagtccaatgataaatggatcacgagcccatcaagatcttgggaattggttcaactggatgctgaattttccccacagatagtttcccttcttgctagttatcaagatggcacaactgtccttcagaggacaattgatagaactctgagtgtgaagctgaagaagcatctattggcactgggttggagtattaagttcaaaaaggacgaaattcaagaaaatggccatcataaacacactacaagataccggtacgagtcaccttatgggaagacttatgtttctatcattcaggtaatatgcagtttgatagttggaggcgttaaacaagatgacaggcccagctatcggacagcagcaaaaggtgctcatttgacagtgtcaactggcctggcaaggctcaataaacgtaaacgaagggataaaactgatgctcttgaaaaatacatagactatatgaaaactgataagcaaaattccaggaggaggaaactgttgagatcaaatgctcagaagtttctcaaatctgctgggtggaatttttggttaaagaaaaagtctagaaacaaattggagttgaggtatggtgctccacatggcaagtcttacagctctttagtggcagcatgtaaaggttacttggaaaatggatatcaggaggacagtgatgcagacattaaaatcgccaaccatggttctgctgatggttctatgcgtccatcaaaattgatagcactcagcggtggattaaaggattcaagtaaaatacaggatctttccctgtcggcatcacgtgaagacagttttgtctttgttggtagagaaaaatattgtgttatttctgcacaagttctttctatttacacttgctttaggaaagatatttcagttgcattctgcttttgtaggccattccagaaggaagctggtattgtccatcctgcagatgcggtatttgtaacttgagtgattatgatcctgatatcagccaattcactgagaagaccatagtgtactgtgatcagtgtgaacgggaatatcatgtcggttgcactagaaatagtgaccatcagcttatctgccgaccagaaggttgttggttttgcagcaggggatgctcaaatgtatttcaacatttgcaagaagtcattgggaaacaagttccaactccaatcgaaggcttatcttgcactatcttgaaattttgtagagcgaacggcagtgaccatggcgattatgatgatgagataatggcagagcattatggcaagttgtgcattgcagttgatattcttcatgaatgctttgttactattatcgagcctcgcacacagagtgatatttctgaggatattgtcttcaatagagaatcagaactcagacgactaaattttaggggattctacataatacttctccagaaaggtggtgaactagtatctgtcggcacttttaggatttgcggccagaagtttgctgagctgcctctgatcggtacaagatctctataccgtcgtcaaggaatgtgtcgacttctaattaatgaactggaaaagttgcttttagacttgggggtggaaagacttctattaccggcagttcctgaacttttgcaaacatggacatgctcatttggtttcacagttatgtcaaattctgagaggcttgagttggcagggaatagcattctcagtttccagggaaccaccatgtgtcagaagattttaaatgttgcacacaacatttcacaagatagaagtattccatcaatgtccaattctgagagaatggggttagcagagaacatggtggtgaagaaggcatttattccattgacagtggagccagaccatcatgttgatttgattgtggagcctgagctagtaatgaaaattgagaataacagcagtgaggagggtatttcttcaattgatccgctgactagtatgccagaccctcaagttggtttggcagtggggccagagatggtaccggtaagtcgggaaaacaaagataaagagggtatttgtttcattgatgctccaacttgtccgccagatcctcaagttgatttaacaacgggcattcatgagcaatcatttgtcagatcagtgcaacgagaattgcactttgaatataacacctaacacagcttcaggattggaatacaagttctcaggaaaatgctatgagcgggtaaaaaagggcgctcgcccaaggaatgtctggcttagaatctcgaccaaataataaccaaaggtagatctagtagagctacggatgaaggatgcttaactttcatgcaataagctttcagccatcgccttggcattgtccaagttcaagtcgaaactaacctaacctggttacggaagcgtgtgattgtgtatttcccacggtgtaaattaaggactatccaactgataacatactgtccagctacgaggaaaataagattatgttggagcaatttctggtgatggttttaccctgatgtgtcatattattatcagttctgtcgccatactgttcattgg

SEQ ID NO: 1366 - DNA, 3625 bp, Zea Mays
ctcctcttctcgttctccccctctatagtcctccgccgcctccattgccttctcttgggctcctccccgtatcccgggactactagtccaacctcccaattctgcggcactcaccattcgacaagcactgaaccctaccccacccaccagtccccgcagccgcgctccgcaatggcgagcggggcggctagaaagcgccgccgcaagtcgtcgccccctgccgccgccgcggctgcacgggacgggaggaagctcctcgtcggcgaagtcgtcgaggtgagcgccatccgcgccgtcgtttgcgatgaggtccaccgcattgcggctaagggcgatggtccgcgggtgatgggcagggtgctgagttgtgatcaaggactacgtggctcctggcataaggctattgttattggtattctggaaaatgctcgcgcagtcagatatactgatttcattgatgaaaatgggtcacctcttgttgagaatgttcaagtgtcagatgccattgatggtaagtcaagtatgcctgaggaactcattcgtggcaacattaggccaatgtgtccacatcaagcactgcaggtgtctcatgcaagctatggactttgtgttgacgcactcatagaaagttcctactgggaaggtgttattgctgatcatgctgaaggctctatggaaaggaaagtccttttccctgatgaaggtgatgaatgcattatagaagttgatcagctacgtcttactcaagactgggatgaagctacaggggaatggaaaccacgtggaatctggtcatttctgcagatacttttgtcacatgaagagagagatggtttacctgtgtcaatcaggcagatatggtttgacttaagatccaaaccttcttttaagactgatgccaaaatgtggatgtgtggaacagaagatttttgggagagatcacttgcagatgtcattgctgaattgtggtctctatgtgacaagcctaccctagatggatatcaagtggaagcagttcagaaggatacagttgagaccactgtcttggataggctggatccattccaagcattatcagaatacatctcatgctatcggaataataggaaaaatgctcttatcaaaaaagagtgggcaaagcaacaccttaaatcttcaggatggacctttctggatgacagacctaagaacaagttttacatctcacctgatggtaagcggtttccatcttttctaggagcatgccaggcgtgtttggctgcaaaagaagcaaatggttaccaatatgatcatacagaaaatttgcatctagacagtatgagtctggtgcacaagaatgcatgctacaaccagacacacatggatcttgccttggtaaagaacaagtccaatgataaatggatcacgagcccatcaagatcttgggaattggttcaactggatgctgaattttccccacagatagtttcccttcttgctagttatcaagatggcacaactgtccttcagaggacaattgatagaactctgagtgtgaagctgaagaagcatctattggcactgggttggagtattaagttcaaaaaggacgaaattcaagaaaatggccatcataaacacactacaagataccggtacgagtcaccttatgggaagacttatgtttctatcattcaggtaatatgcagtttgatagttggaggcgttaaacaagatgacaggcccagctatcggacagcagcaaaaggtgctcatttgacagtgtcaactggcctggcaaggctcaataaacgtaaacgaagggataaaactgatgctcttgaaaaatacatagactatatgaaaactgataagcaaaattccaggaggaggaaactgttgagatcaaatgctcagaagtttctcaaatctgctgggtggaatttttggttaaagaaaaagtctagaaacaaattggagttgaggtatggtgctccacatggcaagtcttacagctctttagtggcagcatgtaaaggttacttggaaaatggatatcaggaggacagtgatgcagacattaaaatcgccaaccatggttctgctgatggttctatgcgtccatcaaaattgatagcactcagcggtggattaaaggattcaagtaaaatacaggatctttccctgtcggcatcacgtgaagacagttttgtctttgttggtagagaaaaatattgtgttatttctgcacaagttctttctatttacacttgctttaggaaagatatttcagttgcattctgcttttgtaggccattccagaaggaagctggtattgtccatcctgcagatgcgatcatgtcggttgcactagaaatagtgaccatcagcttatctgccgaccagaaggttgttggttttgcagcaggggatgctcaaatagcgaacggcagtgaccatggcgattatgatgatgagataatggcagagcattatggcaagttgtgcattgcagttgatattcttcatgaatgctttgttactattatcgagcctcgcacacagagtgatatttctgaggatattgtcttcaatagagagatttgcggccagaagtttgctgagctgcctctgatcggtacaagatctctataccgtcgtcaaggaatgtgtcgacttctaattaatgaactggaaaagttgcttttagacttgggggtggaaagacttctattaccggcagttcctgaacttttgcaaacatggacatgctcatttggtttcacagttatgtcaaattctgagaggcttgagttggcagggaatagcattctcagtttccagggaaccaccatgtgtcagaagattttaaatgttgcacacaacatttcacaagatagaagtattccatcaatgtccaattctgagagaatggggttagcagagaacatggtggtgaagaaggcatttattccattgacagtggagccagaccatcatgttgatttgattgtggagcctgagctagtaatgaaaattgagaataacagcagtgaggagggtatttcttcaattgatccgctgactagtatgccagaccctcaagttggtttggcagtggggccagagatggtaccggtaagtcgggaaaacaaagataaagagggtatttgtttcattgatgctccaacttgtccgccagatcctcaagttgatttaacaacgggcattcatgagcaatcatttgtcagcctaacacagcttcaggattggaatacaagttctcaggaaaatgctatgagcgggtaaaaaagggcgctcgcccaaggaatgtctggcttagaatctcgaccaaataataaccaaaggtagatctagtagagctacggatgaaggatgcttaactttcatgcaataagctttcagccatcgccttggcattgtccaagttcaagtcgaaactaacctaacctggttacggaagcgtgtgattgtgtatttcccacggtgtaaattaaggactatccaactgataacatactgtccagctacgaggaaaataagattatgttggagcaatttctggtgatggttttaccctgatgtgtcatattattatcagttctgtcgccatactgttcattgg

SEQ ID NO: 1367 - DNA, 4309 bp, Zea Mays
ctcctcttctcgttctccccctctatagtcctccgccgcctccattgccttctcttgggctcctccccgtatcccgggactactagtccaacctcccaattctgcggcactcaccattcgacaagcactgaaccctaccccacccaccagtccccgcagccgcgctccgcaatggcgagcggggcggctagaaagcgccgccgcaagtcgtcgccccctgccgccgccgcggctgcacgggacgggaggaagctcctcgtcggcgaagtcgtcgaggtgagcgccatccgcgccgtcgtttgcgatgaggtccaccgcattgcggctaagggcgatggtccgcgggtgatgggcagggtgctgagttgtgatcaaggactacgtggctcctggcataaggctattgttattggtattctggaaaatgctcgcgcagtcagatatactgatttcattgatgaaaatgggtcacctcttgttgagaatgttcaagtgtcagatgccattgatggtaagtcaagtatgcctgaggaactcattcgtggcaacattaggccaatgtgtccacatcaagcactgcaggtgtctcatgcaagctatggactttgtgttgacgcactcatagaaagttcctactgggaaggtgttattgctgatcatgctgaaggctctatggaaaggaaagtccttttccctgatgaaggtgatgaatgcattatagaagttgatcagctacgtcttactcaagactgggatgaagctacaggggaatggaaaccacgtggaatctggtcatttctgcagatacttttgtcacatgaagagagagatggtttacctgtgtcaatcaggcagatatggtttgacttaagatccaaaccttcttttaagactgatgccaaaatgtggatgtgtggaacagaagatttttgggagagatcacttgcagatgtcattgctgaattgtggtctctatgtgacaagcctaccctagatggatatcaagtggaagcagttcagaaggatacagttgagaccactgtcttggataggctggatccattccaagcattatcagaatacatctcatgctatcggaataataggaaaaatgctcttatcaaaaaagagtgggcaaagcaacaccttaaatcttcaggatggacctttctggatgacagacctaagaacaagttttacatctcacctgatggtaagcggtttccatcttttctaggagcatgccaggcgtgtttggctgcaaaagaagcaaatggttaccaatatgatcatacagaaaatttgcatctagacagtatgagtctggtgcacaagaatgcatgctacaaccagacacacatggatcttgccttggtaaagaacaagtccaatgataaatggatcacgagcccatcaagatcttgggaattggttcaactggatgctgaattttccccacagatagtttcccttcttgctagttatcaagatggcacaactgtccttcagaggacaattgatagaactctgagtgtgaagctgaagaagcatctattggcactgggttggagtattaagttcaaaaaggacgaaattcaagaaaatggccatcataaacacactacaagataccggtacgagtcaccttatgggaagacttatgtttctatcattcaggtaatatgcagtttgatagttggaggcgttaaacaagatgacaggcccagctatcggacagcagcaaaaggtgctcatttgacagtgtcaactggcctggcaaggctcaataaacgtaaacgaagggataaaactgatgctcttgaaaaatacatagactatatgaaaactgataagcaaaattccaggaggaggaaactgttgagatcaaatgctcagaagtttctcaaatctgctgggtggaatttttggttaaagaaaaagtctagaaacaaattggagttgaggtatggtgctccacatggcaagtcttacagctctttagtggcagcatgtaaaggttacttggaaaatggatatcaggaggacagtgatgcagacattaaaatcgccaaccatggttctgctgatggttctatgcgtccatcaaaattgatagcactcagcggtggattaaaggattcaagtaaaatacagggtatgcctgttgtagacagatgtagcaacatgtttaccttgtctgcacatcatggaaaatgtaggaaaagaaaaccatcttcagtttctttgaacagtgcacgagttctttgttcacatggacagatctttccctgtcggcatcacgtgaagacagttttgtctttgttggtagagaaaaatattgtggtaccaagggataaggttacatataagcgaagtgatggacctggtataaaggaaggttccatcagcagagatggaataaaatgcatgtgttgtaatgaattattcactgtggagaattttgaggttcatgctgggagcagtacaccattaccttcggctcatatgtttttaaaggatggaaggtccctatcacagtgtttagttgaattcatgggtggaaacaagcccagagatccactgcatgtgcgcttgaaggggagtagttctgatctggaaagtgattcgatatgctctgtgtgccatgatggtggggatttattactttgtgacaattgcccatcatcttatcattatgattgtgtcggcttggaggccattccagaaggaagctggtattgtccatcctgcagatgcggtatttgtaacttgagtgattatgatcctgatatcagccaattcactgagaagaccatagtgtactgtgatcagtgtgaacgggaatatcatgtcggttgcactagaaatagtgaccatcagcttatctgccgaccagaaggttgttggttttgcagcaggggatgctcaaatgtatttcaacatttgcaagaagtcattgggaaacaagttccaactccaatcgaaggcttatcttgcactatcttgaaattttgtagagcgaacggcagtgaccatggcgattatgatgatgagataatggcagagcattatggcaagttgtgcattgcagttgatattcttcatgaatgctttgttactattatcgagcctcgcacacagagtgatatttctgaggatattgtcttcaatagagaatcagaactcagacgactaaattttaggggattctacataatacttctccagaaaggtggtgaactagtatctgtcggcacttttaggatttgcggccagaagtttgctgagctgcctctgatcggtacaagatctctataccgtcgtcaaggaatgtgtcgacttctaattaatgaactggaaaagttgcttttagacttgggggtggaaagacttctattaccggcagttcctgaacttttgcaaacatggacatgctcatttggtttcacagttatgtcaaattctgagaggcttgagttggcagggaatagcattctcagtttccagggaaccaccatgtgtcagaagattttaaatgttgcacacaacatttcacaagatagaagtattccatcaatgtccaattctgagagaatggggttagcagagaacatggtggtgaagaaggcatttattccattgacagtggagccagaccatcatgttgatttgattgtggagcctgagctagtaatgaaaattgagaataacagcagtgaggagggtatttcttcaattgatccgctgactagtatgccagaccctcaagttggtttggcagtggggccagagatggtaccggtaagtcgggaaaacaaagataaagagggtatttgtttcattgatgctccaacttgtccgccagatcctcaagttgatttaacaacgggcattcatgagcaatcatttgtcagcctaacacagcttcaggattggaatacaagttctcaggaaaatgctatgagcgggtaaaaaagggcgctcgcccaaggaatgtctggcttagaatctcgaccaaataataaccaaaggtagatctagtagagctacggatgaaggatgcttaactttcatgcaataagctttcagccatcgccttggcattgtccaagttcaagtcgaaactaacctaacctggttacggaagcgtgtgattgtgtatttcccacggtgtaaattaaggactatccaactgataacatactgtccagctacgaggaaaataagattatgttggagcaatttctggtgatggttttaccctgatgtgtcatattattatcagttctgtcgccatactgttcattgg

SEQ ID NO: 1368 - DNA, 4184 bp, Zea Mays
ctcctcttctcgttctccccctctatagtcctccgccgcctccattgccttctcttgggctcctccccgtatcccgggactactagtccaacctcccaattctgcggcactcaccattcgacaagcactgaaccctaccccacccaccagtccccgcagccgcgctccgcaatggcgagcggggcggctagaaagcgccgccgcaagtcgtcgccccctgccgccgccgcggctgcacgggacgggaggaagctcctcgtcggcgaagtcgtcgaggtgctgagttgtgatcaaggactacgtggctcctggcataaggctattgttattggtattctggaaaatgctcgcgcagtcagatatactgatttcattgatgaaaatgggtcacctcttgttgagaatgttcaagtgtcagatgccattgatggtaagtcaagtatgcctgaggaactcattcgtggcaacattaggccaatgtgtccacatcaagcactgcaggtgtctcatgcaagctatggactttgtgttgacgcactcatagaaagttcctactgggaaggtgttattgctgatcatgctgaaggctctatggaaaggaaagtccttttccctgatgaaggtgatgaatgcattatagaagttgatcagctacgtcttactcaagactgggatgaagctacaggggaatggaaaccacgtggaatctggtcatttctgcagatacttttgtcacatgaagagagagatggtttacctgtgtcaatcaggcagatatggtttgacttaagatccaaaccttcttttaagactgatgccaaaatgtggatgtgtggaacagaagatttttgggagagatcacttgcagatgtcattgctgaattgtggtctctatgtgacaagcctaccctagatggatatcaagtggaagcagttcagaaggatacagttgagaccactgtcttggataggctggatccattccaagcattatcagaatacatctcatgctatcggaataataggaaaaatgctcttatcaaaaaagagtgggcaaagcaacaccttaaatcttcaggatggacctttctggatgacagacctaagaacaagttttacatctcacctgatggtaagcggtttccatcttttctaggagcatgccaggcgtgtttggctgcaaaagaagcaaatggttaccaatatgatcatacagaaaatttgcatctagacagtatgagtctggtgcacaagaatgcatgctacaaccagacacacatggatcttgccttggtaaagaacaagtccaatgataaatggatcacgagcccatcaagatcttgggaattggttcaactggatgctgaattttccccacagatagtttcccttcttgctagttatcaagatggcacaactgtccttcagaggacaattgatagaactctgagtgtgaagctgaagaagcatctattggcactgggttggagtattaagttcaaaaaggacgaaattcaagaaaatggccatcataaacacactacaagataccggtacgagtcaccttatgggaagacttatgtttctatcattcaggtaatatgcagtttgatagttggaggcgttaaacaagatgacaggcccagctatcggacagcagcaaaaggtgctcatttgacagtgtcaactggcctggcaaggctcaataaacgtaaacgaagggataaaactgatgctcttgaaaaatacatagactatatgaaaactgataagcaaaattccaggaggaggaaactgttgagatcaaatgctcagaagtttctcaaatctgctgggtggaatttttggttaaagaaaaagtctagaaacaaattggagttgaggtatggtgctccacatggcaagtcttacagctctttagtggcagcatgtaaaggttacttggaaaatggatatcaggaggacagtgatgcagacattaaaatcgccaaccatggttctgctgatggttctatgcgtccatcaaaattgatagcactcagcggtggattaaaggattcaagtaaaatacagggtatgcctgttgtagacagatgtagcaacatgtttaccttgtctgcacatcatggaaaatgtaggaaaagaaaaccatcttcagtttctttgaacagtgcacgagttctttgttcacatggacagatctttccctgtcggcatcacgtgaagacagttttgtctttgttggtagagaaaaatattgtggtaccaagggataaggttacatataagcgaagtgatggacctggtataaaggaaggttccatcagcagagatggaataaaatgcatgtgttgtaatgaattattcactgtggagaattttgaggttcatgctgggagcagtacaccattaccttcggctcatatgtttttaaaggatggaaggtccctatcacagtgtttagttgaattcatgggtggaaacaagcccagagatccactgcatgtgcgcttgaaggggagtagttctgatctggaaagtgattcgatatgctctgtgtgccatgatggtggggatttattactttgtgacaattgcccatcatcttatcattatgattgtgtcggcttggaggtagaggtgccattccagaaggaagctggtattgtccatcctgcagatgcggtatttgtaacttgagtgattatgatcctgatatcagccaattcactgagaagaccatagtgtactgtgatcagtgtgaacgggaatatcatgtcggttgcactagaaatagtgaccatcagcttatctgccgaccagaaggttgttggttttgcagcaggggatgctcaaatgtatttcaacatttgcaagaagtcattgggaaacaagttccaactccaatcgaaggcttatcttgcactatcttgaaattttgtagagcgaacggcagtgaccatggcgattatgatgatgagataatggcagagcattatggcaagttgtgcattgcagttgatattcttcatgaatgctttgttactattatcgagcctcgcacacagagtgatatttctgaggatattgtcttcaatagagagatttgcggccagaagtttgctgagctgcctctgatcggtacaagatctctataccgtcgtcaaggaatgtgtcgacttctaattaatgaactggaaaagttgcttttagacttgggggtggaaagacttctattaccggcagttcctgaacttttgcaaacatggacatgctcatttggtttcacagttatgtcaaattctgagaggcttgagttggcagggaatagcattctcagtttccagggaaccaccatgtgtcagaagattttaaatgttgcacacaacatttcacaagatagaagtattccatcaatgtccaattctgagagaatggggttagcagagaacatggtggtgaagaaggcatttattccattgacagtggagccagaccatcatgttgatttgattgtggagcctgagctagtaatgaaaattgagaataacagcagtgaggagggtatttcttcaattgatccgctgactagtatgccagaccctcaagttggtttggcagtggggccagagatggtaccggtaagtcgggaaaacaaagataaagagggtatttgtttcattgatgctccaacttgtccgccagatcctcaagttgatttaacaacgggcattcatgagcaatcatttgtcagatcagtgcaacgagaattgcactttgaatataacacctaacacagcttcaggattggaatacaagttctcaggaaaatgctatgagcgggtaaaaaagggcgctcgcccaaggaatgtctggcttagaatctcgaccaaataataaccaaaggtagatctagtagagctacggatgaaggatgcttaactttcatgcaataagctttcagccatcgccttggcattgtccaagttcaagtcgaaactaacctaacctggttacggaagcgtgtgattgtgtatttcccacggtgtaaattaaggactatccaactgataacatactgtccagctacgaggaaaataagattatgttggagcaatttctggtgatggttttaccctgatgtgtcatattattatcagttctgtcgccatactgttcattgg

SEQ ID NO: 1369 - DNA, 3217 bp, Zea Mays
caacctcccaattctgcggcactcaccattcgacaagcactgaaccctaccccacccaccagtccccgcagccgcgctccgcaatggcgagcggggcggctagaaagcgccgccgcaagtcgtcgccccctgccgccgccgcggctgcacgggacgggaggaagctcctcgtcggcgaagtcgtcgaggtgctgagttgtgatcaaggactacgtggctcctggcataaggctattgttattggtattctggaaaatgctcgcgcagtcagatatactgatttcattgatgaaaatgggtcacctcttgttgagaatgttcaagtgtcagatgccattgatggtaagtcaagtatgcctgaggaactcattcgtggcaacattaggccaatgtgtccacatcaagcactgcaggtgtctcatgcaagctatggactttgtgttgacgcactcatagaaagttcctactgggaaggtgttattgctgatcatgctgaaggctctatggaaaggaaagtccttttccctgatgaaggtgatgaatgcattatagaagttgatcagctacgtcttactcaagactgggatgaagctacaggggaatggaaaccacgtggaatctggtcatttctgcagatacttttgtcacatgaagagagagatggtttacctgtgtcaatcaggcagatatggtttgacttaagatccaaaccttcttttaagactgatgccaaaatgtggatgtgtggaacagaagatttttgggagagatcacttgcagatgtcattgctgaattgtggtctctatgtgacaagcctaccctagatggatatcaagtggaagcagttcagaaggatacagttgagaccactgtcttggataggctggatccattccaagcattatcagaatacatctcatgctatcggaataataggaaaaatgctcttatcaaaaaagagtgggcaaagcaacaccttaaatcttcaggatggacctttctggatgacagacctaagaacaagttttacatctcacctgatggtaagcggtttccatcttttctaggagcatgccaggcgtgtttggctgcaaaagaagcaaatggttaccaatatgatcatacagaaaatttgcatctagacagtatgagtctggtgcacaagaatgcatgctacaaccagacacacatggatcttgccttggtaaagaacaagtccaatgataaatggatcacgagcccatcaagatcttgggaattggttcaactggatgctgaattttccccacagatagtttcccttcttgctagttatcaagatggcacaactgtccttcagaggacaattgatagaactctgagtgtgaagctgaagaagcatctattggcactgggttggagtattaagttcaaaaaggacgaaattcaagaaaatggccatcataaacacactacaagataccggtacgagtcaccttatgggaagacttatgtttctatcattcaggtaatatgcagtttgatagttggaggcgttaaacaagatgacaggcccagctatcggacagcagcaaaaggtgctcatttgacagtgtcaactggcctggcaaggctcaataaacgtaaacgaagggataaaactgatgctcttgaaaaatacatagactatatgaaaactgataagcaaaattccaggaggaggaaactgttgagatcaaatgctcagaagtttctcaaatctgctgggtggaatttttggttaaagaaaaagtctagaaacaaattggagttgaggtatggtgctccacatggcaagtcttacagctctttagtggcagcatgtaaaggttacttggaaaatggatatcaggaggacagtgatgcagacattaaaatcgccaaccatggttctgctgatggttctatgcgtccatcaaaattgatagcactcagcggtggattaaaggattcaagtaaaatacaggatctttccctgtcggcatcacgtgaagacagttttgtctttgttggtagagaaaaatattgtgttatttctgcacaagttctttctatttacacttgctttaggaaagatatttcagttgcattctgcttttgtaggccattccagaaggaagctggtattgtccatcctgcagatgcgatcatgtcggttgcactagaaatagtgaccatcagcttatctgccgaccagaaggttgttggttttgcagcaggggatgctcaaatgtatttcaacatttgcaagaagtcattgggaaacaagttccaactccaatcgaaggcttatcttgcactatcttgaaattttgtagagcgaacggcagtgaccatggcgattatgatgatgagataatggcagagcattatggcaagttgtgcattgcagttgatattcttcatgaatgctttgttactattatcgagcctcgcacacagagtgatatttctgaggatattgtcttcaatagagaatcagaactcagacgactaaattttaggggattctacataatacttctccagaaaggtggtgaactagtatctgtcggcacttttaggatttgcggccagaagtttgctgagctgcctctgatcggtacaagatctctataccgtcgtcaaggaatgtgtcgacttctaattaatgaactggaaaagttgcttttagacttgggggtggaaagacttctattaccggcagttcctgaacttttgcaaacatggacatgctcatttggtttcacagttatgtcaaattctgagaggcttgagttggcagggaatagcattctcagtttccagggaaccaccatgtgtcagaagattttaaatgttgcacacaacatttcacaagatagaagtattccatcaatgtccaattctgagagaatggggttagcagagaacatggtggtgaagaaggcatttattccattgacagtggagccagaccatcatgttgatttgattgtggagcctgagctagtaatgaaaattgagaataacagcagtgaggagggtatttcttcaattgatccgctgactagtatgccagaccctcaagttggtttggcagtggggccagagatggtaccgctcgttggcttcattgatgggaccaacattgcccccgccactaagatcaccgtcaaggtcagtgataaagaagtcaagcaggccaatttagactaa

SEQ ID NO: 1370 - DNA, 3601 bp, Zea Mays
atggcgagcggggcggctagaaagcgccgccgcaagtcgtcgccccctgccgccgccgcggctgcacgggacgggaggaagctcctcgtcggcgaagtcgtcgaggtgagcgccatccgcgccgtcgtttgcgatgaggtccaccgcattgcggctaagggcgatggtccgcgggtgatgggcagggtgctgagttgtgatcaaggactacgtggctcctggcataaggctattgttattggtattctggaaaatgctcgcgcagtcagatatactgatttcattgatgaaaatgggtcacctcttgttgagaatgttcaagtgtcagatgccattgatggtaagtcaagtatgcctgaggaactcattcgtggcaacattaggccaatgtgtccacatcaagcactgcaggtgtctcatgcaagctatggactttgtgttgacgcactcatagaaagttcctactgggaaggtgttattgctgatcatgctgaaggctctatggaaaggaaagtccttttccctgatgaaggtgatgaatgcattatagaagttgatcagctacgtcttactcaagactgggatgaagctacaggggaatggaaaccacgtggaatctggtcatttctgcagatacttttgtcacatgaagagagagatggtttacctgtgtcaatcaggcagatatggtttgacttaagatccaaaccttcttttaagactgatgccaaaatgtggatgtgtggaacagaagatttttgggagagatcacttgcagatgtcattgctgaattgtggtctctatgtgacaagcctaccctagatggatatcaagtggaagcagttcagaaggatacagttgagaccactgtcttggataggctggatccattccaagcattatcagaatacatctcatgctatcggaataataggaaaaatgctcttatcaaaaaagagtgggcaaagcaacaccttaaatcttcaggatggacctttctggatgacagacctaagaacaagttttacatctcacctgatggtaagcggtttccatcttttctaggagcatgccaggcgtgtttggctgcaaaagaagcaaatggttaccaatatgatcatacagaaaatttgcatctagacagtatgagtctggtgcacaagaatgcatgctacaaccagacacacatggatcttgccttggtaaagaacaagtccaatgataaatggatcacgagcccatcaagatcttgggaattggttcaactggatgctgaattttccccacagatagtttcccttcttgctagttatcaagatggcacaactgtccttcagaggacaattgatagaactctgagtgtgaagctgaagaagcatctattggcactgggttggagtattaagttcaaaaaggacgaaattcaagaaaatggccatcataaacacactacaagataccggtacgagtcaccttatgggaagacttatgtttctatcattcaggtaatatgcagtttgatagttggaggcgttaaacaagatgacaggcccagctatcggacagcagcaaaaggtgctcatttgacagtgtcaactggcctggcaaggctcaataaacgtaaacgaagggataaaactgatgctcttgaaaaatacatagactatatgaaaactgataagcaaaattccaggaggaggaaactgttgagatcaaatgctcagaagtttctcaaatctgctgggtggaatttttggttaaagaaaaagtctagaaacaaattggagttgaggtatggtgctccacatggcaagtcttacagctctttagtggcagcatgtaaaggttacttggaaaatggatatcaggaggacagtgatgcagacattaaaatcgccaaccatggttctgctgatggttctatgcgtccatcaaaattgatagcactcagcggtggattaaaggattcaagtaaaatacaggatctttccctgtcggcatcacgtgaagacagttttgtctttgttggtagagaaaaatattgtggtaccaagggataaggttacatataagcgaagtgatggacctggtataaaggaaggttccatcagcagagatggaataaaatgcatgtgttgtaatgaattattcactgtggagaattttgaggttcatgctgggagcagtacaccattaccttcggctcatatgtttttaaaggatggaaggtccctatcacagtgtttagttgaattcatgggtggaaacaagcccagagatccactgcatgtgcgcttgaaggggagtagttctgatctggaaagtgattcgatatgctctgtgtgccatgatggtggggatttattactttgtgacaattgcccatcatcttatcattatgattgtgtcggcttggaggccattccagaaggaagctggtattgtccatcctgcagatgcggtatttgtaacttgagtgattatgatcctgatatcagccaattcactgagaagaccatagtgtactgtgatcagtgtgaacgggaatatcatgtcggttgcactagaaatagtgaccatcagcttatctgccgaccagaaggttgttggttttgcagcaggggatgctcaaatgtatttcaacatttgcaagaagtcattgggaaacaagttccaactccaatcgaaggcttatcttgcactatcttgaaattttgtagagcgaacggcagtgaccatggcgattatgatgatgagataatggcagagcattatggcaagttgtgcattgcagttgatattcttcatgaatgctttgttactattatcgagcctcgcacacagagtgatatttctgaggatattgtcttcaatagagaatcagaactcagacgactaaattttaggggattctacataatacttctccagaaaggtggtgaactagtatctgtcggcacttttaggatttgcggccagaagtttgctgagctgcctctgatcggtacaagatctctataccgtcgtcaaggaatgtgtcgacttctaattaatgaactggaaaagttgcttttagacttgggggtggaaagacttctattaccggcagttcctgaacttttgcaaacatggacatgctcatttggtttcacagttatgtcaaattctgagaggcttgagttggcagggaatagcattctcagtttccagggaaccaccatgtgtcagaagattttaaatgttgcacacaacatttcacaagatagaagtattccatcaatgtccaattctgagagaatggggttagcagagaacatggtggtgaagaaggcatttattccattgacagtggagccagaccatcatgttgatttgattgtggagcctgagctagtaatgaaaattgagaataacagcagtgaggagggtatttcttcaattgatccgctgactagtatgccagaccctcaagttggtttggcagtggggccagagatggtaccgctcgttggcttcattgatgggaccaacattgcccccgccactaagatcaccgtcaaggtcagtgataaagaagtcaagcaggccaatttagactaa

SEQ ID NO: 1371 - DNA, 2092 bp, Zea Mays
ctccaaagcaaccgagaccaagaccaccagcaggactcgcgaggagagcgcgcccgcccggaaagaaaaaaaaaccctagccccgcccgggcctccgcctcgcgatgtcttgcacggtggccatcccgagctcgccagtcttctcgccctcacgccgcccactctcctgcaaggccgcctccgcctcaccggagcccaccgtccccgcctctaccgcggcgcccgcgcccgccgccgccgccggctcgccgctccgccccttcgcgctccgcgcgctgctgcgggaggaggtctccccgtctccgccgccccagccgacctccgccgcagcggtggctttggtaccgagcggggccgcgctgaagcggcggcgaccgacgccgcttgtcgtgccggcgtccggcgccgcggcagctgctgctgcggcggcggcggtggccgctgtggaggcggatccgaggaacgaggtggaggaggaaggggaggagttcgcagcgtactgccggaggggaaagggaaggagaagggtggaaatggaggaccggcatgtggccaaggtcgctctcggcggggacccccaagtggcactgtttggtgtgttcgatggccacggcgggaaaaacgcggcagagttcgccgcggagaacatgcccaagtttatggccgaggagttgacgaaggtaaacggcggagagatcgaaggagcggtgaagaggggttacctcaagacggacgaggagttcctcaagagggacgagagcgggggcgcgtgctgcgtcacagccgtcctccaaaagggtggactggtcgtctccaacgctggagactgccgtgcggtgctcagccgagcagggaaggcagaggcgctcacctctgaccaccgggcgtccagggaggacgagaaggaaaggattgagaatttgggtggatttgtggtgaattaccgtggaacatggcgagtccagggctccctggcagtgtctaggggcattggggatggacacctaaagcagtgggttgtggctgacccagacaccacgacgctcctggttgaccagcagtgcgagttcttgatacttgcttctgatggcctctgggataagatcgacaatcaggaggcggtagaccttgcacgacctctctgcatcaacaatgacaagacctctcgcatggctgcctgcaggatgctcaccgagacatcgatttccaggggctcgactgatgatatcagtgtcgtgatcgtgcagttgcagaaattttcaagctcgtaacctagttggagaagctggaacaaaactctagccagtagcactaacagactggtgataggtagacatgatatgttacttcgctggcgaaagttttcatgagtcagcgctatttggaggggattttaacattcattctttggtgtagagccattcgtcttattattacatcatttaattcattcttggtaagtactgaaataaggggtgatatctcgcttcatgatattttttcactgttagggctagttttggaacactgttttcctaagcgattcggtgaattgcctctgtatattatattcatagattaaaacttaccgtgccttttgaatttattgtcgattctagcaaaaagaaagaatactagtagctttgcgccataccttgatcttaatatctgtatgttggacactccattttttgtagtactttagacatctaaactagttcagacttaatttaagactaggtaagtacccgtgcgttgcaacggaaaaaaatagtgtaacaataacatatatatgactatatgttgtgttgttaattaaaattaagttgcatatggactttgtagtgacaattggttgtaaccttgaaggctaaaaattgatgttgttcttgatcctaaccacgctccagacttgcttgccaggttcatttgtaagttcaaaattatagaccaaaattaggtgaaaagaccagctgaatggaaattttcttttcccagtaaactgcatatttgccttcgcctaactatccattgttttaatctctatataagaacagtcatgcgaagtttgtctattaaaaaaaatccatcg

SEQ ID NO: 1372 - DNA, 994 bp, Zea Mays
acaacgcacatgcggaagcggagacgctgacgcacctctgagcctggcggcgatttttctatataaccagcgccgctaattccgggtgcttcgctgtagagatgcggtaaaagcgaaagaagaatccgatccgcttctccacgccgaacccggtggtaaagattagattgcaacagcaaaaagggctaagcccagacttgcttagatacaaaggtcccatacactgcgcaagaactatagttcgagaggaaggcctctttggtctttggtctggagcactaccaaccgtcatgcgcaacggcacaaaccaagcggcaatgttctcagccaagaacacgtttgatattgttctgtggaagaagcatgaaggggacgggaaggtgctcctgccgtggcagtcaatggtctctgggttccttgcaggaacagcaggccctgtctgcaccggacccttcgatgtcgtgaagactaggctgatggctcaagggagaactggggacgccaagtacaaaggcatggtccatgcgatacgaacaatatatgccgaagaggggctgcgagccctgtggaaaggcttgcttccccggctcatgaggatcccacctggacaggctataatgtgggctgtagctgatcaggtgatgggcctctatgagcgaactcatctgcagccagttcatatttgaccattctattgcagtgctggtgctgcactgaatttttttttgttggttctcaatcggtggttagacgtggaagtcgtcgattatggatattcgtttgttcattgcttagagttgggtattgatggaagcaatggaagactcttgtactactattttgttgtcaataatcatgaaaccctccaccttttggactggggatatctcggttgtggtgactattatggttgttagactgcagtagcatcaatttgtatgattgaatatactcatgtgttcatctggaaagctgagggtcctttttatgcccg

SEQ ID NO: 1373 - DNA, 1043 bp, Zea Mays
cgcaattttgcgtgcttattaagtctgaactaacagtctctgttccagtcatgcatcagggcttcaggagtgcattttgccattctgaattaccagtttggagcttactgttcagttcttatgttgtcacaagcgggcatagataatatccagcttgtccctcttcacagtgatattttatttctacatggaaagataagggtggtaaagattagattgcaacagcaaaaagggctaagcccagacttgcttagatacaaaggtcccatacactgcgcaagaactatagttcgagaggaaggcctctttggtctttggtctggagcactaccaaccgtcatgcgcaacggcacaaaccaagcggcaatgttctcagccaagaacacgtttgatattgttctgtggaagaagcatgaaggggacgggaaggtgctcctgccgtggcagtcaatggtctctgggttccttgcaggaacagcaggccctgtctgcaccggacccttcgatgtcgtgaagactaggctgatggctcaagggagaactggggacgccaagtacaaaggcatggtccatgcgatacgaacaatatatgccgaagaggggctgcgagccctgtggaaaggcttgcttccccggctcatgaggatcccacctggacaggctataatgtgggctgtagctgatcaggtgatgggcctctatgagcgaactcatctgcagccagttcatatttgaccattctattgcagtgctggtgctgcactgaatttttttttgttggttctcaatcggtggttagacgtggaagtcgtcgattatggatattcgtttgttcattgcttagagttgggtattgatggaagcaatggaagactcttgtactactattttgttgtcaataatcatgaaaccctccaccttttggactggggatatctcggttgtggtgactattatggttgttagactgcagtagcatcaatttgtatgattgaatatactcatgtgttcatctggaaagctgagggtcctttttatgcccg

SEQ ID NO: 1374 - DNA, 1033 bp, Zea Mays
cagctcctcgttgcccagggccactgcaaaagagtgccaagatcttcgtcgtactacacccagctgatcttttgctcgaggcatcctttccagaaggcggcggcagctgcagctttccagaagctcccacccgagctcctccggctaagctacccggcgaggaataataagcatgcaagaaccagctggcggcgggccacggacaacgaccaagcggcgccggccgcggcacaaggaactaccagcacccctcctctcccaggctctcccgttccgagcgccgagagatccccggtgacgcccggcaacggccagccgcagcagccggtcgccgacgccaacggcagcgcgccgagcgagccgccgaagcgggcgccgctgacggcgcgggagcggctgcgggcggcgcgcgtgctggggaagtacgcagagccgtcggtgaaagggtcttcgtcgaaaccggccaaaccggagttcgggagcggtgtgctggacgcgctgcgcgaggcggacgcgaagaaggccgggggcgggggcgggggcgggcggcgtgggtcgcgcctacccgaggcgccgggcaacctgttcgacgacagcaagcgcgggatgcccaaggacgggtggacgttcgagctgccgttcggggtggacgtcttcctcgtcctcgtctccttcacgctcatcaccaccatcatgttcggcaccgccttcctcgtgtggaagctcggcgccatacacttcaacgagtactagcctttagactgtctctacttgattggaggataaagggcgattatgcagtgctagacgagagaattgtgtgtattcgtaatgtactgtattgaccacagacactggtctgccgaagattttcgagaaaacatagaaatgtgtgattgcacgaaacaggtgtcatgttatatagaactaataaatgtggttatgaaatcttacaacaatgtggctgtagtttagtggtaagaattctacgttgtggccgtagagacctgggctcgaatcccagcagccacac

SEQ ID NO: 1375 - DNA, 2868 bp, Zea Mays
gccagaacccgcctgttcccgcgtcgctacctccacttcagcgttcggccatcggcccttcctccgtctctcgccttttccgcgctcacctttgcgcatcggcatcggacaccaggtttcttccgttttgctagatggattctgacgcgggcggctccagctccgctccaccacctccgtcggcagccataggtgcaggtgcaggcgcgggcgcggagacgaagggggatgagcgcggccgcaagcaggtgatggtggtactggtgggcccaccgggcagcggcaagtccacgtttgcagatgccgtggttggcggctccaccgccggccgccactgggttcgcgtctgccaggatacaatagggaacggcaaagctgggacaaaaatacagtgcttgaaggctgcatcagatgctttgaaggagggcaagagtgttcttgtcgaccgctgcaacttggaacgtgagcagcgtgctgattttgtgaagctgggaggcacattgcgcgcagatgtgcacgctgtctccctggatctacctgcaaaggtctgtatctcacgtgcagtgagccgaaagggccatgaaggaaatctgcagggtgggaaggctgcccttgttgtgaaccgcatgctgcagaagaaggagacacccttgctcacagaaggtttcagtcggatcatgtgctgtaatgatgatggcgacattaaaaaagcagttgacttgtataatggtttagggccttcagatagtcttccatcaggagtttttggtcagaagagcaaaagacccgtacaagttggtataatgaagtttctaaagaaaactgatgcttctgttgttgagacatctagcggacctaagcaggcattgacagaaataaagccagcgcagcaaaatcctttgccaaaacaggaaaatgttgaagctggttttgcctgttccatggaagttgagaagggattaaatgacaagatggaaaatgaagagcatgctaaaggaagtgattattgtgatgttggttcccgtactctggcatttccatctatttctacagctgacttccaatttgatcttgacagagcatctgatattatagtggacacagctgctaatttcttgcagaagtttgataatataagactagttcttgtagacctgagtgagaaatcaagaattttgtcattggtcaaacagaaggctgctaagaagagcatcgactccaacagatttttcacatacgtgggagatatcactcagttgcacacaaaaggaggtcttcagtgcagcgtgattggtaatgctgccaattggaggctaaaacctggaggtggaggggttaatacagcaatatatagtgctgctggagaatctttacaacatgctactaaaaaatgtgctgatgcactgaggccaggaacctctgtagttgttccacttccatcaacttctcctctgcatcaacgggaaggtgtgacgcatgtcatacatgtgctcgggccaaatatgaatccaatgcgaccagactgtcttaagaatgactataccagagggtctaagattcttcgtgaagcatacacttcactttttgagaattttgcatctattgtgcagagctacatgggaaagcagaacaatgagtctggagcagaaaagtcagcgtctggaaggatatcgcccaatgacacaaaaatgaagcgagaggacaaccatgaatctgaaaggatgaaaaaacataagttgtttcaacccatcatgactgcaaagcgacagcatgagtgtacaaaggttaatgctccaaattgccatgataatgccatgacttcatctgctgctcctagccaaactagacaagtagacaacaaaaggaatgatgtggttaccagtaagacttggggatcctgggctcagtctctttacgaacttgccatgaacccagaaaaatacaagaactcagattctattctagagacatcagatgaatatgttgttctgaaagatctctatccaaaggccaaaaggcatgttttggtgatagctagaatggatggtcttgactctctagcagatgtcaagaaagaacacttgcctttgttgaggaggatgcattcagctggggtgaagtgggcacataagttcctagaggaagatgcggctttggaattcagacttggataccattcggttccatcaatgcgacaattgcatcttcacatcattagccaggatttcaactctgcaagcttgaaaaataagaaacattggaactccttcaccacatcatttttccgtgattctgttgatgtgattgaggagattgaacaaaatggatcaacaaccaccagcagtgatgaaaaggtactcgctatggaactccggtgccacaggtgcaggagcgctcatccaaacatcccgaaactgaaatcccacatcgccatctgtaaatctcccttcccttcacatcttcttcagaaaaacaggctgttgttgtcctcgacgatgcatatggaccgcacgtagatgctagaactcgatgatcagttgtccttgcacgcacattttgcatgtcgtgcttgcctaaggatagtgttgatcgattttttttttacctaatgcggactagtggaaacttgccttgcttttcagagaccattacctgtgttggcgtgcttactgaagattattggggatggaagctccatttgacttgggtcattggatcgatattaaaattttctaaaataaattagagtgcgtcaggatctagattctcgtagaaatattttggatccagattcttttaggaagatcagtcagaattaattttataagaatggactagattatgattcataagaaaatatatatttac

SEQ ID NO: 1376 - DNA, 2824 bp, Zea Mays
gtcgctacctccacttcagcgttcggccatcggcccttcctccgtctctcgccttttccgcgctcacctttgcgcatcggcatcggacaccaggtttcttccgttttgctagatggattctgacgcgggcggctccagctccgctccaccacctccgtcggcagccataggtgcaggcgcgggcgcggagacgaagggggatgagcgcggccgcaagcaggtgatggtggtactggtgggcccaccgggcagcggcaagtccacgtttgcagatgccgtggttggcggctccaccgccggccgccactgggttcgcgtctgccaggatacaatagggaacggcaaagctgggacaaaaatacagtgcttgaaggctgcatcagatgctttgaaggagggcaagagtgttcttgtcgaccgctgcaacttggaacgtgagcagcgtgctgattttgtgaagctgggaggcacattgcgcgcagatgtgcacgctgtctccctggatctacctgcaaaggtctgtatctcacgtgcagtgagccgaaagggccatgaaggaaatctgcagggtgggaaggctgcccttgttgtgaaccgcatgctgcagaagaaggagacacccttgctcacagaaggtttcagtcggatcatgtgctgtaatgatgatggcgacattaaaaaagcagttgacttgtataatggtttagggccttcagatagtcttccatcaggagtttttggtcagaagagcaaaagacccgtacaagttggtataatgaagtttctaaagaaaactgatgcttctgttgttgagacatctagcggacctaagcaggcattgacagaaataaagccagcgcagcaaaatcctttgccaaaacaggaaaatgttgaagctggttttgcctgttccatggaagttgagaagggattaaatgacaagatggaaaatgaagagcatgctaaaggaagtgattattgtgatgttggttcccgtactctggcatttccatctatttctacagctgacttccaatttgatcttgacagagcatctgatattatagtggacacagctgctaatttcttgcagaagtttgataatataagactagttcttgtagacctgagtgagaaatcaagaattttgtcattggtcaaacagaaggctgctaagaagagcatcgactccaacagatttttcacatacgtgggagatatcactcagttgcacacaaaaggaggtcttcagtgcagcgtgattggaggctaaaacctggaggtggaggggttaatacagcaatatatagtgctgctggagaatctttacaacatgctactaaaaaatgtgctgatgcactgaggccaggaacctctgtagttgttccacttccatcaacttctcctctgcatcaacgggaaggtgtgacgcatgtcatacatgtgctcgggccaaatatgaatccaatgcgaccagactgtcttaagaatgactataccagagggtctaagattcttcgtgaagcatacacttcactttttgagaattttgcatctattgtgcagagctacatgggaaagcagaacaatgagtctggagcagaaaagtcagcgtctggaaggatatcgcccaatgacacaaaaatgaagcgagaggacaaccatgaatctgaaaggatgaaaaaacataagttgtttcaacccatcatgactgcaaagcgacagcatgagtgtacaaaggttaatgctccaaattgccatgataatgccatgacttcatctgctgctcctagccaaactagacaagtagacaacaaaaggaatgatgtggttaccagtaagacttggggatcctgggctcagtctctttacgaacttgccatgaacccagaaaaatacaagaactcagattctattctagagacatcagatgaatatgttgttctgaaagatctctatccaaaggccaaaaggcatgttttggtgatagctagaatggatggtcttgactctctagcagatgtcaagaaagaacacttgcctttgttgaggaggatgcattcagctggggtgaagtgggcacataagttcctagaggaagatgcggctttggaattcagacttggataccattcggttccatcaatgcgacaattgcatcttcacatcattagccaggatttcaactctgcaagcttgaaaaataagaaacattggaactccttcaccacatcatttttccgtgattctgttgatgtgattgaggagattgaacaaaatggatcaacaaccaccagcagtgatgaaaaggtactcgctatggaactccggtgccacaggtgcaggagcgctcatccaaacatcccgaaactgaaatcccacatcgccatctgtaaatctcccttcccttcacatcttcttcagaaaaacaggctgttgttgtcctcgacgatgcatatggaccgcacgtagatgctagaactcgatgatcagttgtccttgcacgcacattttgcatgtcgtgcttgcctaaggatagtgttgatcgattttttttttacctaatgcggactagtggaaacttgccttgcttttcagagaccattacctgtgttggcgtgcttactgaagattattggggatggaagctccatttgacttgggtcattggatcgatattaaaattttctaaaataaattagagtgcgtcaggatctagattctcgtagaaatattttggatccagattcttttaggaagatcagtcagaattaattttataagaatggactagattatgattcataagaaaatatatatttac

SEQ ID NO: 1377 - DNA, 2822 bp, Zea Mays
ctccacttcagcgttcggccatcggcccttcctccgtctctcgccttttccgcgctcacctttgcgcatcggcatcggacaccaggtttcttccgttttgctagatggattctgacgcgggcggctccagctccgctccaccacctccgtcggcagccataggtgcaggtgcaggcgcgggcgcggagacgaagggggatgagcgcggccgcaagcaggtgatggtggtactggtgggcccaccgggcagcggcaagtccacgtttgcagatgccgtggttggcggctccaccgccggccgccactgggttcgcgtctgccaggatacaatagggaacggcaaagctgggacaaaaatacagtgcttgaaggctgcatcagatgctttgaaggagggcaagagtgttcttgtcgaccgctgcaacttggaacgtgagcagcgtgctgattttgtgaagctgggaggcacattgcgcgcagatgtgcacgctgtctccctggatctacctgcaaaggtctgtatctcacgtgcagtgagccgaaagggccatgaaggaaatctgcagggtgggaaggctgcccttgttgtgaaccgcatgctgcagaagaaggagacacccttgctcacagaaggtttcagtcggatcatgtgctgtaatgatgatggcgacattaaaaaagcagttgacttgtataatggtttagggccttcagatagtcttccatcaggagtttttggtcagaagagcaaaagacccgtacaagttggtataatgaagtttctaaagaaaactgatgcttctgttgttgagacatctagcggacctaagcaggcattgacagaaataaagccagcgcagcaaaatcctttgccaaaacaggaaaatgttgaagctggttttgcctgttccatggaagttgagaagggattaaatgacaagatggaaaatgaagagcatgctaaaggaagtgattattgtgatgttggttcccgtactctggcatttccatctatttctacagctgacttccaatttgatcttgacagagcatctgatattatagtggacacagctgctaatttcttgcagaagtttgataatataagactagttcttgtagacctgagtgagaaatcaagaattttgtcattggtcaaacagaaggctgctaagaagagcatcgactccaacagatttttcacatacgtgggagatatcactcagttgcacacaaaaggaggtcttcagtgcagcgtgattggaggctaaaacctggaggtggaggggttaatacagcaatatatagtgctgctggagaatctttacaacatgctactaaaaaatgtgctgatgcactgaggccaggaacctctgtagttgttccacttccatcaacttctcctctgcatcaacgggaaggtgtgacgcatgtcatacatgtgctcgggccaaatatgaatccaatgcgaccagactgtcttaagaatgactataccagagggtctaagattcttcgtgaagcatacacttcactttttgagaattttgcatctattgtgcagagctacatgggaaagcagaacaatgagtctggagcagaaaagtcagcgtctggaaggatatcgcccaatgacacaaaaatgaagcgagaggacaaccatgaatctgaaaggatgaaaaaacataagttgtttcaacccatcatgactgcaaagcgacagcatgagtgtacaaaggttaatgctccaaattgccatgataatgccatgacttcatctgctgctcctagccaaactagacaagtagacaacaaaaggaatgatgtggttaccagtaagacttggggatcctgggctcagtctctttacgaacttgccatgaacccagaaaaatacaagaactcagattctattctagagacatcagatgaatatgttgttctgaaagatctctatccaaaggccaaaaggcatgttttggtgatagctagaatggatggtcttgactctctagcagatgtcaagaaagaacacttgcctttgttgaggaggatgcattcagctggggtgaagtgggcacataagttcctagaggaagatgcggctttggaattcagacttggataccattcggttccatcaatgcgacaattgcatcttcacatcattagccaggatttcaactctgcaagcttgaaaaataagaaacattggaactccttcaccacatcatttttccgtgattctgttgatgtgattgaggagattgaacaaaatggatcaacaaccaccagcagtgatgaaaaggtactcgctatggaactccggtgccacaggtgcaggagcgctcatccaaacatcccgaaactgaaatcccacatcgccatctgtaaatctcccttcccttcacatcttcttcagaaaaacaggctgttgttgtcctcgacgatgcatatggaccgcacgtagatgctagaactcgatgatcagttgtccttgcacgcacattttgcatgtcgtgcttgcctaaggatagtgttgatcgattttttttttacctaatgcggactagtggaaacttgccttgcttttcagagaccattacctgtgttggcgtgcttactgaagattattggggatggaagctccatttgacttgggtcattggatcgatattaaaattttctaaaataaattagagtgcgtcaggatctagattctcgtagaaatattttggatccagattcttttaggaagatcagtcagaattaattttataagaatggactagattatgattcataagaaaatatatatttac

SEQ ID NO: 1378 - DNA, 2666 bp, Zea Mays
ggcccttcctccgtctctcgccttttccgcgctcacctttgcgcatcggcatcggacaccaggtttcttccgttttgctagatggattctgacgcgggcggctccagctccgctccaccacctccgtcggcagccataggtgcaggcgcgggcgcggagacgaagggggatgagcgcggccgcaagcaggtgatggtggtactggtgggcccaccgggcagcggcaagtccacgtttgcagatgccgtggttggcggctccaccgccggccgccactgggttcgcgtctgccaggatacaatagggaacggcaaagctgggacaaaaatacagtgcttgaaggctgcatcagatgctttgaaggagggcaagagtgttcttgtcgaccgctgcaacttggaacgtgagcagcgtgctgattttgtgaagctgggaggcacattgcgcgcagatgtgcacgctgtctccctggatctacctgcaaaggtctgtatctcacgtgcagtgagccgaaagggccatgaaggaaatctgcagggtgggaaggctgcccttgttgtgaaccgcatgctgcagaagaaggagacacccttgctcacagaaggtttcagtcggatcatgtgctgtaatgatgatggcgacattaaaaaagcagttgacttgtataatggtttagggccttcagatagtcttccatcaggagtttttggtcagaagagcaaaagacccgtacaagttggtataatgaagtttctaaagaaaactgatgcttctgttgttgagacatctagcggacctaagcaggcattgacagaaataaagccagcgcagcaaaatcctttgccaaaacaggaaaatgttgaagctggttttgcctgttccatggaagttgagaagggattaaatgacaagatggaaaatgaagagcatgctaaaggaagtgattattgtgatgttggttcccgtactctggcatttccatctatttctacagctgacttccaatttgatcttgacagagcatctgatattatagtggacacagctgctaatttcttgcagaagtttgataatataagactagttcttgtagacctgagtgagaaatcaagaattttgtcattggtcaaacagaaggctgctaagaagagcatcgactccaacagatttttcacatacgtgggagatatcactcagttgcacacaaaaggaggtcttcagtgcagcgtgattggtaatgctgccaattggaggctaaaacctggaggtggaggggttaatacagcaatatatagtgctgctggagaatctttacaacatgctactaaaaaatgtgctgatgcactgaggccaggaacctctgtagttgttccacttccatcaacttctcctctgcatcaacgggaagagctacatgggaaagcagaacaatgagtctggagcagaaaagtcagcgtctggaaggatatcgcccaatgacacaaaaatgaagcgagaggacaaccatgaatctgaaaggatgaaaaaacataagttgtttcaacccatcatgactgcaaagcgacagcatgagtgtacaaaggttaatgctccaaattgccatgataatgccatgacttcatctgctgctcctagccaaactagacaagtagacaacaaaaggaatgatgtggttaccagtaagacttggggatcctgggctcagtctctttacgaacttgccatgaacccagaaaaatacaagaactcagattctattctagagacatcagatgaatatgttgttctgaaagatctctatccaaaggccaaaaggcatgttttggtgatagctagaatggatggtcttgactctctagcagatgtcaagaaagaacacttgcctttgttgaggaggatgcattcagctggggtgaagtgggcacataagttcctagaggaagatgcggctttggaattcagacttggataccattcggttccatcaatgcgacaattgcatcttcacatcattagccaggatttcaactctgcaagcttgaaaaataagaaacattggaactccttcaccacatcatttttccgtgattctgttgatgtgattgaggagattgaacaaaatggatcaacaaccaccagcagtgatgaaaaggtactcgctatggaactccggtgccacaggtgcaggagcgctcatccaaacatcccgaaactgaaatcccacatcgccatctgtaaatctcccttcccttcacatcttcttcagaaaaacaggctgttgttgtcctcgacgatgcatatggaccgcacgtagatgctagaactcgatgatcagttgtccttgcacgcacattttgcatgtcgtgcttgcctaaggatagtgttgatcgattttttttttacctaatgcggactagtggaaacttgccttgcttttcagagaccattacctgtgttggcgtgcttactgaagattattggggatggaagctccatttgacttgggtcattggatcgatattaaaattttctaaaataaattagagtgcgtcaggatctagattctcgtagaaatattttggatccagattcttttaggaagatcagtcagaattaattttataagaatggactagattatgattcataagaaaatatatatttac

SEQ ID NO: 1379 - DNA, 2576 bp, Zea Mays
ctccgtctctcgccttttccgcgctcacctttgcgcatcggcatcggacaccaggtttcttccgttttgctagatggattctgacgcgggcggctccagctccgctccaccacctccgtcggcagccataggtgcaggcgcgggcgcggagacgaagggggatgagcgcggccgcaagcaggtgatggtggtactggtgggcccaccgggcagcggcaagtccacgtttgcagatgccgtggttggcggctccaccgccggccgccactgggttcgcgtctgccaggatacaatagggaacggcaaagctgggacaaaaatacagtgcttgaaggctgcatcagatgctttgaaggagggcaagagtgttcttgtcgaccgctgcaacttggaacgtgagcagcgtgctgattttgtgaagctgggaggcacattgcgcgcagatgtgcacgctgtctccctggatctacctgcaaaggtctgtatctcacgtgcagtgagccgaaagggccatgaaggaaatctgcagggtgggaaggctgcccttgttgtgaaccgcatgctgcagaagaaggagacacccttgctcacagaaggtttcagtcggatcatgtgctgtaatgatgatggcgacattaaaaaagcagttgacttgtataatggtttagggccttcagatagtcttccatcaggagtttttggtcagaagagcaaaagacccgtacaagttggtataatgaagtttctaaagaaaactgatgcttctgttgttgagacatctagcggacctaagcaggcattgacagaaataaagccagcgcagcaaaatcctttgccaaaacaggaaaatgttgaagctggttttgcctgttccatggaagttgagaagggattaaatgacaagatggaaaatgaagagcatgctaaaggaagtgattattgtgatgttggttcccgtactctggcatttccatctatttctacagctgacttccaatttgatcttgacagagcatctgatattatagtggacacagctgctaatttcttgcagaagtttgataatataagactagttcttgtagacctgagtgagaaatcaagaattttgtcattggtcaaacagaaggctgctaagaagagcatcgactccaacagatttttcacatacgtgggagatatcactcagttgcacacaaaaggaggtcttcagtgcagcgtgattggtaatgctgccaattggaggctaaaacctggaggtggaggggttaatacagcaatatatagtgctgctggagaatctttacaacatgctactaaaaaatgtgctgatgcactgaggccaggaacctctgtagttgttccacttccatcaacttctcctctgcatcaacgggaaggtgtgacgcatgtcatacatgtgctcgggccaaatatgaatccaatgcgaccagactgtcttaagaatgactataccagagggtctaagattcttcgtgaagcatacacttcactttttgagaattttgcatctattgtgcagagctacatgggaaagcagaacaatgagtctggagcagaaaagtcagcgtctggaaggatatcgcccaatgacacaaaaatgaagcgagaggacaaccatgaatctgaaaggatgaaaaaacataagttgtttcaacccatcatgactgcaaagcgacagcatgagtgtacaaaggccaaaaggcatgttttggtgatagctagaatggatggtcttgactctctagcagatgtcaagaaagaacacttgcctttgttgaggaggatgcattcagctggggtgaagtgggcacataagttcctagaggaagatgcggctttggaattcagacttggataccattcggttccatcaatgcgacaattgcatcttcacatcattagccaggatttcaactctgcaagcttgaaaaataagaaacattggaactccttcaccacatcatttttccgtgattctgttgatgtgattgaggagattgaacaaaatggatcaacaaccaccagcagtgatgaaaaggtactcgctatggaactccggtgccacaggtgcaggagcgctcatccaaacatcccgaaactgaaatcccacatcgccatctgtaaatctcccttcccttcacatcttcttcagaaaaacaggctgttgttgtcctcgacgatgcatatggaccgcacgtagatgctagaactcgatgatcagttgtccttgcacgcacattttgcatgtcgtgcttgcctaaggatagtgttgatcgattttttttttacctaatgcggactagtggaaacttgccttgcttttcagagaccattacctgtgttggcgtgcttactgaagattattggggatggaagctccatttgacttgggtcattggatcgatattaaaattttctaaaataaattagagtgcgtcaggatctagattctcgtagaaatattttggatccagattcttttaggaagatcagtcagaattaattttataagaatggactagattatgattcataagaaaatatatatttac

SEQ ID NO: 1380 - DNA, 2852 bp, Zea Mays
cctttgcgcatcggcatcggacaccaggtttcttccgttttgctagatggattctgacgcgggcggctccagctccgctccaccacctccgtcggcagccataggtgcaggcgcgggcgcggagacgaagggggatgagcgcggccgcaagcaggtgatggtggtactggtgggcccaccgggcagcggcaagtccacgtttgcagatgccgtggttggcggctccaccgccggccgccactgggttcgcgtctgccaggatacaatagggaacggcaaagctgggacaaaaatacagtgcttgaaggctgcatcagatgctttgaaggagggcaagagtgttcttgtcgaccgctgcaacttggaacgtgagcagcgtgctgattttgtgaagctgggaggcacattgcgcgcagatgtgcacgctgtctccctggatctacctgcaaaggtctgtatctcacgtgcagtgagccgaaagggccatgaaggaaatctgcagggtgggaaggctgcccttgttgtgaaccgcatgctgcagaagaaggagacacccttgctcacagaaggtttcagtcggatcatgtgctgtaatgatgatggcgacattaaaaaagcagttgacttgtataatggtttagggccttcagatagtcttccatcaggagtttttggtcagaagagcaaaagacccgtacaagttggtataatgaagtttctaaagaaaactgatgcttctgttgttgagacatctagcggacctaagcaggcattgacagaaataaagccagcgcagcaaaatcctttgccaaaacaggaaaatgttgaagctggttttgcctgttccatggaagttgagaagggattaaatgacaagatggaaaatgaagagcatgctaaaggaagtgattattgtgatgttggttcccgtactctggcatttccatctatttctacagctgacttccaatttgatcttgacagagcatctgatattatagtggacacagctgctaatttcttgcagaagtttgataatataagactagttcttgtagacctgagtgagaaatcaagaattttgtcattggtcaaacagaaggctgctaagaagagcatcgactccaacagatttttcacatacgtgggagatatcactcagttgcacacaaaaggaggtcttcagtgcagcgtgattggtaatgctgccaattggtaatgattttggttatttaaatattacgtttccttgtctataagggaatcattatgtctaaatatcttccttttgttgaatcatgtgttgttatgtttcttctttttgaacaagttgtgttattatgtttctgggcgaaccaaactggctgtttcgcttttggagaaggtcagtaaccttattacacacagggagatgatatttgtgcccttttacgcaggaggctaaaacctggaggtggaggggttaatacagcaatatatagtgctgctggagaatctttacaacatgctactaaaaaatgtgctgatgcactgaggccaggaacctctgtagttgttccacttccatcaacttctcctctgcatcaacgggaagagctacatgggaaagcagaacaatgagtctggagcagaaaagtcagcgtctggaaggatatcgcccaatgacacaaaaatgaagcgagaggacaaccatgaatctgaaaggatgaaaaaacataagttgtttcaacccatcatgactgcaaagcgacagcatgagtgtacaaaggttaatgctccaaattgccatgataatgccatgacttcatctgctgctcctagccaaactagacaagtagacaacaaaaggaatgatgtggttaccagtaagacttggggatcctgggctcagtctctttacgaacttgccatgaacccagaaaaatacaagaactcagattctattctagagacatcagatgaatatgttgttctgaaagatctctatccaaaggccaaaaggcatgttttggtgatagctagaatggatggtcttgactctctagcagatgtcaagaaagaacacttgcctttgttgaggaggatgcattcagctggggtgaagtgggcacataagttcctagaggaagatgcggctttggaattcagacttggataccattcggttccatcaatgcgacaattgcatcttcacatcattagccaggatttcaactctgcaagcttgaaaaataagaaacattggaactccttcaccacatcatttttccgtgattctgttgatgtgattgaggagattgaacaaaatggatcaacaaccaccagcagtgatgaaaaggtactcgctatggaactccggtgccacaggtgcaggagcgctcatccaaacatcccgaaactgaaatcccacatcgccatctgtaaatctcccttcccttcacatcttcttcagaaaaacaggctgttgttgtcctcgacgatgcatatggaccgcacgtagatgctagaactcgatgatcagttgtccttgcacgcacattttgcatgtcgtgcttgcctaaggatagtgttgatcgattttttttttacctaatgcggactagtggaaacttgccttgcttttcagagaccattacctgtgttggcgtgcttactgaagattattggggatggaagctccatttgacttgggtcattggatcgatattaaaattttctaaaataaattagagtgcgtcaggatctagattctcgtagaaatattttggatccagattcttttaggaagatcagtcagaattaattttataagaatggactagattatgattcataagaaaatatatatttac

SEQ ID NO: 1381 - DNA, 2192 bp, Zea Mays
gcacaaatgaatataaaataagtcattttaaagtcatctgcttgtattcacttgtacgcttaaaataaccgtatccggctgatctggctgtctgtgggctgtgaaccaatcaagcggtatctgaactagttttacacaacttgagacataagaaagcttaaaaatcaaggtttgcagccagaaattagtaaaaaaaaaagggatccggaaagcaacataatgtctgagaaatgatagagactaaaaacaaggataaacaagagagagacaaaaaggagacaccatactagttttcctctttgctagagcagaatagcaattcaacagctaaagctaaattctcaaaagcacgcgttaaaataacctaaaatcgacttgaatccaagaataaaaaaaggagtgatttgattcagatgatcgaactggtacacaggaaaattgaaaaaaatgcaagtattgactgcatgttactttagggaagttccacagacaagtcagctaccccatagcaatcacttcaaggacaagtgattcgctcagcaacagctctcaccaaactaaatgcttcacccattcttgcttgcacatttgtaagtttctctagccaaggctcaaacaatgatacaacacctcacttacaaaacatcacctttagtgctaccactatacgagttaggaggcaggagacatatatgaggaaccagtagcaccatactgtaacctcatcttctctgatgagaaagagatgatgagagagggtgatgcacgtgttacgcttctaagaagcaagctccatggcctggtcgaaaggaaccgagatctggaagaggaaaacaagcaattgagacaccaagtgagccaattaaaaggtcagatctcctctctcgaaggccaggaaactaataagaggatgctgtggaagaagctggagaattctgcaaccggcatcagctactccaaggaaaagcagtttgtccagagcaacgatggtgctaaggaagccgtagatctcaacagctcattgtctcacagcaggcagcaattctccagtgtaaaccaagtgagatcaagggcgccaagggttccaaatcaacctcccaatccgacaagcacccaaccaaaggcaactgtgagaaaggaaggatgcatggcccctcctcctcctcctcctcctctaccttccaagttgcagaggagcacaaaggcgatacaaagggtaccagaggtagtcgagttgtaccggtcgctagtgcggcgtgaaggcaaaaataatgcaaagtctggatccgtaggaattccagcagcaacgaacagcagagagatgatcggggagattgagaacagatcagcttatgttttagctattaaatcagacgtagaaaatcaaggcaacttcgtgaacttcctcgcaagtgaagttcaaaacgcagcatacaaaaagatagctgacgttgaagagtttgtgaagtggcttgatggggaattgtcataccttgtggatgaaagagcagtgctaaaacaattccccaactggcccgagaagaaagcagatgccttgagagaagcagcattcaactaccgcgatctgaagaacatagagtcggaagcatcatccttccatgatgacaggagagtggccacacctatggctctcaagcgcatgcaggcattgcaggacaaaattgaacaaggtattcataacactgagcgagtaagggacagtgcaagcggaagatataaggaccttaagataccatgggaatggatgctcgactctggagtcataagccaacttgcaaaagagtacatgaaccgcattgtgaagacactgaagtcagatccatttgcgaatgaggaggagctgcttctgcaaggtgtccgctttgccttccgcatacatcagcttgctggtggctttgacgaaggatgcagaaaggcatttcaggaactaaatactaatgcaagcaagtcagagtgatccgagttcacgtgggttcaaataaaagtcgagatcacacatagataaatatgacacacatagattatcaagttttgccgaggttggctccaagggtctccaccaagacttgatgatggtgctgcatcttctaaagtttaatttatttggcatcaggtgctgatctcttggatacaagttgaggctctgaaaaatttctaaacgaatcgtacat

SEQ ID NO: 1382 - DNA, 2231 bp, Zea Mays
gcacaaatgaatataaaataagtcattttaaagtcatctgcttgtattcacttgtacgcttaaaataaccgtatccggctgatctggctgtctgtgggctgtgaaccaatcaagcggtatctgaactagttttacacaacttgagacataagaaagcttaaaaatcaaggtttgcagccagaaattagtaaaaaaaaaagggatccggaaagcaacataatgtctgagaaatgatagagactaaaaacaaggataaacaagagagagacaaaaaggagacaccatactagttttcctctttgctagagcagaatagcaattcaacagctaaagctaaattctcaaaagcacgcgttaaaataacctaaaatcgacttgaatccaagaataaaaaaaggagtgatttgattcagatgatcgaactggtacacaggaaaattgaaaaaaatgcaagtattgactgcatgttactttagggaagttccacagacaagtcagctaccccatagcaatcacttcaaggacaagtgattcgctcagcaacagctctcaccaaactaaatgcttcacccattcttgcttgcacatttgtaagtttctctagccaaggctcaaacaatgatacaacacctcacttacaaaacatcacctttagtgctaccactatacgagttaggaggcaggagacatatatgaggaaccagtagcaccatactgtaacctcatcttctctgatgagaaagagatgatgagagagggtgatgcacgtgttacgcttctaagaagcaagctccatggcctggtcgaaaggaaccgagatctggaagaggaaaacaagcaattgagacaccaagtgagccaattaaaaggtcagatctcctctctcgaaggccaggaaactaataagaggatgctgtggaagaagctggagaattctgcaaccggcatcagctactccaaggaaaagcagtttgtccagagcaacgatggtgctaaggaagccgtagatctcaacagctcattgtctcacagcaggcagcaattctccagtgtaaaccaagtgagatcaagggcgccaagggttccaaatcaacctcccaatccgacaagcacccaaccaaaggcaactgtgagaaaggaaggatgcatggcccctcctcctcctcctcctcctctaccttccaagttgcagaggagcacaaaggcgatacaaagggtaccagaggtagtcgagttgtaccggtcgctagtgcggcgtgaaggcaaaaataatgcaaagtctggatccgtaggaattccagcagcaacgaacagcagagagatgatcggggagattgagaacagatcagcttatgttttagctattaaatcagacgtagaaaatcaaggcaacttcgtgaacttcctcgcaagtgaagttcaaaacgcagcatacaaaaagatagctgacgttgaagagtttgtgaagtggcttgatggggaattgtcataccttgtggatgaaagagcagtgctaaaacaattccccaactggcccgagaagaaagcagatgccttgagagaagcagcattcaactaccgcgatctgaagaacatagagtcggaagcatcatccttccatgatgacaggagagtggccacacctatggctctcaagcgcatgcaggcattgcaggacaaaattgaacaaggtattcataacactgagcgagtaagggacagtgcaagcggaagatataaggaccttaagataccatgggaatggatgctcgactctggagtcataagccaagtatgtcttcctttcacactaaagatggcttccttgaagcttgcaaaagagtacatgaaccgcattgtgaagacactgaagtcagatccatttgcgaatgaggaggagctgcttctgcaaggtgtccgctttgccttccgcatacatcagcttgctggtggctttgacgaaggatgcagaaaggcatttcaggaactaaatactaatgcaagcaagtcagagtgatccgagttcacgtgggttcaaataaaagtcgagatcacacatagataaatatgacacacatagattatcaagttttgccgaggttggctccaagggtctccaccaagacttgatgatggtgctgcatcttctaaagtttaatttatttggcatcaggtgctgatctcttggatacaagttgaggctctgaaaaatttctaaacgaatcgtacat

SEQ ID NO: 1383 - DNA, 2642 bp, Zea Mays
cactgattggtggcccaacatatgttcctggccccacttactgtgtcactgccagtatatcctcgatactgcaacaactatcgctcccgtgtcggccccactccaaatcggcgagcccacaacatcggcgcttccttccggcaccttccaaagttccaacttccaagtcacgagaaaggtttcgcttcgaaactcaaccggagatggcgagctctggcggaatctccgaccagctcttcgtctccgtcaagttagagagcccgcacctcgcggagctcgacctcgccccccacctcttcggctcccaccctgtggctggctcgtgggacccctgcaaggccctgcctttggagcgggcggccaccgccgtgtgggagttcagctgcgtcgtgccttcgcagcacgtttgttttgaagcgaaaaggtgataatcctcaatacattattgaggagggacctaaccgaccattgggttgccagagaaatgaatttgagatggggaatgcgttgtttaaactcaacgaagggaaggaggtacttgagtgcaaggttcaggttgagacagaaatgttatccccaattgacttggcggctagttggagagctcatcaggagtattttcagccttcaagggtgcgggggactcacgatgtcactatcaaccctgggttagaaggcagggccaagaatggcttcgcttctggtttggagcttgatttagacaagtatgtagttccaacaccaaacatgggctcaggtgttgtttatgcagctagtttgactgaaaatccacgctcattattgcaaactgggagttcctcaaacaatgataccacaaaggacattttgcacaactcaactaaaggcgattcatccttgaatcactatgttaacactatgaagagcacaattggagggcatgcatcgtcactggaagaacaaagggcaatgtttgttgatagaggggttggctcaccaaattttgcaagaccaacaatggaaaccttttcgatgagcaactttaagttggattctgaatcaaagggtatgccagcagcagaaggggctgttgcagcagctgctgtagctgatcagatgtatggaccaaaagaggaccgcaagttggccatcgtattggttgggctaccagctcgaggtaagacctttacagcagctaaacttacaagatatctccgatggttaggtcatgaaacaaaacacttcaatgttggaaagtaccgccggctcaagcatggaactaatcagactgctgatttctttcgtggagataacagggagggtgtggaggcacgtaacgaggtggctgcattagcaatggaagatatgctatcttggatgcaggagggtggtcaggttggtattttcgatgccacaaacagcacaagaatacggaggaacatgctgatgaaaatggctgaaggaaaatgtaagatcatctttttggaaacattatgtaatgaccaagatgttcttgagagaaatatacgattgaaagttcaacaaagtcctgattatgcagagcaaacagattttgaagctggtgtacaagatttcaaagagcgattgacctattatgaaaaggtctatgaaccggtggaagaaggttcttacataaaaatgattgacatggttagtgggaaggggggccaactaaagattaatgacataagtggttacttgcctggacggatcgttttcttcttggttaactgtcatctgacacctcgtcctatcctgctaacaagacatggtgaaagtatggataatgtcagaggaagaatcggtggagactcttctttgagtgaggccggtgagctttattcaaggaagcttgcgagctttgtggagaagcgactgaaatccgagcggactgcctctatatggactagcacactccagagaacaatattaacagcacatccgatcattggttttccaaagatacaatggcgtgctcttgatgagatcaatgctggggtctgtgatgggatgacatacgatgaaataaagaaaagtaaacctgaagaatatgaatcacgaagaaaagacaagctgaggtatcgttatccgagaggagaatcctatcttgacgtcattcaaagactagaacctgtgataattgaacttgaacgacagcgtgctccagttgtagtcatagctcaccaggctgtgttgagagcactttatgcatactttgcggacaaaccgcttgaggaagtcccaaatattgagatacctctacatacaataattgagatacaaatgggtgttgctggtgttcaagagaaacggtacaaactcatggatgcaatccatcccacagcggggttgtaagaaataataaatggagctcgccttctaaaagcaatggtagcacaaataaattttgtgatgatatacgtatcacaacattaatcaattataagctatagttcgaggtggaatgtcacaccactaggtttagctcatagatgatttgccatttgacttacaagttttggctggttgtgtagtgtgtactcttaattcatgagttctgaacatgtttaattcagatccgagttctgagcaagtttattcaggccaaagctcgcgccaaagacagtttttccagtaacgaa

SEQ ID NO: 1384 - DNA, 2409 bp, Zea Mays
gcaacaactatcgctcccgtgtcggccccactccaaatcggcgagcccacaacatcggcgcttccttccggcaccttccaaagttccaacttccaagtcacgagaaaggtttcgcttcgaaactcaaccggagatggcgagctctggcggaatctccgaccagctcttcgtctccgtcaagttagagagcccgcacctcgcggagctcgacctcgccccccacctcttcggctcccaccctgtggctggctcgtgggacccctgcaaggccctgcctttggagcgggcggccaccgccgtgtgggagttcagctgcgtcgtgccttcgcagcacgaatcgctggatttcaagtttgttttgaagcgaaaaggtgataatcctcaatacattattgaggagggacctaaccgaccattgggttgccagagaaatgaatttgagatggggaatgcgttgtttaaactcaacgaagggaaggagccttcaagggtgcgggggactcacgatgtcactatcaaccctgggttagaaggcagggccaagaatggcttcgcttctggtttggagcttgatttagacaattcctcaaacaatgataccacaaaggacattttgcacaactcaactaaaggcgattcatccttgaatcactatgttaacactatgaagagcacaattggagggcatgcatcgtcactggaagaacaaagggcaatgtttgttgatagaggggttggctcaccaaattttgcaagaccaacaatggaaaccttttcgatgagcaactttaagttggattctgaatcaaagggtatgccagcagcagaaggggctgttgcagcagctgctgtagctgatcagatgtatggaccaaaagaggaccgcaagttggccatcgtattggttgggctaccagctcgaggtaagacctttacagcagctaaacttacaagatatctccgatggttaggtcatgaaacaaaacacttcaatgttggaaagtaccgccggctcaagcatggaactaatcagactgctgatttctttcgtggagataacagggagggtgtggaggcacgtaacgaggtggctgcattagcaatggaagatatgctatcttggatgcaggagggtggtcaggttggtattttcgatgccacaaacagcacaagaatacggaggaacatgctgatgaaaatggctgaaggaaaatgtaagatcatctttttggaaacattatgtaatgaccaagatgttcttgagagaaatatacgattgaaagttcaacaaagtcctgattatgcagagcaaacagattttgaagctggtgtacaagatttcaaagagcgattgacctattatgaaaaggtctatgaaccggtggaagaaggttcttacataaaaatgattgacatggttagtgggaaggggggccaactaaagattaatgacataagtggttacttgcctggacggatcgttttcttcttggttaactgtcatctgacacctcgtcctatcctgctaacaagacatggtgaaagtatggataatgtcagaggaagaatcggtggagactcttctttgagtgaggccggtgagctttattcaaggaagcttgcgagctttgtggagaagcgactgaaatccgagcggactgcctctatatggactagcacactccagagaacaatattaacagcacatccgatcattggttttccaaagatacaatggcgtgctcttgatgagatcaatgctggggtctgtgatgggatgacatacgatgaaataaagaaaagtaaacctgaagaatatgaatcacgaagaaaagacaagctgaggtatcgttatccgagaggagaatcctatcttgacgtcattcaaagactagaacctgtgataattgaacttgaacgacagcgtgctccagttgtagtcatagctcaccaggctgtgttgagagcactttatgcatactttgcggacaaaccgcttgaggaagtcccaaatattgagatacctctacatacaataattgagatacaaatgggtgttgctggtgttcaagagaaacggtacaaactcatggatgcaatccatcccacagcggggttgtaagaaataataaatggagctcgccttctaaaagcaatggtagcacaaataaattttgtgatgatatacgtatcacaacattaatcaattataagctatagttcgaggtggaatgtcacaccactaggtttagctcatagatgatttgccatttgacttacaagttttggctggttgtgtagtgtgtactcttaattcatgagttctgaacatgtttaattcagatccgagttctgagcaagtttattcaggccaaagctcgcgccaaagacagtttttccagtaacgaa

SEQ ID NO: 1385 - DNA, 2405 bp, Zea Mays
caacaactatcgctcccgtgtcggccccactccaaatcggcgagcccacaacatcggcgcttccttccggcaccttccaaagttccaacttccaagtcacgagaaaggtttcgcttcgaaactcaaccggagatggcgagctctggcggaatctccgaccagctcttcgtctccgtcaagttagagagcccgcacctcgcggagctcgacctcgccccccacctcttcggctcccaccctgtggctggctcgtgggacccctgcaaggccctgcctttggagcgggcggccaccgccgtgtgggagttcagctgcgtcgtgccttcgcagcacgaatcgctggatttcaagtttgttttgaagcgaaaaggtgataatcctcaatacattattgaggagggacctaaccgaccattgggttgccagagaaatgaatttgagatggggaatgcgttgtttaaactcaacgaagggaaggaggtacttgagtgcaaggttcaggttgagacagaaatgttatccccaattgacttggcggctagttggagagctcatcaggagtattttcagccttcaagggtgcgggggactcacgatgtcactatcaaccctgggttagaaggcagggccaagaatggcttcgcttctggtttggagcttgatttagacaattcctcaaacaatgataccacaaaggacattttgcacaactcaactaaaggcgattcatccttgaatcactatgttaacactatgaagagcacaattggagggcatgcatcgtcactggaagaacaaagggcaatgtttgttgatagaggggttggctcaccaaattttgcaagaccaacaatggaaaccttttcgatgagcaactttaagttggattctgaatcaaaggttgggctaccagctcgaggtaagacctttacagcagctaaacttacaagatatctccgatggttaggtcatgaaacaaaacacttcaatgttggaaagtaccgccggctcaagcatggaactaatcagactgctgatttctttcgtggagataacagggagggtgtggaggcacgtaacgaggtggctgcattagcaatggaagatatgctatcttggatgcaggagggtggtcaggttggtattttcgatgccacaaacagcacaagaatacggaggaacatgctgatgaaaatggctgaaggaaaatgtaagatcatctttttggaaacattatgtaatgaccaagatgttcttgagagaaatatacgattgaaagttcaacaaagtcctgattatgcagagcaaacagattttgaagctggtgtacaagatttcaaagagcgattgacctattatgaaaaggtctatgaaccggtggaagaaggttcttacataaaaatgattgacatggttagtgggaaggggggccaactaaagattaatgacataagtggttacttgcctggacggatcgttttcttcttggttaactgtcatctgacacctcgtcctatcctgctaacaagacatggtgaaagtatggataatgtcagaggaagaatcggtggagactcttctttgagtgaggccggtgagctttattcaaggaagcttgcgagctttgtggagaagcgactgaaatccgagcggactgcctctatatggactagcacactccagagaacaatattaacagcacatccgatcattggttttccaaagatacaatggcgtgctcttgatgagatcaatgctggggtctgtgatgggatgacatacgatgaaataaagaaaagtaaacctgaagaatatgaatcacgaagaaaagacaagctgaggtatcgttatccgagaggagaatcctatcttgacgtcattcaaagactagaacctgtgataattgaacttgaacgacagcgtgctccagttgtagtcatagctcaccaggctgtgttgagagcactttatgcatactttgcggacaaaccgcttgaggaagtcccaaatattgagatacctctacatacaataattgagatacaaatgggtgttgctggtgttcaagagaaacggtacaaactcatggatgcaatccatcccacagcggggttgtaagaaataataaatggagctcgccttctaaaagcaatggtagcacaaataaattttgtgatgatatacgtatcacaacattaatcaattataagctatagttcgaggtggaatgtcacaccactaggtttagctcatagatgatttgccatttgacttacaagttttggctggttgtgtagtgtgtactcttaattcatgagttctgaacatgtttaattcagatccgagttctgagcaagtttattcaggccaaagctcgcgccaaagacagtttttccagtaacgaa

SEQ ID NO: 1386 - DNA, 2569 bp, Zea Mays
cccgtgtcggccccactccaaatcggcgagcccacaacatcggcgcttccttccggcaccttccaaagttccaacttccaagtcacgagaaaggtttcgcttcgaaactcaaccggagatggcgagctctggcggaatctccgaccagctcttcgtctccgtcaagttagagagcccgcacctcgcggagctcgacctcgccccccacctcttcggctcccaccctgtggctggctcgtgggacccctgcaaggccctgcctttggagcgggcggccaccgccgtgtgggagttcagctgcgtcgtgccttcgcagcacgaatcgctggatttcaagtttgttttgaagcgaaaaggtgataatcctcaatacattattgaggagggacctaaccgaccattgggttgccagagaaatgaatttgagatggggaatgcgttgtttaaactcaacgaagggaaggaggtacttgagtgcaaggttcaggttgagacagaaatgttatccccaattgacttggcggctagttggagagctcatcaggagtattttcagccttcaagggtgcgggggactcacgatgtcactatcaaccctgggttagaaggcagggccaagaatggcttcgcttctggtttggagcttgatttagacaagtatgtagttccaacaccaaacatgggctcaggtgttgtttatgcagctagtttgactgaaaatccacgctcattattgcaaactgggagttcctcaaacaatgataccacaaaggacattttgcacaactcaactaaaggcgattcatccttgaatcactatgttaacactatgaagagcacaattggagggcatgcatcgtcactggaagaacaaagggcaatgtttgttgatagaggggttggctcaccaaattttgcaagaccaacaatggaaaccttttcgatgagcaactttaagttggattctgaatcaaagggtatgccagcagcagaaggggctgttgcagcagctgctgtagctgatcagatgtatggaccaaaagaggaccgcaagttggccatcgtattggttgggctaccagctcgaggtaagacctttacagcagctaaacttacaagatatctccgatggttaggtcatgaaacaaaacacttcaatgttggaaagtaccgccggctcaagcatggaactaatcagactgctgatttctttcgtggagataacagggagggtgtggaggcacgtaacgaggtggctgcattagcaatggaagatatgctatcttggatgcaggagggtggtcaggttggtattttcgatgccacaaacagcacaagaatacggaggaacatgctgatgaaaatggctgaaggaaaatatcatctttttggaaacattatgtaatgaccaagatgttcttgagagaaatatacgattgaaagttcaacaaagtcctgattatgcagagcaaacagattttgaagctggtgtacaagatttcaaagagcgattgacctattatgaaaaggtctatgaaccggtggaagaaggttcttacataaaaatgattgacatggttagtgggaaggggggccaactaaagattaatgacataagtggttacttgcctggacggatcgttttcttcttggttaactgtcatctgacacctcgtcctatcctgctaacaagacatggtgaaagtatggataatgtcagaggaagaatcggtggagactcttctttgagtgaggccggtgagctttattcaaggaagcttgcgagctttgtggagaagcgactgaaatccgagcggactgcctctatatggactagcacactccagagaacaatattaacagcacatccgatcattggttttccaaagatacaatggcgtgctcttgatgagatcaatgctggggtctgtgatgggatgacatacgatgaaataaagaaaagtaaacctgaagaatatgaatcacgaagaaaagacaagctgaggtatcgttatccgagaggagaatcctatcttgacgtcattcaaagactagaacctgtgataattgaacttgaacgacagcgtgctccagttgtagtcatagctcaccaggctgtgttgagagcactttatgcatactttgcggacaaaccgcttgaggaagtcccaaatattgagatacctctacatacaataattgagatacaaatgggtgttgctggtgttcaagagaaacggtacaaactcatggatgcaatccatcccacagcggggttgtaagaaataataaatggagctcgccttctaaaagcaatggtagcacaaataaattttgtgatgatatacgtatcacaacattaatcaattataagctatagttcgaggtggaatgtcacaccactaggtttagctcatagatgatttgccatttgacttacaagttttggctggttgtgtagtgtgtactcttaattcatgagttctgaacatgtttaattcagatccgagttctgagcaagtttattcaggccaaagctcgcgccaaagacagtttttccagtaacgaa

SEQ ID NO: 1387 - DNA, 2358 bp, Zea Mays
cccgtgtcggccccactccaaatcggcgagcccacaacatcggcgcttccttccggcaccttccaaagttccaacttccaagtcacgagaaaggtttcgcttcgaaactcaaccggagatggcgagctctggcggaatctccgaccagctcttcgtctccgtcaagttagagagcccgcacctcgcggagctcgacctcgccccccacctcttcggctcccaccctgtggctggctcgtgggacccctgcaaggccctgcctttggagcgggcggccaccgccgtgtgggagttcagctgcgtcgtgccttcgcagcacgaatcgctggatttcaagtttgttttgaagcgaaaaggtgataatcctcaatacattattgaggagggacctaaccgaccattgggttgccagagaaatgaatttgagatggggaatgcgttgtttaaactcaacgaagggaaggaggtacttgagtgcaaggttcaggttgagacagaaatgttatccccaattgacttggcggctagttggagagctcatcaggagtattttcagccttcaagggtgcgggggactcacgatgtcactatcaaccctgggttagaaggcagggccaagagcacaattggagggcatgcatcgtcactggaagaacaaagggcaatgtttgttgatagaggggttggctcaccaaattttgcaagaccaacaatggaaaccttttcgatgagcaactttaagttggattctgaatcaaagggtatgccagcagcagaaggggctgttgcagcagctgctgtagctgatcagatgtatggaccaaaagaggaccgcaagttggccatcgtattggttgggctaccagctcgaggtaagacctttacagcagctaaacttacaagatatctccgatggttaggtcatgaaacaaaacacttcaatgttggaaagtaccgccggctcaagcatggaactaatcagactgctgatttctttcgtggagataacagggagggtgtggaggcacgtaacgaggtggctgcattagcaatggaagatatgctatcttggatgcaggagggtggtcaggttggtattttcgatgccacaaacagcacaagaatacggaggaacatgctgatgaaaatggctgaaggaaaatgtaagatcatctttttggaaacattatgtaatgaccaagatgttcttgagagaaatatacgattgaaagttcaacaaagtcctgattatgcagagcaaacagattttgaagctggtgtacaagatttcaaagagcgattgacctattatgaaaaggtctatgaaccggtggaagaaggttcttacataaaaatgattgacatggttagtgggaaggggggccaactaaagattaatgacataagtggttacttgcctggacggatcgttttcttcttggttaactgtcatctgacacctcgtcctatcctgctaacaagacatggtgaaagtatggataatgtcagaggaagaatcggtggagactcttctttgagtgaggccggtgagctttattcaaggaagcttgcgagctttgtggagaagcgactgaaatccgagcggactgcctctatatggactagcacactccagagaacaatattaacagcacatccgatcattggttttccaaagatacaatggcgtgctcttgatgagatcaatgctggggtctgtgatgggatgacatacgatgaaataaagaaaagtaaacctgaagaatatgaatcacgaagaaaagacaagctgaggtatcgttatccgagaggagaatcctatcttgacgtcattcaaagactagaacctgtgataattgaacttgaacgacagcgtgctccagttgtagtcatagctcaccaggctgtgttgagagcactttatgcatactttgcggacaaaccgcttgaggaagtcccaaatattgagatacctctacatacaataattgagatacaaatgggtgttgctggtgttcaagagaaacggtacaaactcatggatgcaatccatcccacagcggggttgtaagaaataataaatggagctcgccttctaaaagcaatggtagcacaaataaattttgtgatgatatacgtatcacaacattaatcaattataagctatagttcgaggtggaatgtcacaccactaggtttagctcatagatgatttgccatttgacttacaagttttggctggttgtgtagtgtgtactcttaattcatgagttctgaacatgtttaattcagatccgagttctgagcaagtttattcaggccaaagctcgcgccaaagacagtttttccagtaacgaa

SEQ ID NO: 1388 - DNA, 2553 bp, Zea Mays
ggcgagcccacaacatcggcgcttccttccggcaccttccaaagttccaacttccaagtcacgagaaaggtttcgcttcgaaactcaaccggagatggcgagctctggcggaatctccgaccagctcttcgtctccgtcaagttagagagcccgcacctcgcggagctcgacctcgccccccacctcttcggctcccaccctgtggctggctcgtgggacccctgcaaggccctgcctttggagcgggcggccaccgccgtgtgggagttcagctgcgtcgtgccttcgcagcacgaatcgctggatttcaagtttgttttgaagcgaaaaggtgataatcctcaatacattattgaggagggacctaaccgaccattgggttgccagagaaatgaatttgagatggggaatgcgttgtttaaactcaacgaagggaaggaggtacttgagtgcaaggttcaggttgagacagaaatgttatccccaattgacttggcggctagttggagagctcatcaggagtattttcagccttcaagggtgcgggggactcacgatgtcactatcaaccctgggttagaaggcagggccaagaatggcttcgcttctggtttggagcttgatttagacaagtatgtagttccaacaccaaacatgggctcaggtgttgtttatgcagctagtttgactgaaaatccacgctcattattgcaaactgggagttcctcaaacaatgataccacaaaggacattttgcacaactcaactaaaggcgattcatccttgaatcactatgttaacactatgaagagcacaattggagggcatgcatcgtcactggaagaacaaagggcaatgtttgttgatagaggggttggctcaccaaattttgcaagaccaacaatggaaaccttttcgatgagcaactttaagttggattctgaatcaaagcagggtatgccagcagcagaaggggctgttgcagcagctgctgtagctgatcagatgtatggaccaaaagaggaccgcaagttggccatcgtattggttgggctaccagctcgaggtaagacctttacagcagctaaacttacaagatatctccgatggttaggtcatgaaacaaaacacttcaatgttggaaagtaccgccggctcaagcatggaactaatcagactgctgatttctttcgtggagataacagggagggtgtggaggcacgtaacgaggtggctgcattagcaatggaagatatgctatcttggatgcaggagggtggtcaggttggtattttcgatgccacaaacagcacaagaatacggaggaacatgctgatgaaaatggctgaaggaaaatgtaagatcatctttttggaaacattatgtaatgaccaagatgttcttgagagaaatatacgattgaaagttcaacaaagtcctgattatgcagagcaaacagattttgaagctggtgtacaagatttcaaagagcgattgacctattatgaaaaggtctatgaaccggtggaagaaggttcttacataaaaatgattgacatggttagtgggaaggggggccaactaaagattaatgacataagtggttacttgcctggacggatcgttttcttcttggttaactgtcatctgacacctcgtcctatcctgctaacaagacatggtgaaagtatggataatgtcagaggaagaatcggtggagactcttctttgagtgaggccggtgagctttattcaaggaagcttgcgagctttgtggagaagcgactgaaatccgagcggactgcctctatatggactagcacactccagagaacaatattaacagcacatccgatcattggttttccaaagatacaatggcgtgctcttgatgagatcaatgctggggtctgtgatgggatgacatacgatgaaataaagaaaagtaaacctgaagaatatgaatcacgaagaaaagacaagctgaggtatcgttatccgagaggagaatcctatcttgacgtcattcaaagactagaacctgtgataattgaacttgaacgacagcgtgctccagttgtagtcatagctcaccaggctgtgttgagagcactttatgcatactttgcggacaaaccgcttgaggaagtcccaaatattgagatacctctacatacaataattgagatacaaatgggtgttgctggtgttcaagagaaacggtacaaactcatggatgcaatccatcccacagcggggttgtaagaaataataaatggagctcgccttctaaaagcaatggtagcacaaataaattttgtgatgatatacgtatcacaacattaatcaattataagctatagttcgaggtggaatgtcacaccactaggtttagctcatagatgatttgccatttgacttacaagttttggctggttgtgtagtgtgtactcttaattcatgagttctgaacatgtttaattcagatccgagttctgagcaagtttattcaggccaaagctcgcgccaaagacagtttttccagtaacgaa

SEQ ID NO: 1389 - DNA, 2357 bp, Zea Mays
ccggcaccttccaaagttccaacttccaagtcacgagaaaggtttcgcttcgaaactcaaccggagatggcgagctctggcggaatctccgaccagctcttcgtctccgtcaagttagagagcccgcacctcgcggagctcgacctcgccccccacctcttcggctcccaccctgtggctggctcgtgggacccctgcaaggccctgcctttggagcgggcggccaccgccgtgtgggagttcagctgcgtcgtgccttcgcagcacgaatcgctggatttcaagtttgttttgaagcgaaaaggtgataatcctcaatacattattgaggagggacctaaccgaccattgggttgccagagaaatgaatttgagatggggaatgcgttgtttaaactcaacgaagggaaggagccttcaagggtgcgggggactcacgatgtcactatcaaccctgggttagaaggcagggccaaggtgttgtttatgcagctagtttgactgaaaatccacgctcattattgcaaactgggagttcctcaaacaatgataccacaaaggacattttgcacaactcaactaaaggcgattcatccttgaatcactatgttaacactatgaagagcacaattggagggcatgcatcgtcactggaagaacaaagggcaatgtttgttgatagaggggttggctcaccaaattttgcaagaccaacaatggaaaccttttcgatgagcaactttaagttggattctgaatcaaagggtatgccagcagcagaaggggctgttgcagcagctgctgtagctgatcagatgtatggaccaaaagaggaccgcaagttggccatcgtattggttgggctaccagctcgaggtaagacctttacagcagctaaacttacaagatatctccgatggttaggtcatgaaacaaaacacttcaatgttggaaagtaccgccggctcaagcatggaactaatcagactgctgatttctttcgtggagataacagggagggtgtggaggcacgtaacgaggtggctgcattagcaatggaagatatgctatcttggatgcaggagggtggtcaggttggtattttcgatgccacaaacagcacaagaatacggaggaacatgctgatgaaaatggctgaaggaaaatatcatctttttggaaacattatgtaatgaccaagatgttcttgagagaaatatacgattgaaagttcaacaaagtcctgattatgcagagcaaacagattttgaagctggtgtacaagatttcaaagagcgattgacctattatgaaaaggtctatgaaccggtggaagaaggttcttacataaaaatgattgacatggttagtgggaaggggggccaactaaagattaatgacataagtggttacttgcctggacggatcgttttcttcttggttaactgtcatctgacacctcgtcctatcctgctaacaagacatggtgaaagtatggataatgtcagaggaagaatcggtggagactcttctttgagtgaggccggtgagctttattcaaggaagcttgcgagctttgtggagaagcgactgaaatccgagcggactgcctctatatggactagcacactccagagaacaatattaacagcacatccgatcattggttttccaaagatacaatggcgtgctcttgatgagatcaatgctggggtctgtgatgggatgacatacgatgaaataaagaaaagtaaacctgaagaatatgaatcacgaagaaaagacaagctgaggtatcgttatccgagaggagaatcctatcttgacgtcattcaaagactagaacctgtgataattgaacttgaacgacagcgtgctccagttgtagtcatagctcaccaggctgtgttgagagcactttatgcatactttgcggacaaaccgcttgaggaagtcccaaatattgagatacctctacatacaataattgagatacaaatgggtgttgctggtgttcaagagaaacggtacaaactcatggatgcaatccatcccacagcggggttgtaagaaataataaatggagctcgccttctaaaagcaatggtagcacaaataaattttgtgatgatatacgtatcacaacattaatcaattataagctatagttcgaggtggaatgtcacaccactaggtttagctcatagatgatttgccatttgacttacaagttttggctggttgtgtagtgtgtactcttaattcatgagttctgaacatgtttaattcagatccgagttctgagcaagtttattcaggccaaagctcgcgccaaagacagtttttccagtaacgaa

SEQ ID NO: 1390 - DNA, 2512 bp, Zea Mays
ccggcaccttccaaagttccaacttccaagtcacgagaaaggtttcgcttcgaaactcaaccggagatggcgagctctggcggaatctccgaccagctcttcgtctccgtcaagttagagagcccgcacctcgcggagctcgacctcgccccccacctcttcggctcccaccctgtggctggctcgtgggacccctgcaaggccctgcctttggagcgggcggccaccgccgtgtgggagttcagctgcgtcgtgccttcgcagcacgaatcgctggatttcaagtttgttttgaagcgaaaaggtgataatcctcaatacattattgaggagggacctaaccgaccattgggttgccagagaaatgaatttgagatggggaatgcgttgtttaaactcaacgaagggaaggaggtacttgagtgcaaggttcaggttgagacagaaatgttatccccaattgacttggcggctagttggagagctcatcaggagtattttcagccttcaagggtgcgggggactcacgatgtcactatcaaccctgggttagaaggcagggccaagaatggcttcgcttctggtttggagcttgatttagacaagtatgtagttccaacaccaaacatgggctcaggtgttgtttatgcagctagtttgactgaaaatccacgctcattattgcaaactgggagttcctcaaacaatgataccacaaaggacattttgcacaactcaactaaaggcgattcatccttgaatcactatgttaacactatgaagagcacaattggagggcatgcatcgtcactggaagaacaaagggcaatgtttgttgatagaggggttggctcaccaaattttgcaagaccaacaatggaaaccttttcgatgagcaactttaagttggattctgaatcaaagcagcagaaggggctgttgcagcagctgctgtagctgatcagatgtatggaccaaaagaggaccgcaagttggccatcgtattggttgggctaccagctcgaggtaagacctttacagcagctaaacttacaagatatctccgatggttaggtcatgaaacaaaacacttcaatgttggaaagtaccgccggctcaagcatggaactaatcagactgctgatttctttcgtggagataacagggagggtgtggaggcacgtaacgaggtggctgcattagcaatggaagatatgctatcttggatgcaggagggtggtcaggttggtattttcgatgccacaaacagcacaagaatacggaggaacatgctgatgaaaatggctgaaggaaaatgtaagatcatctttttggaaacattatgtaatgaccaagatgttcttgagagaaatatacgattgaaagttcaacaaagtcctgattatgcagagcaaacagattttgaagctggtgtacaagatttcaaagagcgattgacctattatgaaaaggtctatgaaccggtggaagaaggttcttacataaaaatgattgacatggttagtgggaaggggggccaactaaagattaatgacataagtggttacttgcctggacggatcgttttcttcttggttaactgtcatctgacacctcgtcctatcctgctaacaagacatggtgaaagtatggataatgtcagaggaagaatcggtggagactcttctttgagtgaggccggtgagctttattcaaggaagcttgcgagctttgtggagaagcgactgaaatccgagcggactgcctctatatggactagcacactccagagaacaatattaacagcacatccgatcattggttttccaaagatacaatggcgtgctcttgatgagatcaatgctggggtctgtgatgggatgacatacgatgaaataaagaaaagtaaacctgaagaatatgaatcacgaagaaaagacaagctgaggtatcgttatccgagaggagaatcctatcttgacgtcattcaaagactagaacctgtgataattgaacttgaacgacagcgtgctccagttgtagtcatagctcaccaggctgtgttgagagcactttatgcatactttgcggacaaaccgcttgaggaagtcccaaatattgagatacctctacatacaataattgagatacaaatgggtgttgctggtgttcaagagaaacggtacaaactcatggatgcaatccatcccacagcggggttgtaagaaataataaatggagctcgccttctaaaagcaatggtagcacaaataaattttgtgatgatatacgtatcacaacattaatcaattataagctatagttcgaggtggaatgtcacaccactaggtttagctcatagatgatttgccatttgacttacaagttttggctggttgtgtagtgtgtactcttaattcatgagttctgaacatgtttaattcagatccgagttctgagcaagtttattcaggccaaagctcgcgccaaagacagtttttccagtaacgaa

SEQ ID NO: 1391 - DNA, 2543 bp, Zea Mays
ccggcaccttccaaagttccaacttccaagtcacgagaaaggtttcgcttcgaaactcaaccggagatggcgagctctggcggaatctccgaccagctcttcgtctccgtcaagttagagagcccgcacctcgcggagctcgacctcgccccccacctcttcggctcccaccctgtggctggctcgtgggacccctgcaaggccctgcctttggagcgggcggccaccgccgtgtgggagttcagctgcgtcgtgccttcgcagcacgaatcgctggatttcaagtttgttttgaagcgaaaaggtgataatcctcaatacattattgaggagggacctaaccgaccattgggttgccagagaaatgaatttgagatggggaatgcgttgtttaaactcaacgaagggaaggaggtacttgagtgcaaggttcaggttgagacagaaatgttatccccaattgacttggcggctagttggagagctcatcaggagtattttcagccttcaagggtgcgggggactcacgatgtcactatcaaccctgggttagaaggcagggccaagaatggcttcgcttctggtttggagcttgatttagacaagtatgtagttccaacaccaaacatgggctcaggtgttgtttatgcagctagtttgactgaaaatccacgctcattattgcaaactgggagttcctcaaacaatgataccacaaaggacattttgcacaactcaactaaaggcgattcatccttgaatcactatgttaacactatgaagagcacaattggagggcatgcatcgtcactggaagaacaaagggcaatgtttgttgatagaggggttggctcaccaaattttgcaagaccaacaatggaaaccttttcgatgagcaactttaagttggattctgaatcaaagggtatgccagcagcagaaggggctgttgcagcagctgctgtagctgatcagatgtatggaccaaaagaggaccgcaagttggccatcgtattggttgggctaccagctcgaggtaagacctttacagcagctaaacttacaagatatctccgatggttaggtcatgaaacaaaacacttcaatgttggaaagtaccgccggctcaagcatggaactaatcagactgctgatttctttcgtggagataacagggagggtgtggaggcacgtaacgagatcgtcaccatgctttttcaggtggctgcattagcaatggaagatatgctatcttggatgcaggagggtggtcaggttggtattttcgatgccacaaacagcacaagaatacggaggaacatgctgatgaaaatggctgaaggaaaatgtaagatcatctttttggaaacattatgtaatgaccaagatgttcttgagagaaatatacgattgaaagttcaacaaagtcctgattatgcagagcaaacagattttgaagctggtgtacaagatttcaaagagcgattgacctattatgaaaaggtctatgaaccggtggaagaaggttcttacataaaaatgattgacatggttagtgggaaggggggccaactaaagattaatgacataagtggttacttgcctggacggatcgttttcttcttggttaactgtcatctgacacctcgtcctatcctgctaacaagacatggtgaaagtatggataatgtcagaggaagaatcggtggagactcttctttgagtgaggccggtgagctttattcaaggaagcttgcgagctttgtggagaagcgactgaaatccgagcggactgcctctatatggactagcacactccagagaacaatattaacagcacatccgatcattggttttccaaagatacaatggcgtgctcttgatgagatcaatgctggggtctgtgatgggatgacatacgatgaaataaagaaaagtaaacctgaagaatatgaatcacgaagaaaagacaagctgaggtatcgttatccgagaggagaatcctatcttgacgtcattcaaagactagaacctgtgataattgaacttgaacgacagcgtgctccagttgtagtcatagctcaccaggctgtgttgagagcactttatgcatactttgcggacaaaccgcttgaggaagtcccaaatattgagatacctctacatacaataattgagatacaaatgggtgttgctggtgttcaagagaaacggtacaaactcatggatgcaatccatcccacagcggggttgtaagaaataataaatggagctcgccttctaaaagcaatggtagcacaaataaattttgtgatgatatacgtatcacaacattaatcaattataagctatagttcgaggtggaatgtcacaccactaggtttagctcatagatgatttgccatttgacttacaagttttggctggttgtgtagtgtgtactcttaattcatgagttctgaacatgtttaattcagatccgagttctgagcaagtttattcaggccaaagctcgcgccaaagacagtttttccagtaacgaa

SEQ ID NO: 1392 - DNA, 2424 bp, Zea Mays
ccggcaccttccaaagttccaacttccaagtcacgagaaaggtttcgcttcgaaactcaaccggagatggcgagctctggcggaatctccgaccagctcttcgtctccgtcaagttagagagcccgcacctcgcggagctcgacctcgccccccacctcttcggctcccaccctgtggctggctcgtgggacccctgcaaggccctgcctttggagcgggcggccaccgccgtgtgggagttcagctgcgtcgtgccttcgcagcacgaatcgctggatttcaagtttgttttgaagcgaaaaggtgataatcctcaatacattattgaggagggacctaaccgaccattgggttgccagagaaatgaatttgagatggggaatgcgttgtttaaactcaacgaagggaaggaggtacttgagtgcaaggttcaggttgagacagaaatgttatccccaattgacttggcggctagttggagagctcatcaggagtattttcagccttcaagggtgcgggggactcacgatgtcactatcaaccctgggttagaaggcagggccaagaatggcttcgcttctggtttggagcttgatttagacaagtatgtagttccaacaccaaacatgggctcaggtgttgtttatgcagctagtttgactgaaaatccacgctcattattgcaaactgggagttcctcaaacaatgataccacaaaggacattttgcacaactcaactaaaggcgattcatccttgaatcactatgttaacactatgaagagcacaattggagggcatgcatcgtcactggaagaacaaagggcaatgtttgttgatagaggggttggctcaccaaattttgcaagaccaacaatggaaaccttttcgatgagcaactttaagttggattctgaatcaaaggttgggctaccagctcgaggtaagacctttacagcagctaaacttacaagatatctccgatggttaggtcatgaaacaaaacacttcaatgttggaaagtaccgccggctcaagcatggaactaatcagactgctgatttctttcgtggagataacagggagggtgtggaggcacgtaacgaggtggctgcattagcaatggaagatatgctatcttggatgcaggagggtggtcaggttggtattttcgatgccacaaacagcacaagaatacggaggaacatgctgatgaaaatggctgaaggaaaatatcatctttttggaaacattatgtaatgaccaagatgttcttgagagaaatatacgattgaaagttcaacaaagtcctgattatgcagagcaaacagattttgaagctggtgtacaagatttcaaagagcgattgacctattatgaaaaggtctatgaaccggtggaagaaggttcttacataaaaatgattgacatggttagtgggaaggggggccaactaaagattaatgacataagtggttacttgcctggacggatcgttttcttcttggttaactgtcatctgacacctcgtcctatcctgctaacaagacatggtgaaagtatggataatgtcagaggaagaatcggtggagactcttctttgagtgaggccggtgagctttattcaaggaagcttgcgagctttgtggagaagcgactgaaatccgagcggactgcctctatatggactagcacactccagagaacaatattaacagcacatccgatcattggttttccaaagatacaatggcgtgctcttgatgagatcaatgctggggtctgtgatgggatgacatacgatgaaataaagaaaagtaaacctgaagaatatgaatcacgaagaaaagacaagctgaggtatcgttatccgagaggagaatcctatcttgacgtcattcaaagactagaacctgtgataattgaacttgaacgacagcgtgctccagttgtagtcatagctcaccaggctgtgttgagagcactttatgcatactttgcggacaaaccgcttgaggaagtcccaaatattgagatacctctacatacaataattgagatacaaatgggtgttgctggtgttcaagagaaacggtacaaactcatggatgcaatccatcccacagcggggttgtaagaaataataaatggagctcgccttctaaaagcaatggtagcacaaataaattttgtgatgatatacgtatcacaacattaatcaattataagctatagttcgaggtggaatgtcacaccactaggtttagctcatagatgatttgccatttgacttacaagttttggctggttgtgtagtgtgtactcttaattcatgagttctgaacatgtttaattcagatccgagttctgagcaagtttattcaggccaaagctcgcgccaaagacagtttttccagtaacgaa

SEQ ID NO: 1393 - DNA, 1994 bp, Zea Mays
ccggcaccttccaaagttccaacttccaagtcacgagaaaggtttcgcttcgaaactcaaccggagatggcgagctctggcggaatctccgaccagctcttcgtctccgtcaagttagagagcccgcacctcgcggagctcgacctcgccccccacctcttcggctcccaccctgtggctggctcgtgggacccctgcaaggccctgcctttggagcgggcggccaccgccgtgtgggagttcagctgcgtcgtgccttcgcagcacgagcacaattggagggcatgcatcgtcactggaagaacaaagggcaatgtttgttgatagaggggttggctcaccaaattttgcaagaccaacaatggaaaccttttcgatgagcaactttaagttggattctgaatcaaagggtatgccagcagcagaaggggctgttgcagcagctgctgtagctgatcagatgtatggaccaaaagaggaccgcaagttggccatcgtattggttgggctaccagctcgaggtaagacctttacagcagctaaacttacaagatatctccgatggttaggtcatgaaacaaaacacttcaatgttggaaagtaccgccggctcaagcatggaactaatcagactgctgatttctttcgtggagataacagggagggtgtggaggcacgtaacgagcaatggaagatatgctatcttggatgcaggagggtggtcaggttggtattttcgatgccacaaacagcacaagaatacggaggaacatgctgatgaaaatggctgaaggaaaatgtaagatcatctttttggaaacattatgtaatgaccaagatgttcttgagagaaatatacgattgaaagttcaacaaagtcctgattatgcagagcaaacagattttgaagctggtgtacaagatttcaaagagcgattgacctattatgaaaaggtctatgaaccggtggaagaaggttcttacataaaaatgattgacatggttagtgggaaggggggccaactaaagattaatgacataagtggttacttgcctggacggatcgttttcttcttggttaactgtcatctgacacctcgtcctatcctgctaacaagacatggtgaaagtatggataatgtcagaggaagaatcggtggagactcttctttgagtgaggccggtgagctttattcaaggaagcttgcgagctttgtggagaagcgactgaaatccgagcggactgcctctatatggactagcacactccagagaacaatattaacagcacatccgatcattggttttccaaagatacaatggcgtgctcttgatgagatcaatgctggggtctgtgatgggatgacatacgatgaaataaagaaaagtaaacctgaagaatatgaatcacgaagaaaagacaagctgaggtatcgttatccgagaggagaatcctatcttgacgtcattcaaagactagaacctgtgataattgaacttgaacgacagcgtgctccagttgtagtcatagctcaccaggctgtgttgagagcactttatgcatactttgcggacaaaccgcttgaggaagtcccaaatattgagatacctctacatacaataattgagatacaaatgggtgttgctggtgttcaagagaaacggtacaaactcatggatgcaatccatcccacagcggggttgtaagaaataataaatggagctcgccttctaaaagcaatggtagcacaaataaattttgtgatgatatacgtatcacaacattaatcaattataagctatagttcgaggtggaatgtcacaccactaggtttagctcatagatgatttgccatttgacttacaagttttggctggttgtgtagtgtgtactcttaattcatgagttctgaacatgtttaattcagatccgagttctgagcaagtttattcaggccaaagctcgcgccaaagacagtttttccagtaacgaa

SEQ ID NO: 1394 - DNA, 1914 bp, Zea Mays
ccggcaccttccaaagttccaacttccaagtcacgagaaaggtttcgcttcgaaactcaaccggagatggcgagctctggcggaatctccgaccagctcttcgtctccgtcaagttagagagcccgcacctcgcggagctcgacctcgccccccacctcttcggctcccaccctgtggctggctcgtgggacccctgcaaggccctgcctttggagcgggcggccaccgccgtgtgggagttcagctgcgtcgtgccttcgcagcacgagcacaattggagggcatgcatcgtcactggaagaacaaagggcaatgtttgttgatagaggggttggctcaccaaattttgcaagaccaacaatggaaaccttttcgatgagcaactttaagttggattctgaatcaaaggttgggctaccagctcgaggtaagacctttacagcagctaaacttacaagatatctccgatggttaggtcatgaaacaaaacacttcaatgttggaaagtaccgccggctcaagcatggaactaatcagactgctgatttctttcgtggagataacagggagggtgtggaggcacgtaacgaggtggctgcattagcaatggaagatatgctatcttggatgcaggagggtggtcaggttggtattttcgatgccacaaacagcacaagaatacggaggaacatgctgatgaaaatggctgaaggaaaatgtaagatcatctttttggaaacattatgtaatgaccaagatgttcttgagagaaatatacgattgaaagttcaacaaagtcctgattatgcagagcaaacagattttgaagctggtgtacaagatttcaaagagcgattgacctattatgaaaaggtctatgaaccggtggaagaaggttcttacataaaaatgattgacatggttagtgggaaggggggccaactaaagattaatgacataagtggttacttgcctggacggatcgttttcttcttggttaactgtcatctgacacctcgtcctatcctgctaacaagacatggtgaaagtatggataatgtcagaggaagaatcggtggagactcttctttgagtgaggccggtgagctttattcaaggaagcttgcgagctttgtggagaagcgactgaaatccgagcggactgcctctatatggactagcacactccagagaacaatattaacagcacatccgatcattggttttccaaagatacaatggcgtgctcttgatgagatcaatgctggggtctgtgatgggatgacatacgatgaaataaagaaaagtaaacctgaagaatatgaatcacgaagaaaagacaagctgaggtatcgttatccgagaggagaatcctatcttgacgtcattcaaagactagaacctgtgataattgaacttgaacgacagcgtgctccagttgtagtcatagctcaccaggctgtgttgagagcactttatgcatactttgcggacaaaccgcttgaggaagtcccaaatattgagatacctctacatacaataattgagatacaaatgggtgttgctggtgttcaagagaaacggtacaaactcatggatgcaatccatcccacagcggggttgtaagaaataataaatggagctcgccttctaaaagcaatggtagcacaaataaattttgtgatgatatacgtatcacaacattaatcaattataagctatagttcgaggtggaatgtcacaccactaggtttagctcatagatgatttgccatttgacttacaagttttggctggttgtgtagtgtgtactcttaattcatgagttctgaacatgtttaattcagatccgagttctgagcaagtttattcaggccaaagctcgcgccaaagacagtttttccagtaacgaa

SEQ ID NO: 1395 - DNA, 2437 bp, Zea Mays
ccggcaccttccaaagttccaacttccaagtcacgagaaaggtttcgcttcgaaactcaaccggagatggcgagctctggcggaatctccgaccagctcttcgtctccgtcaagttagagagcccgcacctcgcggagctcgacctcgccccccacctcttcggctcccaccctgtggctggctcgtgggacccctgcaaggccctgcctttggagcgggcggccaccgccgtgtgggagttcagctgcgtcgtgccttcgcagcacgaatcgctggatttcaagtttgttttgaagcgaaaaggtgataatcctcaatacattattgaggagggacctaaccgaccattgggttgccagagaaatgaatttgagatggggaatgcgttgtttaaactcaacgaagggaaggaggtacttgagtgcaaggttcaggttgagacagaaatgttatccccaattgacttggcggctagttggagagctcatcaggagtattttcagccttcaagggtgcgggggactcacgatgtcactatcaaccctgggttagaaggcagggccaagctagtttgactgaaaatccacgctcattattgcaaactgggagttcctcaaacaatgataccacaaaggacattttgcacaactcaactaaaggcgattcatccttgaatcactatgttaacactatgaagagcacaattggagggcatgcatcgtcactggaagaacaaagggcaatgtttgttgatagaggggttggctcaccaaattttgcaagaccaacaatggaaaccttttcgatgagcaactttaagttggattctgaatcaaagggtatgccagcagcagaaggggctgttgcagcagctgctgtagctgatcagatgtatggaccaaaagaggaccgcaagttggccatcgtattggttgggctaccagctcgaggtaagacctttacagcagctaaacttacaagatatctccgatggttaggtcatgaaacaaaacacttcaatgttggaaagtaccgccggctcaagcatggaactaatcagactgctgatttctttcgtggagataacagggagggtgtggaggcacgtaacgaggtggctgcattagcaatggaagatatgctatcttggatgcaggagggtggtcaggttggtattttcgatgccacaaacagcacaagaatacggaggaacatgctgatgaaaatggctgaaggaaaatgtaagatcatctttttggaaacattatgtaatgaccaagatgttcttgagagaaatatacgattgaaagttcaacaaagtcctgattatgcagagcaaacagattttgaagctggtgtacaagatttcaaagagcgattgacctattatgaaaaggtctatgaaccggtggaagaaggttcttacataaaaatgattgacatggttagtgggaaggggggccaactaaagattaatgacataagtggttacttgcctggacggatcgttttcttcttggttaactgtcatctgacacctcgtcctatcctgctaacaagacatggtgaaagtatggataatgtcagaggaagaatcggtggagactcttctttgagtgaggccggtgagctttattcaaggaagcttgcgagctttgtggagaagcgactgaaatccgagcggactgcctctatatggactagcacactccagagaacaatattaacagcacatccgatcattggttttccaaagatacaatggcgtgctcttgatgagatcaatgctggggtctgtgatgggatgacatacgatgaaataaagaaaagtaaacctgaagaatatgaatcacgaagaaaagacaagctgaggtatcgttatccgagaggagaatcctatcttgacgtcattcaaagactagaacctgtgataattgaacttgaacgacagcgtgctccagttgtagtcatagctcaccaggctgtgttgagagcactttatgcatactttgcggacaaaccgcttgaggaagtcccaaatattgagatacctctacatacaataattgagatacaaatgggtgttgctggtgttcaagagaaacggtacaaactcatggatgcaatccatcccacagcggggttgtaagaaataataaatggagctcgccttctaaaagcaatggtagcacaaataaattttgtgatgatatacgtatcacaacattaatcaattataagctatagttcgaggtggaatgtcacaccactaggtttagctcatagatgatttgccatttgacttacaagttttggctggttgtgtagtgtgtactcttaattcatgagttctgaacatgtttaattcagatccgagttctgagcaagtttattcaggccaaagctcgcgccaaagacagtttttccagtaacgaa

SEQ ID NO: 1396 - DNA, 1577 bp, Zea Mays
caatcgattgagcagcagcacaaacatcacacgctcctcacggccgcacccaaccggactcgcctcgcctccctttcgaaccagcctctctctccgccagcgcggatgtcgtcgtcgcgccgccgcccgcccccgccgccgccggcgtggacgcccgagccgtggagcgacggggagacgtccgcgctgctcgacgcatggggcccgcgccacctccgcgcgtgcggcggcgcgctccgccccgccgactggcgggcctgcgccgacgccgtcacctcccgccgcgccgcggccggccgggccccgcgcaccgtcgaccagtgcaagaaccgcctggattatctcaagaagcgcctcagggccgagcgctccaggcccaagggggccccgccgacgccgccgccggtctcggggtggctcacccgcctccgcgcgctgctgcacctcgccccctccgctcctcccgggttcgcgcaccgtcttggcgccaaaacgcccaaggtggaggaggaggaggaggtgttggacgagaagccgagcggcggggctcctctgccccgctactggccgccggtgccgaagcggccgaggacggcggtgtcgctgtcgccgttgaccgccgcctccggggaccaccctggaggcggtgggaggaattgcacggaagtggcggcggctctggataggcttgccgggacgtacgagcgggtggaggccgccaagcagagggaggccacgcggctggaggagcggcgcctggaggcgatgcgtgatctcgagatcgagcgcatgcggctcctcgtcgacgtcgccgtcaccgcctccgtcgttgtcgatggcgccgccgcgaccgccacaaccgccaccggcgacttctagttggtgagagggacttggataactggctggccaaggtagccaattccagcctatatgtttttttcttcaaagagacgatcgcatcatggagatagaggtcacttgatgtgatgttcttctacaaagttaaatcggtttaggttacaggaaaagcttagccagatgtaggatagcacatggtgagatttttttagttctttgattgcaggtctgcagcaactgaaaaggggggagaatagcctgaaaagtatcttcgttaatgtttagctatcctttggtaactagtgctgtaatccctcttgatttacagctgttcggctgctcagttgagagacattctgatcatccagtacatatgataccttggatgctttgtctgatgctatattgcttatgattatgttgctcagcctatgatcatcactctgctaatgataggcaacgtgcttctggcgccgtggtgcatgttatgtactttccctgccattcatcactctaatggttggagaaggctgacaggcgataacggttccccagcagaacagcggtgcaaagatcgatcagagaaagataggcgtttcagaattttcagggcgcttcagaggtcacaacgtatatcttttttccaatacaataaaagcctgtttttcaatgtaacagagatcttacaggttccatataacctttatacatttctg

SEQ ID NO: 1397 - DNA, 1479 bp, Zea Mays
ccgccagcgcggatgtcgtcgtcgcgccgccgcccgcccccgccgccgccggcgtggacgcccgagccgtggagcgacggggagacgtccgcgctgctcgacgcatggggcccgcgccacctccgcgcgtgcggcggcgcgctccgccccgccgactggcgggcctgcgccgacgccgtcacctcccgccgcgccgcggccggccgggccccgcgcaccgtcgaccagtgcaagaaccgcctggattatctcaagaagcgcctcagggccgagcgctccaggcccaagggggccccgccgacgccgccgccggtctcggggtggctcacccgcctccgcgcgctgctgcacctcgccccctccgctcctcccgggttcgcgcaccgtcttggcgccaaaacgcccaaggtggaggaggaggaggaggtgttggacgagaagccgagcggcggggctcctctgccccgctactggccgccggtgccgaagcggccgaggacggcggtgtcgctgtcgccgttgaccgccgcctccggggaccaccctggaggcggtgggaggaattgcacggaagtggcggcggctctggataggcttgccgggacgtacgagcgggtggaggccgccaagcagagggaggccacgcggctggaggagcggcgcctggaggcgatgcgtgatctcgagatcgagcgcatgcggctcctcgtcgacgtcgccgtcaccgcctccgtcgttgtcgatggcgccgccgcgaccgccacaaccgccaccggcgacttctagttgagggacttggataactggctggccaaggtagccaattccagcctatatgtttttttcttcaaagagacgatcgcatcatggagatagaggtcacttgatgtgatgttcttctacaaagttaaatcggtttaggttacaggaaaagcttagccagatgtaggatagcacatggtgagatttttttagttctttgattgcaggtctgcagcaactgaaaaggggggagaatagcctgaaaagtatcttcgttaatgtttagctatcctttggtaactagtgctgtaatccctcttgatttacagctgttcggctgctcagttgagagacattctgatcatccagtacatatgataccttggatgctttgtctgatgctatattgcttatgattatgttgctcagcctatgatcatcactctgctaatgataggcaacgtgcttctggcgccgtggtgcatgttatgtactttccctgccattcatcactctaatggttggagaaggctgacaggcgataacggttccccagcagaacagcggtgcaaagatcgatcagagaaagataggcgtttcagaattttcagggcgcttcagaggtcacaacgtatatcttttttccaatacaataaaagcctgtttttcaatgtaacagagatcttacaggttccatataacctttatacatttctg

SEQ ID NO: 1398 - DNA, 579 bp, Zea Mays
gagtccgtctgccacgttctccccctatcctccctgctggttgaaagaacttcaccaaaagtgtcccaaggaaatggatgaatatgctggttgcatgtattactacaccaacgaattcgacttctgccgtaaggagcagcaagcttttgaggaagcctgccccatttccgagtagatcttgagagttttacttgcagtggtcttcgcaaataagggaaaaaaggcagaaaaacagcgttcatgatatcccatgtttgttgtcctcatggaatttgtactggtgaatgaatagcacagcctggagctattcaccccatttgccgcccctcaggattttagagcaggcgaatgctctaaaatggtgatgatggtgttttctctttatggttcacaaattacatttggcggactcgctgttatttctgtctgtcccgagtgtgttaacccgctaatctgatcttctgctctggacttccacaaggctatggcacaactacaatgtactcctacatcatatcgtctcaaatctgaatagtctgtactctgtacagactacagaaaaaaaacattcattgcctt

SEQ ID NO: 1399 - DNA, 600 bp, Zea Mays
tcacagctccatttcttctagtagaaggctaagaacctccctactttgttgatcttccatgttgaaagaacttcaccaaaagtgtcccaaggaaatggatgaatatgctggttgcatgtattactacaccaacgaattcgacttctgccgtaaggagcagcaagcttttgaggaagcctgccccatttccgagtagatcttgagagttttacttgcagtggtcttcgcaaataagggaaaaaaggcagaaaaacagcgttcatgatatcccatgtttgttgtcctcatggaatttgtactggtgaatgaatagcacagcctggagctattcaccccatttgccgcccctcaggattttagagcaggcgaatgctctaaaatggtgatgatggtgttttctctttatggttcacaaattacatttggcggactcgctgttatttctgtctgtcccgagtgtgttaacccgctaatctgatcttctgctctggacttccacaaggctatggcacaactacaatgtactcctacatcatatcgtctcaaatctgaatagtctgtactctgtacagactacagaaaaaaaacattcattgcctt

SEQ ID NO: 1400 - DNA, 595 bp, Zea Mays
agaatatgaaaaaaaaaacacctgttgaggctgacatgtgtattctgtgccacatgttgaaagaacttcaccaaaagtgtcccaaggaaatggatgaatatgctggttgcatgtattactacaccaacgaattcgacttctgccgtaaggagcagcaagcttttgaggaagcctgccccatttccgagtagatcttgagagttttacttgcagtggtcttcgcaaataagggaaaaaaggcagaaaaacagcgttcatgatatcccatgtttgttgtcctcatggaatttgtactggtgaatgaatagcacagcctggagctattcaccccatttgccgcccctcaggattttagagcaggcgaatgctctaaaatggtgatgatggtgttttctctttatggttcacaaattacatttggcggactcgctgttatttctgtctgtcccgagtgtgttaacccgctaatctgatcttctgctctggacttccacaaggctatggcacaactacaatgtactcctacatcatatcgtctcaaatctgaatagtctgtactctgtacagactacagaaaaaaaacattcattgcctt

SEQ ID NO: 1401 - DNA, 1671 bp, Zea Mays
ctgctctccacctgacctgctttcgttttcgtatatgtgccagcagtccagcagcaccaacttgtccacactcgacactgtgttgattgagaccttagctctagcggtttcgtttccggatggaggattcggtgggcgcggatgagaggagggagcagagcgagacgatgccgcacaaaaaggcgcgccaagaagtagcggaggccggtggtgttggcggcggcggcggcggcaagccagctgaggagggcgggttcctgagcgctgtggcgtccaagatcggcgcaacgatgtccggggccaatggcgggagcggcggcgaggtcggtgcggccatggcgtccgacggcgaggagggaaagagggacggtgacggcgagccaggtgaggagggcgggttcctgagcgccgtggcgtccaagatcggcgcggcgatgtccggcgctaacggtggcagcggcggcggtggcaatgcggccgcggcgtctggcggcgaggacaaggaggcggacggttttaccggcggcgtaatcttccggaagctgctgcacagctcgccccctgcgccgccgcatgtgtcaggtaaggaccaaggagtatcttgttctccggcctccgagtccgagctcagggaatgttacggacccgttcggttataccggaataagacaggattcattccagatcatcaaaatctatataaattagagaagtaatccggctaggaattaatccggggctccaatccggaacaaccgaacagggcctacatctttgcagtgtaacctttttgattgaccgattgattcgtgtaggagcaatggaaacagaggaggaggtgaaagatcaggatgtggcaggtggcgagcaagccgggattctgagcgccatggccaccaagatcgccatggccatgcctggtgcaaacggtgacgacagccatggcggcagcggggacgacgctaagtcgagcaatggcgaagcggcccgtggcggcagtaacggtggagagaagcaggggagtgaatccaacggtggcgggatacttagcgctgtggcttccaggatcggcgtggccgtgtccggcgccaacggggaccgcagcggcagcgctgaggatggtgccaagacgagcgctggcgacgctggtcacggtagcaagggcgaggagaaggggcgtggtgtgaacggtggtagattagtcgagcagatcatttccaatctgccctcagatgatcaggcgcctgatgccgatgaagcttccttgctcatcgccattatcgaagattagctccatgttccgaaggctctctaggtcgtcctcagcgccatgatcaaatcatcagctgagccggagactgaaaacaataaagaaaagcaagcagctggtcatagtaaacatcatgtagcgaggcttagcagattgggtttttttttccgttagaatcagtccacatgtccttgacacgggctagatttgttctaggattatttttccagtagtaagccatgtgtccatggacagtccactgcgcgacgtctaatgtaacaacatcatcaaggttcttttgactatcccataagaaaccattccttgagacaaccgatattgtgagttgataaccatgtatcacttccttttctcttttatactatgaaaagatcttacat

SEQ ID NO: 1402 - DNA, 1836 bp, Zea Mays
cttgagcctcgtgactgccgatgccgagtgccgatgcggaagcggaacaaacgcccaaatggtttcccaactcctacagtccaactccaacagtccaactccaggcgcgcgcaagcggacggaggcatcgaggctttccttttcgccgcagcggtcgtctactcgtctcccggccacaagcagaaaagctgacacgctcccgctcatcctcggttgcgctgccgctgcgaatgccgcctccgggaccccgcctgccgctgcttctccttatcctcctcctccttggggccgcctgcagctgcggcctcacagtcacaggtgcgggggaaggcggctcctgcgagttctccgtcgcgcgcggcagcgagctctacagcttcgacctcgcggcgccgacgccggcgcaccgccacggcgtgctcagcgaggacgggttttacaaggtggctgtgaatgattccatactctggttccagctttgtgatgaaatgctattcaactttgacccacctatgtgccttaattgtgaggattgtggtggtcctttgaggtgtggaactcagtgcagtgcacttgtgtcaaataatattggagggtatgatgtctgcacaaccattggaggattatctaaatcccatatatctctagttgaatagatgagggtaatcctcggaagggtatcattgttaagatgttctcatcaaagtgttctatatctgtttccgttatttgcgattcaaatgcaatccaagtaccagacaaattcgtcctatctggtctttgtgattatgctacaacacttgaacacccttctggttgtccaaggtctgtttctgcttctggaagtggctggggatggctaagcactctgttcataacgtatgttattttgagctgtatacaatcatgtgaatctggaacttgttatatcagacaactgatctgcagtaggaagaaactgagtctagctcagctactggaaggtgtgggtatacaccctaacctccctggttcaagtctattttaccttgaatctgggtgcctatttgctttgtaatacaaaaatatagtcttgtttgcgagtttccatcgtcatagagtttcaactttgttcttttagtagttctcagcttgaataatacctatttttcggcagaattctgtgccttcttggagggtacattttgattggagcagtttacagatattatttccttggcattcattctgtagaggccattccgaacctggaattttggattggtttgccccaacgaattaagactgtctttgttcctgcaacaagaagtcatgtaagttatagcagagatggtctaggcacagatgcccctgtataccattgagaaggtgaacattcaagaaacttcagacatacagttaagcacatgtatggactggacatcgggatgaaactttgttcttgccaagatacaggtatgcaagtgggacttaaattgtgaaagggatggagtatttgaatgccatgcaacaagagttctggtgaaattattgtaattttgaacatgtaccatcatcaacataaaatgtgacagaggttgctgtacagttccggaatcttcatgttcatcccgtgagctaattttcccaaatgctgcagcacaaatctacactgtttagagggttgatagcatgtttttcttgaatcacaacatgttattatgcaaatgactggctggatttggaaccatgaaacaaactagtttgacatgctttgttatgaagttatcttagcttgctgcttgggaactgttgacgtcttttcggagcgccaaatactcaagaagaaccggcggc

SEQ ID NO: 1403 - DNA, 1500 bp, Zea Mays
cttgagcctcgtgactgccgatgccgagtgccgatgcggaagcggaacaaacgcccaaatggtttcccaactcctacagtccaactccaacagtccaactccaggcgcgcgcaagcggacggaggcatcgaggctttccttttcgccgcagcggtcgtctactcgtctcccggccacaagcagaaaagctgacacgctcccgctcatcctcggttgcgctgccgctgcgaatgccgcctccgggaccccgcctgccgctgcttctccttatcctcctcctccttggggccgcctgcagctgcggcctcacagtcacaggtgcgggggaaggcggctcctgcgagttctccgtcgcgcgcggcagcgagctctacagcttcgacctcgcggcgccgacgccggcgcaccgccacggcgtgctcagcgaggacgggttttacaaggtggctgtgaatgattccatactctggttccagctttgtgatgaaatgctattcaactttgacccacctatgtgccttaattgtgaggattgtggtggtcctttgaggtgtggaactcagtgcagtgcacttgtgtcaaataatattggagggtatgatgtctgcacaaccattggaggattatctaaatcccatatatctctagttgatgagggtaatcctcggaagggtatcattgttaagatgttctcatcaaagtgttctatatctgtttccgttatttgcgattcaaatgcaatccaagtaccagacaaattcgtcctatctggtctttgtgattatgctacaacacttgaacacccttctggttgtccaagaattctgtgccttcttggagggtacattttgattggagcagtttacagatattatttccttggcattcattctgtagaggccattccgaacctggaattttggattggtttgccccaacgaattaagactgtctttgttcctgcaacaagaagtcatgtaagttatagcagagatggtctaggcacagatgcccctgtataccattgagaaggtgaacattcaagaaacttcagacatacagttaagcacatgtatggactggacatcgggatgaaactttgttcttgccaagatacaggtatgcaagtgggacttaaattgtgaaagggatggagtatttgaatgccatgcaacaagagttctggtgaaattattgtaattttgaacatgtaccatcatcaacataaaatgtgacagaggttgctgtacagttccggaatcttcatgttcatcccgtgagctaattttcccaaatgctgcagcacaaatctacactgtttagagggttgatagcatgtttttcttgaatcacaacatgttattatgcaaatgactggctggatttggaaccatgaaacaaactagtttgacatgctttgttatgaagttatcttagcttgctgcttgggaactgttgacgtcttttcggagcgccaaatactcaagaagaaccggcggc

SEQ ID NO: 1404 - DNA, 1807 bp, Zea Mays
cgagtgccgatgcggaagcggaacaaacgcccaaatggtttcccaactcctacagtccaactccaacagtccaactccaggcgcgcgcaagcggacggaggcatcgaggctttccttttcgccgcagcggtcgtctactcgtctcccggccacaagcagaaaagctgacacgctcccgctcatcctcggttgcgctgccgctgcgaatgccgcctccgggaccccgcctgccgctgcttctccttatcctcctcctccttggggccgcctgcagctgcggcctcacagtcacaggtgcgggggaaggcggctcctgcgagttctccgtcgcgcgcggcagcgagctctacagcttcgacctcgcggcgccgacgccggcgcaccgccacggcgtgctcagcgaggacgggttttacaaggtggctgtgaatgattccatactctggttccagctttgtgatgaaatgctattcaactttgacccacctatgtgccttaattgtgaggattgtggtggtcctttgaggtgtggaactcagtgcagtgcacttgtgtcaaataatattggagggtatgatgtctgcacaaccattggaggattatctaaatcccatatatctctagttgatgagggtaatcctcggaagggtatcattgttaagatgttctcatcaaagtgttctatatctgtttccgttatttgcgattcaaatgcaatccaagtaccagacaaattcgtcctatctggtctttgtgattatgctacaacacttgaacacccttctggttgtccaaggtctgtttctgcttctggaagtggctggggatggctaagcactctgttcataacgtatgttattttgagctgtatacaatcatgtgaatctggaacttgttatatcagacaactgatctgcagtaggaagaaactgagtctagctcagctactggaaggtgtgggtatacaccctaacctccctggttcaagtctattttaccttgaatctgggtgcctatttgctttgtaatacaaaaatatagtcttgtttgcgagtttccatcgtcatagagtttcaactttgttcttttagtagttctcagcttgaataatacctatttttcggcagaattctgtgccttcttggagggtacattttgattggagcagtttacagatattatttccttggcattcattctgtagaggccattccgaacctggaattttggattggtttgccccaacgaattaagactgtctttgttcctgcaacaagaagtcatgtaagttatagcagagatggtctaggcacagatgcccctgtataccattgagaaggtgaacattcaagaaacttcagacatacagttaagcacatgtatggactggacatcgggatgaaactttgttcttgccaagatacaggtatgcaagtgggacttaaattgtgaaagggatggagtatttgaatgccatgcaacaagagttctggtgaaattattgtaattttgaacatgtaccatcatcaacataaaatgtgacagaggttgctgtacagttccggaatcttcatgttcatcccgtgagctaattttcccaaatgctgcagcacaaatctacactgtttagagggttgatagcatgtttttcttgaatcacaacatgttattatgcaaatgactggctggatttggaaccatgaaacaaactagtttgacatgctttgttatgaagttatcttagcttgctgcttgggaactgttgacgtcttttcggagcgccaaatactcaagaagaaccggcggc

SEQ ID NO: 1405 - DNA, 630 bp, Zea Mays
ctcgaaacgagaaaaactcggggaagaaactgcgaaaggaggccagaaggatgcagcgaggtgtgtgcggctgtgaacgcttctcaagcagctcaataggagacgtgtttagaacaatcataaagcgagatgggtattctgggctcatgaggggatggaagccaagaatgctgttccatgcacctgcagctgcaatatgttggtctacatacgaggcctcaaagtcatttttccaaaggttcaatgaggaaaggcggaaatagtctgggggcattacttttagacccatgtatttttttcttgaagtcaatgtacttctttctatacggaagcatactcgctcagctgaatgagaagacgcagctccaggatgcgtttgttggtgatccttgtgcccaagagctgccagcggttgactgagatctgtctaacgaagatctgtctgtgccactgtgttccttttcagataattcgatgtatttatttttcccagcctcggggtgaggaaataacactagaatatttctttttccagtttgatcagtcagcaagcttatctgtactgttgtatggcctcctgctctgtgccagatttttttatataattcaaaggctttggtttcgttgcaa

SEQ ID NO: 1406 - DNA, 742 bp, Zea Mays
cggggctagggttttaacgaagcatataagagctcccacccgtgcagacaaccacacctcctcgaaaccctagcgccggcgcctccacttcgttttcctcactctctcctccagctcagggtccggcggcgaagggaaggcaagatgtacaccgcgaggaagaagatccagaaggagaagggccttgagccctccgagttcgaggactccgttgcccaggctttctttgatctggagaacgggaaccaggagctcaagagcgacctcaaggacctgtacatcaacaatgctatccagatggatgttaccgggagcaggaaggctgtgtgggaaagatgtggtctttgagtaccctatgaccgaaaatgcataaatatgatgccctctggatatctccactctatttcgttgattctgaatgttatgttgggtctccctatgtacttcaaaaacatagttttgatgctaaagttgcctagcaatttggtacggggaagtggcagtggacgtgaacaatgttaagttttgagcatttaaattaaacctttgccctgataacgttgctgagttatttaatttcttgctttgttcgcggcttgtcagtctgttaaactgtttattttatttggcatagcctgaaggagtgaaatcaacagttgtcgtagttctaactgttttttttcttgctatgtcatataatacagtatgtttcaataaaatctcttaagaagagtcgatgtcc

SEQ ID NO: 1407 - DNA, 677 bp, Zea Mays
cttaccctgactaattcgacgcgatagtcgcaagcgcgactacgagttccggttgacgtcatccagggatcttcttttcttcggtaatcgattgctaaagatcttttcctcgactgaataattctgacaactcaaacttgagtcgcgtaggatgtccgagctttttgtcgcgcacttggtgaataccacgctgctagctttgtctttacccgattcttagggtttcttgatgacatacgaaacgacgacgtggactagggacataggaagttgcggccacggcatgggcaagatgacgacgaactctggttcaaataggtagcggagtcagcaacgagtaccaaggagacatcgacgatgttgctgatgaagataatagtgatagctaaagttgaagaccaaacgaaaccgcagttgcaggcgaacctgggacgacatttaaacatatggcgagcctaacaaactccatagtgagttgggaacagcgcccgatgacccggtgggacaggattttattgcgaccagagggaaacaaagatgacggggccaatctacgagatccaaatatcgcgcgagaagtatcaggggcaagcgcgcgcggcgctggacagttcagcgcggtgagctgagcagggagatgaaaagcggctgcgcgcagggcagagaacagctcggcg

SEQ ID NO: 1408 - DNA, 2864 bp, Zea Mays
actgcactaccctcgctccctctcgggtctcgggcggcccatcgatgctacctctatatatcgttccgtcctcgcacttggtcaccaccaccagagcagcaactagcaagccagccagccagccagccattgccgaccggagcgatggctaccatggcgaggtcaggtgccgtgaagctctgctgctgcacctccgctcttcttctgctctgctgcttcctcctcccaggcgccctcgccgaggagcgcttctacgagttcgtcgtccgggggacgccagtgaagaggctgtgcaagacccaggagatcatcacggtgaacgggcagttcccggggccgacgatcgaggtgtacagcggcgacacgctggcggtcagggccgtgaacctggccaggtacaacgtgaccctccactggcacggcctccggcagctgcggaacgggtgggcggacgggccggagttcgtgacgcagtgccccatccgccccggcggcagctacacgtaccgcttcaccgtcgaggggcaggagggcacgctgtggtggcacgcgcacagctcctggctccgcgccaccgtgcacggcgcgctcatcatccaccccaggaggggcgtcccctaccctttccccaagccacacaccgaggcccccgtcatcctagcggagtggtggaggagggaccccatcgccgtgctccgccagtccatgatcaccggcgcgccacccaacgtctccgacgccctcctcatcaacggccagccgggagacttgctcccgtgctccagccaaggtgtgagcgcccttgttaatttcgtccattcagttgctcatgttgttaaccaaaaccacaaggagacgatgcacgcacggcacaacatttcattaaagagaccaagacgacaatggcgattcaggaaacactagaaaatgttgcacaatttctagttttggatagaccgcccaaagcgactttcggtttggaaaaggcacatccttgcctctaatagtctaatcaggcataggtttcccctctctctctccaaaccgtacggcatggtaaataaacactactggcacttgtcatctgcagctaagttgcttccctggtggttggttgctctcttatattctgtcctactacaaactgacgatacgaagagacaatcttcagatgtgaattaatacaccacaaataataaaagattgtaaagaagaaacattctaaccaatttgcagcatgcaatgcgcaagatgtcacccactatgaccagcgatgatgcatgcttttctcctcctccagacctccacccctccccagctcacaactaattctttcgcgttgttcatgcatgcatgtgtcacccaacccaacaatgcagagacgagcatcatcccggtggtcgccggcgagacgagcctgctgcgcatcatcaacgcggccatgaacaccgagctcttcgtcagcctcgccggccacaggatgaccgtggtcgccgcggacgccatgtacaccaagcccttcgagaccgacgtcgtcctcctcggccccggccagaccaccgacgtcctcgtcactgcccacgcagccccgggacgatactacctcgccgcgcgcgcctacgcttcggcccagggcgttcccttcgacaacaccaccgccaccgccatcttccagtacaagaacgcccccggctgccccaccacctccggggcaggggctggagccggtgccggtgccggcaccttcagcggcccagtaggccggtcctctaggtcctccggctacctcggccgcgcagggccgcagccgatgctcccgttcctgccggcgttcaacgacacgaacacggcgaccgccttctcgaacaggctccggagcccagtgccggtgaaggtgcccggcccggtgacccaggaggtgttcaccaccgtggggttcgggctcttcaactgccgccccggcccgttctgccagggccccaacaacacccggttcggcgcgagcatgaacaacgtgtcgttccagctccccgacaccgtctccctgctgcaggcgcactaccaccacatccccggcgtgttcaccgacgacttcccggcgctcccgcccgtgttcttcgacttcacctcgcagaacgtcccgcgcgcgctgtggcagcccgtcaagggcacccgcctgtaccgcgtcaggtacggcgccgtggtgcagatcgtgttccaggacacgggcatcttcgccgccgaggagcaccccatgcacatccacggctaccacttctacgtgctggccacggggttcggcaactacgacccgcgccgcgacgccgccaggttcaacctggtggacccgcccagccgcaacaccatcggagtgcccgtcggcggctgggccgtcgtgcgcttcgtggccgacaaccccggggtgtggctcgtgcactgccacatcgacgcgcacctcacgggagggctcgccatggctctgctggtggaggacggcgagtccgagctcgaggccaccgtggcgccgccgctcgacttgcccatctgcgtgctgtagagatttttcagtttgttgctggcgtgcgtcactacgtggagttacagggaggctgtgtcctgtgtgcatcgttctgtgtgtttgcatcggtagttgggcatttgcattcttggatttccatttgaatttgcaaaggaaaaggggaagtaaagtagtatatgactgaatacggatcacgctcatcggctttatttccgcaatgggctttcttgagactactatgtgacctgggccttccaaattagagtcagaggcctatttgagtgtttactactttcaatatacatgaaaattgggctaactgttc

SEQ ID NO: 1409 - DNA, 504 bp, Zea Mays
tgcagttcgaccgctacgaggagtacaggtacctgcttgcaatcgtgtcgctggggttactctactcgctggcgcaggcggtgcggcgcgcgtaccggatgcgcggcggcgccgaccccgtctcctcagcatctgggaggcttctcgatttcgtcggtgaccagttgtcaataactttacagacgcaaccgctgcagcaatcagcatggccttctttgcatttgtagctcttgccttgtcagcagtggtttctggttacaagctctccaaacaaacatacatgtgaatcatcgttctagaagtaaaacccattaggtggaatattcattatggattgcaatccaaagaagagaagcctctgatgcctctcttcaacttggatgtcatctgttatgtgctaaggtgattgttgttgcttgcagtaggttccatgtgtgtacatagaattatgcgtggcattcctgaatatgattgttttcctttcttaagtattgttgtcatgat

SEQ ID NO: 1410 - DNA, 3312 bp, Zea Mays
agaaagtttaaaaaaatggtgatggcattattggagaaaaaaaatcttatgttttctttacgacttgaaaaaaaaaacttatatgtatacgaacgggacttcagaagtgactcccagaatgactctacactatgtatggtacagtacacagctgcaacacaggtaccaaggtggagtgtatgcctagtcctactcttgtcgtcgctcattcatcagtggaggcagcggtggcctcatggggtggtacgtggccgacctctccatggcagcagcggcttcgaccatctccagtcccagcgagctcgtcaccccgccggcgtcctccgcgtcgtcgagcttaggcgggcacgacatgctccgtgtgtacgtcgtggttgacgcctcgcgcgggagcggcaaaagcacggggcggccctccccgttgcgcgcgcccaggatggccacgaatcggtcgtcctccacgtcgtagaagttggcggtccgcacctcctgcgccagcgcgcaggtccagcagaacagccacttggcgcagtcgcccacggccgcgctgccgcaccaccaccaggagcggccgcccgggagcttgtagcgcttccgcatctgggaccgccagaagccgccgtacaggaagccgcagaagcccaggagcacgcccacggccaccaccgtgtcgcggatttcgtcgtcgtggatgttgagcgccgtcacgctgaagatgaggaacggcgccacgaatagcaggatgaaggtgaaggcatgcacgtacatgttgccgaacccgaggcgctccatgttccagccgaagacacagaaggtgcacgtcgccgacagcgcgcacaccgtcccgtcgtcgcagcagtcgaacagcccgccgctccactccgggctgctcaccaccacgcggcggttgtatatcgtgatctctacgccgtcgttctcggtacggctggtgtggtggtcctgctgcgccgcatcggccggcgccgccgacgacgactcggtgtcgggctccttccgtccaagcgggctgtacgcggtgtagaggccagcgacgacggggcagcccgtgccgaggccgtagccgatgttgagcgcccagtccgggcggtccttgcgcgtgtagctccagaacagggcgcagcagtagtactgggcgaagcaggtgacgtgcagcaaggccacgacgaggagcatgtgcgcccggtcgtgcgggcgcgcggcgccgtccttgcagtacaccttcctgatctcctcgcggtcgccgtcggggcgccaccggaggagcagcaccaggtggtggaagatcttggggtgctggtacaggcacatgatggtgaagagcgcgttgaggatctggttgatcacctccgtccacttcttgcgccgctcgtcgtcggggatggcggcgtcgagcatgccggtcatgagcatgaggagcagcagcagcccggcccccacgaacgccagccagatgatcatcgcgaagttctcgggcttcctgcaccagctcaccgcgtaggtccacagcttgcgccacttgatcttgcgcacgaacggcacgcggaaccgcctccgcgggccgcggcgcccgccgtcgtccgagccgtcgtctgccgactcctggtggccgtggctcctccggcggaggcggccgacgaaggtggagcgcaaaaaccagtccttggacgggtgggcgcggaggaagtccagaaaccgccgcttgcgccggctctcgctgagcgcgccccgctccacggacgggatgtagatatcgatggggatgaagtccatcagcctggctgtcgtccccgacggcgtgccaggctcgccgacaacctcgacgatctcgtgcccgtcgaagctgccattcgagtccggaggcatctcgactctgtgtcgaactcctctgccagacagtagcagcagtacgtgcttcgagatttcagaacatgatgtcgtatgcgctatgtgcaacttcaacttcaactgcaaagagacattcagatagcatcatacaagtaaagacgttagatctgagcaataataaataagtagaggtatttgtcaacagtcacacagagacagcagcacaaccaaaatgaccaggtcactgacttggaccttttgactgaccgtttcgtccatttctcttactgctgtaacaaggtttctgtagctaaaccacagggtcaaacatggttggcctactaattcgccatttttttggtgggggttgtgcactaccttgtagatacagtatctatgctatgcccgcctcatagctacacacagacacagtatctatctatggtcagactcgtgtacagttctgcatcacacatgcatcaccgtggcatggcccccctggaaggaatgtactgcaaagtcatttactgagacggttcagagtaggatgcagttcggtaaaccaaaccgaattgcagtttttttcaaagccggcttggaccacggcgacatcgtgccacacagagcacagggtgcaatgcaacagccgtgcagtggtctgaagctctgagctctgtctgaaggttcaaggagcatccacgcatctcttctacccctggagccctggccctggcccttccccgggtgcaatggtcaagccttgcagcaaaagctacctttatgtcaattttatctctcactctcttcttcagttataaacatatcatggcgcgaaagcagctttggtctgcctgccacaaaagaacgcgtagaataggtgtcgagtgaacgagtggccaaaagctcaaccatttggttgctgccatccatgttacgtagctaatgtcaccacgcgcacggatctcagctgctttgggcggcctggcgcttttgtttggcaagcaatgggggcatcactatcgctagaggggcacagtggtggaattgctttaaaaaaaacgcatgcgggaaagaacctggcttggaggaagaagagaaataaagccgaatcaacagccaaggcacgtcgctctgccgatcgcccagaatctcacgctactgcacggacgttgccgaaaaaaaaaactggtgtcaaggggatgatggaacttccagatactcagcatccgtggcgagatgagaagtcaaaacaagaacaccgaacgttgaccaaaaaaaaacaagaacccaaccatctctctagtctctaccagcgcgcgcagcagaaattcagagctggagctggatcaaaaacgaagcaggaagagaaggagcacgcaccctgcagagctcagcacctcatccccgagtcctcgtcgccactcgccatgcatgccccgaagacgc

SEQ ID NO: 1411 - DNA, 1718 bp, Zea Mays
aaaaactcacatcgttccctacaccctactccctccgtcagccagcgaagttccttcagtcactcaacaccttacgtccctagccatcctccgccgcctccgtctctgcttccctagagccgtcgcgatggcagcagcccctgccggtgcccctgcaatcaccgcatcctcctcctttgtttcttcgtctccgttctgtctcaaggcatcgatgaccagccagcgccgacccgcggggagagtctccatcgtcatccgctgcgtcagtagcccgccggccgtcgacacatctttcaagactaatgtcccgcgcaatgctaatatggccaaactccaagcaggatatttgtttcctgagattgccaggagaagagccgctcatttgctgaagtttccagatgccaaaattataagccttggaataggcgacactaccgagcccattccaaatgtcataacaaatgccatggcagagagagcacatgccttgtcaacaattgatggctacagcggttatggagctgagcaaggtgaaaagaaactcagagcagcaattgctgcaacctactatgcggaccttggtattgaagattcagacatatttgtctctgatggtgccaaatgtgacatatctcgcttgcaggcatatgttgattcaagtgttatcatggggcaaactgatttatatcagcaagacgttcagaagtatggaaacattgagtacatgagatgcggtccagaaaatggattttttcctgatctgtcaactgtccctaggacagatattattttcttttgttcacccaacaatcctactggtgctgctgcatctcgggaccaactaaccaaattagtaaaatttgcaaaggacaacgggtccatcatagtctatgattctgcttatgcaatgtacatatcagatgacagcccaaagtctatctttgaaattcctggagcaaaggaggttgctattgagacagcctcattctcgaaatacgctgggttcacaggtgtccgtctaggttggactgttgtccccaaggagctccttttctcggatggacatccagttgctaaagatttcaatcgcatagtttgcacttgcttcaatggtgcatcaaacattgcgcaagctggtggtttagcctgcctctctccagacggtctaaaggctatgcaagatgttgttggcttctacaaggagaacactgaaataatcgttgagacatttacatcactcggattcaacgtgtatggcgccaagaacgctccatacgtatgggtgcacttccctggccgcaattcgtgggatgtgttcgctgagatcctggagaaggccaatgtggtcactactcctggcactggatttggaccgggtggcgaaggctttgtgagggtcagcgcgttcgggcacagagagaacatcattgaagccgcaaggaggttaaagcagctgtataagtgagcaccgatgcagcttctgtgccctcctagacagatgtatcaataagaacacatcagggcaccaaaaatcgcttggtgaagctgccagaagatgttagattttgaacttttttttttaattctcgtgcggtgtctacattcaaaccatttcgaactctagacaatgcttgttgtaatcctgagacccttcattcactggtgaagttgtgattgtcttgtctgtgttcatttttgtgtcctgctgttgctgtttc

SEQ ID NO: 1412 - DNA, 1510 bp, Zea Mays
aaaaactcacatcgttccctacaccctactccctccgtcagccagcgaagttccttcagtcactcaacaccttacgtccctagccatcctccgccgcctccgtctctgcttccctagagccgtcgcgatggcagcagcccctgccggtgcccctgcaatcaccgcatcctcctcctttgtttcttcgtctccgttctgtctcaaggcatcgatgaccagccagcgccgacccgcggggagagtctccatcgtcatccgctgcgtcagtagcccgccggccgtcgacacatctttcaagactaatgtcccgcgcaatgctaatatggccaaactccaagcaggatatttgtttcctgagattgccaggagaagagccgctcatttgctgaagtttccagatgccaaaattataagccttggaataggcgacactaccgagcccattccaaatgtcataacaaatgccatggcagagagagcacatgccttgtcaacaattgatggctacagcggttatggagctgagcaaggtgaaaagaaactcagagcagcaattgctgcaacctactatgcggaccttggtattgaagattcagacatatttgtctctgatggtgccaaatgtgacatatctcgcttgcaggtcctttttggatctaatgtgacaattgcggtccaagatccatcataccctgcatatgttgattcaagtgttatcatggggcaaactgatttatatcagcaagacgttcagaagttgctattgagacagcctcattctcgaaatacgctgggttcacaggtgtccgtctaggttggactgttgtccccaaggagctccttttctcggatggacatccagttgctaaagatttcaatcgcatagtttgcacttgcttcaatggtgcatcaaacattgcgcaagctggtggtttagcctgcctctctccagacggtctaaaggctatgcaagatgttgttggcttctacaaggagaacactgaaataatcgttgagacatttacatcactcggattcaacgtgtatggcgccaagaacgctccatacgtatgggtgcacttccctggccgcaattcgtgggatgtgttcgctgagatcctggagaaggccaatgtggtcactactcctggcactggatttggaccgggtggcgaaggctttgtgagggtcagcgcgttcgggcacagagagaacatcattgaagccgcaaggaggttaaagcagctgtataagtgagcaccgatgcagcttctgtgccctcctagacagatgtatcaataagaacacatcagggcaccaaaaatcgcttggtgaagctgccagaagatgttagattttgaacttttttttttaattctcgtgcggtgtctacattcaaaccatttcgaactctagacaatgcttgttgtaatcctgagacccttcattcactggtgaagttgtgattgtcttgtctgtgttcatttttgtgtcctgctgttgctgtttc

SEQ ID NO: 1413 - DNA, 1506 bp, Zea Mays
tctcaattactattacaaaaaatgtcgctttcaagactaatgtcccgcgcaatgctaatatggccaaactccaagcaggatatttgtttcctgagattgccaggagaagagccgctcatttgctgaagtttccagatgccaaaattataagccttggaataggcgacactaccgagcccattccaaatgtcataacaaatgccatggcagagagagcacatgccttgtcaacaattgatggctacagcggttatggagctgagcaaggtgaaaagaaactcagagcagcaattgctgcaacctactatgcggaccttggtattgaagattcagacatatttgtctctgatggtgccaaatgtgacatatctcgcttgcaggtcctttttggatctaatgtgacaattgcggtccaagatccatcataccctgcatatgttgattcaagtgttatcatggggcaaactgatttatatcagcaagacgttcagaagtatggaaacattgagtacatgagatgcggtccagaaaatggattttttcctgatctgtcaactgtccctaggacagatattattttcttttgttcacccaacaatcctactggtgctgctgcatctcgggaccaactaaccaaattagtaaaatttgcaaaggacaacgggtccatcatagtctatgattctgcttatgcaatgtacatatcagatgacagcccaaagtctatctttgaaattcctggagcaaaggaggttgctattgagacagcctcattctcgaaatacgctgggttcacaggtgtccgtctaggttggactgttgtccccaaggagctccttttctcggatggacatccagttgctaaagatttcaatcgcatagtttgcacttgcttcaatggtgcatcaaacattgcgcaagctggtggtttagcctgcctctctccagacggtctaaaggctatgcaagatgttgttggcttctacaaggagaacactgaaataatcgttgagacatttacatcactcggattcaacgtgtatggcgccaagaacgctccatacgtatgggtgcacttccctggccgcaattcgtgggatgtgttcgctgagatcctggagaaggccaatgtggtcactactcctggcactggatttggaccgggtggcgaaggctttgtgagggtcagcgcgttcgggcacagagagaacatcattgaagccgcaaggaggttaaagcagctgtataagtgagcaccgatgcagcttctgtgccctcctagacagatgtatcaataagaacacatcagggcaccaaaaatcgcttggtgaagctgccagaagatgttagattttgaacttttttttttaattctcgtgcggtgtctacattcaaaccatttcgaactctagacaatgcttgttgtaatcctgagacccttcattcactggtgaagttgtgattgtcttgtctgtgttcatttttgtgtcctgctgttgctgtttc

SEQ ID NO: 1414 - DNA, 2662 bp, Zea Mays
cacgcctggacgccggccatacccagtcattatccaccaaatactcaagacgtgcgtgcgtcaatcgaacatcaagcgcggtgttacatgcaaatggcagcgttgtggatggcgttgttgaatcgacaaaattgcacgtggatattggcaactgaaaacaccactagaagattagcatgccataatgttccgttttattaaaatcaaatctttcgccgatgaaccatcgtcggaaatgttcacatgcatgcgagcaccttctgagtgagactaagcgaacaaaaatagcttaccaaggatccttttagagatgaaaaaacaacaaagcctttcaacggcacgaacactaataaaccacacatggtggccaccacaaaaaatggaagcatatgcaactattggggtgtttggtttgtagggactaatgtttagtccctacattttattccattttagttccaaaattaccaaatatagaaactaaaacttaaaaggaataaaatgaagggactaaatattagtccttagaaaccaaacaccccctatagccatcacatctacatgggccctatggtagtgcctaaaatggaccaaaggcgatgtaacgaccatgtgtctgggacccacggtctcctcacgaccaatagacctggaaacattgaagccactcctccctatctcagaaactctagtaccaaaaggaggtacgtacttgcagacggttcctgtcaactccctggccatacaagaaagcataacagaagttagtaaagactctttggtaatgcaggtcgacatggttgcaggcatgagagtagttccatcaaggagaaacaatgtcgacccaaccacagagtggcccacttagcgcttgttcggttgcgtctgaatcgaagggggtttggaaaggattaaatcgagttcagaacttctcagccacatttcacgattcttttttacctgactcgcacttgatgcggcacaattaattaatactacagataaagcccgccaactcaacactaattgcaaaccataacattgaaaaaggccaacccatttggtggacacaggagtcatgaaactcttagatccatgtataagaacttaaagtgcaatattccgttttgactcaattcttcctccaaagctacaagccacttcacatagatgcacatggttgagagttactatatttcaagtgcctgcgttttgagcatgcaacaaccttatacaaccaactagtacaattaaaaagataactcacaagagacaattcatgttttttctatattcaaacaacaaaattgcctgttgcctgaacaaaaaaaatcaggcacctaaaatgtagaacatgtgaaacttaaaatatctatactcggcataagtgcaataatgggaatcaagaagctctcactactcactgcctcgagcatcccaacctccaattcttctggcgggggtatttactgaattgtttctgactttctgcaaactttttgacacctaaaagacgatggaaaatttattgacatttcatcctttttattacaagctgataacaaatttaaaactgcaaagggtatacaaatctgactactaataacaaacagaaagtggctattagtttaccacagacaaacaggtgaagtttcaaacctgcagcattggacagcaaggaataggcaaacattattattgcctcgtagttgttgtagggtacaattgaacccaagcaaactcctctttgtagctaacactttggtcacatgccccttgacacgtgtagacagcaattgttgcccagtcaagggagtctggttgatttcccacaacaaagaaatatagcaattgtggcattacctggaaaacataacatatacgtaagtagaacctttgaatcctaaattttagatttgatgatactggttcagtgtataaatgattttttttttggaggtttgatccttctagtggaatgcctatgagatattggatatacttcgtttccaaatctaggtcattttaattttctcctaagtaaaactttgactaagcttacagaaaaatgaaagaatatctacaacatgtcatttgatgactggtggactagagtggagttgagggttactgcttggccaggaaggggctggattcgattataactctgggagcttggtcgatttggaatcatcacaatcggtgtgtgttcgatggcatgccacgaacctggctggagccttgttgctcgcctatggggtggggttttggagtttgacgcgagctcagggcatatcattccttcttgccctagagccggcctataaacaataggtgttctgattttttgtagttgtggtcgatgtcatgcttgttgtataaaaaggcacatatgttttctaagtaaccaagtgtggttgggtgtcaggtgtgtaccataagggttcttgccccttttcttaatatagtgctacacaactgtccttcatgttcgagaaaaaaatatacaacatgtcagcataaaagtagtttatatattgttaatatcttcatggtgtatttatttagtgcagtagatgtaatatattttttctataaatttggtcaaagttagagaacattgaaaggcaaaactaaaacagactatgtttttggatggagg

SEQ ID NO: 1415 - DNA, 1773 bp, Zea Mays
caggtaccacaccagtggcatacatgggctggcaacaaatatttaggcatttgaaagaatttagtaacattaaccctttgacagccacgggacaagtaaagctcaattaccaacaacaacaactaatagacagattgtaggattatagcacataaacagtaatgtgacacatcagaaaatttaaaaacaattgtcttatatttatgttaagcttacatacttccaaataaacttcttttgaataaaatttgcatgtgccataggtccctagccactccaaatgtaaataaacagaaatgttccaaaaagaaagcaaggtagtagttggcatggagaaaaagtaaagatttggactatagggggcagacctcatgatacacaggggtcggctttcgtgacctttctcggtcggggctctgattaagcttcttcttaatatcttgtgtattcacaagagtgttctggtatgctatgctaagaagatgtgcacttcatagtttagcccctcatccggatgctacctccttcttggactggtgggagaaatcttccgacattgttcctaggatgattaagaaaggcctggattccctcatcatcttgggagcctggatggtttggaagcaccggaatagagtggtgtttgatggagccactccagacctcacccttctgctcagatctgctgaggaggaaagacacaaatggcaactggctctccttcttggcggcgccaatgccaaatgtttaggggaggtgctgagcgttgtcgctgattattagtgaacaaatggacagtttcttgtacgcttgtttctggcctcccgaaggggaaggtctattgtaattttttgggtcatcttcggacctattccactcttctaatatatttataaagcgtagctacggttttcgagaaaaaaaagcttctttttaatataataccatgggacagtctttcccctaccgcccaagtttttttaaaaaaggttccacattgacagacacaaataatgtcatagatgctaacttgaattcaggtccacaaattcagaagtcactatcaaacatatattcacaatttcacacatttatgtaacagctagtcaggggcggccccagcgggtggtccatatgggcaacgacacaccctaggtgtaagtgctatatcttgaacttgatagtcaaggtttgagtcttgatgatccctattttttgtttgtttttttatattttttctggcacaccctaagcatagcatctgggtccaccattgagctagtgcaagatatatagtgtcaatcaactgccgtgcaaaagaagataagcactacctcctggacacagtggtttgtcagaccggtcatgctttggaggttgagctgagtagaaggcattagtccgtggcaattgacaccggaaaaccttcacgctagaacacaatccacttcaaacaatcaaaatcagaagatatatgtgaacacaaaaaatataagatacatgactttcttcaccttctacatggattcccatgcttgtgcttccattgttcatgttgatctcgaagcaagcacgccatggatgggcacatgaacatgaacagagttcgatggaaggctgctacattgtcttcaactgctgcataaatctaaccaaaaccaagcccagttgtgaccaagtcgatagccaaacaacaagcaatcgagtgtcacaacttcattgaacacaaagaaatcacctgaagaacaaactgcaaaggctcgccacaaaaac

SEQ ID NO: 1416 - DNA, 1778 bp, Zea Mays
acagccatagtctctaccgcatccttccacaaaaccctttcttccttccgccgccgccgcgaccggctaaacccttcatttcgccgcagcgacgaccacccgccgcgggccaactatggcgcccgttgcggctcccatacgcgacctgcttacctctttcagccccggcgcggacttcctcgcgctctcttctggggacggccgcatcaaggtatgggacgccgtgcggggccggctgcagaccgagtttgctgacatccctgcagtggaggcggtcgcggtcgctgagtcgaagcgcggccacctcgccctcgattacacctgcatgaagtgggtacaactttccagtaagaagaagaggaaggctgggagctcattgattgtgcttggtacaggcagtggagatgtgcttgcacttgatgttgccgcgggacattggaagtggaaggtcagcgattgccaccctgggggtgtgacagctgtagaatactcgaaacatgggcggaatgtgtacacggcaggtgctgatggcatggtctgtaggattgatgcctctaatggggctgttgttggaaaatttaaatcttcttcaaaggcaatatctgcattagctgtgtcatcagatggaaatatgttggcaacagcagctggccagttgaggacctttgacacttccagcaacaaaaaaattaaaaaattctctggacatccagttgctgtgaggagcatggtctttagcaatgatagccaatatgttttgtcatctggagttggtgaacgctatattgccatttggaagctgggcagtggtaaaacccagagctcaaactgtattctgtcgatggagcacccagcaatgtttgtggactgtaaatgttcagacaaaggagaaatacacattctggctatttctgagattggtgtctgctatttctggtctgcaaatgttgtggatgacctgcgtaataagaagcccaccaagatcatattatctgagtcatctgtgtcaacaactcatcaagcattatcgatatttgctgcaaaacttcaaggagtggatgggcctaattctgcccatgtcctactggcttatgggtctgtagtgaaaccatcttttgataaacttttggtttgttatggtacagatattagtttgggcatttctcaagatggagttctcttgccaaatactcaaaccaccatggcaaagaaaggccaatctgtgaaaaagcatgaaactgtcattgctctagaccgagccaatgctgaagatgccatccttcctcttccaaaactccatacacaggaaaagaaaaggaaacatggtgtaacaaaacccagtggcgatgttgagcctgagattcatagtgacctcaccactacaagatctattcataaaagagttcctgtgcaaagaattgaagatgacagcacatgcatcgaggatatgatgagggagtgtggcatcattgaaactagagtagatgagagcatgaagggccatgctggtataccctttaacattttgtcttgtctctttggtgatggcagcataaaagtcgatgccaatttacccagtaagaagattcgaggtcatctaagatcattaaaacctggagatgcttgcaaacttcttgataaattagtatctgcatggaaaacgagatctggtagcacggaacttgtattgcgttggatatactgcctgttagtcattcatggccgttttatctgctccgaggaatcgattaacaacctggagaaggctggaacaaacc

SEQ ID NO: 1417 - DNA, 2180 bp, Zea Mays
acagccatagtctctaccgcatccttccacaaaaccctttcttccttccgccgccgccgcgaccggctaaacccttcatttcgccgcagcgacgaccacccgccgcgggccaactatggcgcccgttgcggctcccatacgcgacctgcttacctctttcagccccggcgcggacttcctcgcgctctcttctggggacggccgcatcaaggtatgggacgccgtgcggggccggctgcagaccgagtttgctgacatccctgcagtggaggcggtcgcggtcgctgagtcgaagcgcggccacctcgccctcgattacacctgcatgaagtgggtacaactttccagtaagaagaagaggaaggctgggagctcattgattgtgcttggtacaggcagtggagatgtgcttgcacttgatgttgccgcgggacattggaagtggaaggtcagcgattgccaccctgggggtgtgacagctgtagaatactcgaaacatgggcggaatgtgtacacggcaggtgctgatggcatggtctgtaggattgatgcctctaatggggctgttgttggaaaatttaaatcttcttcaaaggcaatatctgcattagctgtgtcatcagatggaaatatgttggcaacagcagctggccagttgaggacctttgacacttccagcaacaaaaaaattaaaaaattctctggacatccagttgctgtgaggagcatggtctttagcaatgatagccaatatgttttgtcatctggagttggtgaacgctatattgccatttggaagctgggcagtggtaaaacccagagctcaaactgtattctgtcgatggagcacccagcaatgtttgtggactgtaaatgttcagacaaaggagaaatacacattctggctatttctgagattggtgtctgctatttctggtctgcaaatgttgtggatgacctgcgtaataagaagcccaccaagatcatattatctgagtcatctgtgtcaacaactcatcaagcattatcgatatttgctgcaaaacttcaaggagtggatgggcctaattctgcccatgtcctactggcttatgggtctgtagtgaaaccatcttttgataaacttttggtttgttatggtacagatattagtttgggcatttctcaagatggagttctcttgccaaatactcaaaccaccatggcaaagaaaggccaatctgtgaaaaagcatggaaaagaaaaggaaacatggtgtaacaaaacccagtggcgatgttgagcctgagattcatagtgacctcaccactacaagatctattcataaaagagttcctgtgcaaagaattgaagatgacagcacatgcatcgaggatatgatgagggagtgtggcatcattgaaactagagtagatgagagcatgaagggccatgctggtataccctttaacattttgtcttgtctctttggtgatggcagcataaaagtcgatgccaatttacccagtaagaagattcgaggtcatctaagatcattaaaacctggagatgcttgcaaacttcttgataaattagtatctgcatggaaaacgagatctggtagcacggaacttgtattgcgttggatatactgcctgttagtcattcatggccgttttatctgctccgaggaatcgattaacaacctggagaagatgtgtgcagaaagatacacagttactgaagatttgctgaagctttctgggcggcttcggttaataacagcacaggtcgacaaggctgctagtaacatgtctgagccgacatcaggggagatgcaggatgctgctttccagtctgacgaagaggaggaagatgaagatgttgatgaaacagtattcggtcaagattcagattcgtcacaaaatagcggcaccgacgacgatgcaaagtagactcactgctggtattcatcattatggtgattgtattgtttttaattaaattgccaagcttgatttttgtcaaggcgacgttggaaggttgcacagaattttgacagtgtctctggtttcattttgaaagcactcgaagttgtctcctcctttacccctttttccttatatacgacggcaattggttaaagttacatacccgaaggttgtccttgcacataattttgacagtgtctctggtttcat

SEQ ID NO: 1418 - DNA, 2271 bp, Zea Mays
acagccatagtctctaccgcatccttccacaaaaccctttcttccttccgccgccgccgcgaccggctaaacccttcatttcgccgcagcgacgaccacccgccgcgggccaactatggcgcccgttgcggctcccatacgcgacctgcttacctctttcagccccggcgcggacttcctcgcgctctcttctggggacggccgcatcaaggtatgggacgccgtgcggggccggctgcagaccgagtttgctgacatccctgcagtggaggcggtcgcggtcgctgagtcgaagcgcggccacctcgccctcgattacacctgcatgaagtgggtacaactttccagtaagaagaagaggaaggctgggagctcattgattgtgcttggtacaggcagtggagatgtgcttgcacttgatgttgccgcgggacattggaagtggaaggtcagcgattgccaccctgggggtgtgacagctgtagaatactcgaaacatgggcggaatgtgtacacggcaggtgctgatggcatggtctgtaggattgatgcctctaatggggctgttgttggaaaatttaaatcttcttcaaaggcaatatctgcattagctgtgtcatcagcttatacttgattatgtcagatggaaatatgttggcaacagcagctggccagttgaggacctttgacacttccagcaacaaaaaaattaaaaaattctctggacatccagttgctgtgaggagcatggtctttagcaatgatagccaatatgttttgtcatctggagttggtgaacgctatattgccatttggaagctgggcagtggtaaaacccagagctcaaactgtattctgtcgatggagcacccagcaatgtttgtggactgtaaatgttcagacaaaggagaaatacacattctggctatttctgagattggtgtctgctatttctggtctgcaaatgttgtggatgacctgcgtaataagaagcccaccaagatcatattatctgagtcatctgtgtcaacaactcatcaagcattatcgatatttgctgcaaaacttcaaggagtggatgggcctaattctgcccatgtcctactggcttatgggtctgtagtgaaaccatcttttgataaacttttggtttgttatggtacagatattagtttgggcatttctcaagatggagttctcttgccaaatactcaaaccaccatggcaaagaaaggccaatctgtgaaaaagcatgaaactgtcattgctctagaccgagccaatgctgaagatgccatccttcctcttccaaaactccatacacaggaaaagaaaaggaaacatggtgtaacaaaacccagtggcgatgttgagcctgagattcatagtgacctcaccactacaagatctattcataaaagagttcctgtgcaaagaattgaagatgacagcacatgcatcgaggatatgatgagggagtgtggcatcattgaaactagagtagatgagagcatgaagggccatgctggtataccctttaacattttgtcttgtctctttggtgatggcagcataaaagtcgatgccaatttacccagtaagaagattcgaggtcatctaagatcattaaaacctggagatgcttgcaaacttcttgataaattagtatctgcatggaaaacgagatctggtagcacggaacttgtattgcgttggatatactgcctgttagtcattcatggccgttttatctgctccgaggaatcgattaacaacctggagaagatgtgtgcagaaagatacacagttactgaagatttgctgaagctttctgggcggcttcggttaataacagcacaggtcgacaaggctgctagtaacatgtctgagccgacatcaggggagatgcaggatgctgctttccagtctgacgaagaggaggaagatgaagatgttgatgaaacagtattcggtcaagattcagattcgtcacaaaatagcggcaccgacgacgatgcaaagtagactcactgctggtattcatcattatggtgattgtattgtttttaattaaattgccaagcttgatttttgtcaaggcgacgttggaaggttgcacagaattttgacagtgtctctggtttcattttgaaagcactcgaagttgtctcctcctttacccctttttccttatatacgacggcaattggttaaagttacatacccgaaggttgtccttgcacataattttgacagtgtctctggtttcat

SEQ ID NO: 1419 - DNA, 2243 bp, Zea Mays
acagccatagtctctaccgcatccttccacaaaaccctttcttccttccgccgccgccgcgaccggctaaacccttcatttcgccgcagcgacgaccacccgccgcgggccaactatggcgcccgttgcggctcccatacgcgacctgcttacctctttcagccccggcgcggacttcctcgcgctctcttctggggacggccgcatcaaggtatgggacgccgtgcggggccggctgcagaccgagtttgctgacatccctgcagtggaggcggtcgcggtcgctgagtcgaagcgcggccacctcgccctcgattacacctgcatgaagtgggtacaactttccagtaagaagaagaggaaggctgggagctcattgattgtgcttggtacaggcagtggagatgtgcttgcacttgatgttgccgcgggacattggaagtggaaggtcagcgattgccaccctgggggtgtgacagctgtagaatactcgaaacatgggcggaatgtgtacacggcaggtgctgatggcatggtctgtaggattgatgcctctaatggggctgttgttggaaaatttaaatcttcttcaaaggcaatatctgcattagctgtgtcatcagatggaaatatgttggcaacagcagctggccagttgaggacctttgacacttccagcaacaaaaaaattaaaaaattctctggacatccagttgctgtgaggagcatggtctttagcaatgatagccaatatgttttgtcatctggagttggtgaacgctatattgccatttggaagctgggcagtggtaaaacccagagctcaaactgtattctgtcgatggagcacccagcaatgtttgtggactgtaaatgttcagacaaaggagaaatacacattctggctatttctgagattggtgtctgctatttctggtctgcaaatgttgtggatgacctgcgtaataagaagcccaccaagatcatattatctgagtcatctgtgtcaacaactcatcaagcattatcgatatttgctgcaaaacttcaaggagtggatgggcctaattctgcccatgtcctactggcttatgggtctgtagtgaaaccatcttttgataaacttttggtttgttatggtacagatattagtttgggcatttctcaagatggagttctcttgccaaatactcaaaccaccatggcaaagaaaggccaatctgtgaaaaagcatgaaactgtcattgctctagaccgagccaatgctgaagatgccatccttcctcttccaaaactccatacacaggaaaagaaaaggaaacatggtgtaacaaaacccagtggcgatgttgagcctgagattcatagtgacctcaccactacaagatctattcataaaagagttcctgtgcaaagaattgaagatgacagcacatgcatcgaggatatgatgagggagtgtggcatcattgaaactagagtagatgagagcatgaagggccatgctggtataccctttaacattttgtcttgtctctttggtgatggcagcataaaagtcgatgccaatttacccaattcgaggtcatctaagatcattaaaacctggagatgcttgcaaacttcttgataaattagtatctgcatggaaaacgagatctggtagcacggaacttgtattgcgttggatatactgcctgttagtcattcatggccgttttatctgctccgaggaatcgattaacaacctggagaagatgtgtgcagaaagatacacagttactgaagatttgctgaagctttctgggcggcttcggttaataacagcacaggtcgacaaggctgctagtaacatgtctgagccgacatcaggggagatgcaggatgctgctttccagtctgacgaagaggaggaagatgaagatgttgatgaaacagtattcggtcaagattcagattcgtcacaaaatagcggcaccgacgacgatgcaaagtagactcactgctggtattcatcattatggtgattgtattgtttttaattaaattgccaagcttgatttttgtcaaggcgacgttggaaggttgcacagaattttgacagtgtctctggtttcattttgaaagcactcgaagttgtctcctcctttacccctttttccttatatacgacggcaattggttaaagttacatacccgaaggttgtccttgcacataattttgacagtgtctctggtttcat

SEQ ID NO: 1420 - DNA, 2306 bp, Zea Mays
acagccatagtctctaccgcatccttccacaaaaccctttcttccttccgccgccgccgcgaccggctaaacccttcatttcgccgcagcgacgaccacccgccgcgggccaactatggcgcccgttgcggctcccatacgcgacctgcttacctctttcagccccggcgcggacttcctcgcgctctcttctggggacggccgcatcaaggtatgggacgccgtgcggggccggctgcagaccgagtttgctgacatccctgcagtggaggcggtcgcggtcgctgagtcgaagcgcggccacctcgccctcgattacacctgcatgaagtgggtacaactttccagtaaggcagtggagatgtgcttgcacttgatgttgccgcgggacattggaagtggaaggtcagcgattgccaccctgggggtgtgacagctgtagaatactcgaaacatgggcggaatgtgtacacggcaggtgctgatggcatggtctgtaggattgatgcctctaatggggctgttgttggaaaatttaaatcttcttcaaaggcaatatctgcattagctgtgtcatcagatggaaatatgttggcaacagcagctggccagttgaggacctttgacacttccagcaacaaaaaaattaaaaaattctctggacatccagttgctgtgaggagcatggtctttagcaatgatagccaatatgttttgtcatctggagttggtgaacgctatattgccatttggaagctgggcagtggtaaaacccagagctcaaactgtattctgtcgatggagcacccagcaatgtttgtggactgtaaatgttcagacaaaggagaaatacacattctggctatttctgagattggtgtctgctatttctggtctgcaaatgttgtggatgacctgcgtaataagaagcccaccaagatcatattatctgagtcatctgtgtcaacaactcatcaagcattatcgatatttgctgcaaaacttcaaggagtggatgggcctaattctgcccatgtcctactggcttatgggtctgtagtgaaaccatcttttgataaacttttggtttgttatggtacagatattagtttgggcatttctcaagatggagttctcttgccaaatactcaaaccaccatggcaaagaaaggccaatctgtgaaaaagcatgaaactgtcattgctctagaccgagccaatgctgaagatgccatccttcctcttccaaaactccatacacaggaaaagaaaaggaaacatggtgtaacaaaacccagtggcgatgttgagcctgagattcatagtgacctcaccactacaagatctattcataaaagagttcctgtgcaaagaattgaagatgacagcacatgcatcgaggatatgatgagggagtgtggcatcattgaaactagagtagatgagagcatgaagggccatgctggtataccctttaacattttgtcttgtctctttggtgatggcagcataaaagtcgatgccaatttacccagtaagaagattcgaggtcatctaagatcattaaaacctggagatgcttgcaaacttcttgataaattagtatctgcatggaaaacgagatctggtagcacggaacttgtattgcgttggatatactgcctgttagtcattcatggccgttttatctgctccgaggaatcgattaacaacctggagaaggctggaacaaacctgacaccagcccaatctagggaagtcaacacagccaattcttttgtaaacaatgcttggcaagtttctacaaggcattcacagatatgtgtgcagaaagatacacagttactgaagatttgctgaagctttctgggcggcttcggttaataacagcacaggtcgacaaggctgctagtaacatgtctgagccgacatcaggggagatgcaggatgctgctttccagtctgacgaagaggaggaagatgaagatgttgatgaaacagtattcggtcaagattcagattcgtcacaaaatagcggcaccgacgacgatgcaaagtagactcactgctggtattcatcattatggtgattgtattgtttttaattaaattgccaagcttgatttttgtcaaggcgacgttggaaggttgcacagaattttgacagtgtctctggtttcattttgaaagcactcgaagttgtctcctcctttacccctttttccttatatacgacggcaattggttaaagttacatacccgaaggttgtccttgcacataattttgacagtgtctctggtttcat

SEQ ID NO: 1421 - DNA, 2208 bp, Zea Mays
acagccatagtctctaccgcatccttccacaaaaccctttcttccttccgccgccgccgcgaccggctaaacccttcatttcgccgcagcgacgaccacccgccgcgggccaactatggcgcccgttgcggctcccatacgcgacctgcttacctctttcagccccggcgcggacttcctcgcgctctcttctggggacggccgcatcaaggtatgggacgccgtgcggggccggctgcagaccgagtttgctgacatccctgcagtggaggcggtcgcggtcgctgagtcgaagcgcggccacctcgccctcgattacacctgcatgaagtgggtacaactttccagtaaggcagtggagatgtgcttgcacttgatgttgccgcgggacattggaagtggaaggtcagcgattgccaccctgggggtgtgacagctgtagaatactcgaaacatgggcggaatgtgtacacggcaggtgctgatggcatggtctgtaggattgatgcctctaatggggctgttgttggaaaatttaaatcttcttcaaaggcaatatctgcattagctgtgtcatcagatggaaatatgttggcaacagcagctggccagttgaggacctttgacacttccagcaacaaaaaaattaaaaaattctctggacatccagttgctgtgaggagcatggtctttagcaatgatagccaatatgttttgtcatctggagttggtgaacgctatattgccatttggaagctgggcagtggtaaaacccagagctcaaactgtattctgtcgatggagcacccagcaatgtttgtggactgtaaatgttcagacaaaggagaaatacacattctggctatttctgagattggtgtctgctatttctggtctgcaaatgttgtggatgacctgcgtaataagaagcccaccaagatcatattatctgagtcatctgtgtcaacaactcatcaagcattatcgatatttgctgcaaaacttcaaggagtggatgggcctaattctgcccatgtcctactggcttatgggtctgtagtgaaaccatcttttgataaacttttggtttgttatggtacagatattagtttgggcatttctcaagatggagttctcttgccaaatactcaaaccaccatggcaaagaaaggccaatctgtgaaaaagcatgaaactgtcattgctctagaccgagccaatgctgaagatgccatccttcctcttccaaaactccatacacaggaaaagaaaaggaaacatggtgtaacaaaacccagtggcgatgttgagcctgagattcatagtgacctcaccactacaagatctattcataaaagagttcctgtgcaaagaattgaagatgacagcacatgcatcgaggatatgatgagggagtgtggcatcattgaaactagagtagatgagagcatgaagggccatgctggtataccctttaacattttgtcttgtctctttggtgatggcagcataaaagtcgatgccaatttacccagtaagaagattcgaggtcatctaagatcattaaaacctggagatgcttgcaaacttcttgataaattagtatctgcatggaaaacgagatctggtagcacggaacttgtattgcgttggatatactgcctgttagtcattcatggccgttttatctgctccgaggaatcgattaacaacctggagaagatgtgtgcagaaagatacacagttactgaagatttgctgaagctttctgggcggcttcggttaataacagcacaggtcgacaaggctgctagtaacatgtctgagccgacatcaggggagatgcaggatgctgctttccagtctgacgaagaggaggaagatgaagatgttgatgaaacagtattcggtcaagattcagattcgtcacaaaatagcggcaccgacgacgatgcaaagtagactcactgctggtattcatcattatggtgattgtattgtttttaattaaattgccaagcttgatttttgtcaaggcgacgttggaaggttgcacagaattttgacagtgtctctggtttcattttgaaagcactcgaagttgtctcctcctttacccctttttccttatatacgacggcaattggttaaagttacatacccgaaggttgtccttgcacataattttgacagtgtctctggtttcat

SEQ ID NO: 1422 - DNA, 6132 bp, Zea Mays
cgctgccttcccacttccgtccgcagtccgctgcattgctcgcgtgtgttctgtctgtcactctcgcccagtcgccctcctcttgctctccgacgactggtgggccgccgctgccgccgccgccgccgccgccctacgccaggtgctgaggctttcatcggtctcttcgccggtgtctttgccggcgtcgagcacccgccaggctatccatgatttttgcctacaaaaggtgattgaaaaggggggaggatggaaggggagggacaccacggagttgttttggcatgcagcatctgtgggttcctcttcgctgtccttagccctttcagcttttgggttttatgggctgtgaattggaggccatggaggttatacagttggatatatgcaaggaaatggccaacatatgttcaaggacctcaattgagcacactttgcagccttttgactctttgtgcatggcttgttgtcatttcccctatagcagttctgctcgtgtggggaagcgtccttattgctcttatggaaaggaatataattggtttagctgttataatggcgggtgttgctttgctcctgtcattctactctataatgctctggtggagaacacaatggcaaagctcccaggctgttgcttaccttctcctcctggcagtatgcctgctatgtgcctacgatttttgtgctatttatgtgacagctggtgctagtgcttccgagcttaattctccatcagggttcttcttcggggtgtctgtaatatcattggccatcaatatgctttttatatgtaaaatactgtttaatgtaagtggatttgatgttgatgaatatgtgcggaggtcatacaaatttgcctattctgactgtgttgaagtggctcctgtttcatgctctcctgagccaccggatcctagtgaattatacatgacaaaatccagcagggtcaagcatttagggcttctgtacattagctctctgcttgtgcttgttggttattccatcttgtacggtcttacgtcaaaagaagctcgttggttgggtgctttaacttcagttgcagttgttatccttgactggaatctgggcttatgttcatttagatttgagcttcttaaaagtaggatgatagtgttatttgtggctggaacatcaagggctttccttgtatcctttggagtgcattactggtaccttggccattgcatcagctatgcttttgtagcatctgtgcttttatctgctgctgtttcttcctggctttctatttcaaacccctcagttgcaaggatagacgctctaagaagtacggtaataaagctacgagagggatttcgaagaaaaggacaaaatagttcttcaaattcatcagaaggctgtggctctagtgtgaagcgtagtagcggtagtgttgaagctggtcaaaatggtaatgcaatggattctatgtacagaagcaactcacaaagcgatggtgtcaattggagcagtattccttttgatcgatcaaacagttgtcaagaaggccggagctccgacaagaacatagatagtgcacgtgcaagcttagctcatcggagtaattcatgcttatctgccgtccaagactctgaaaccgctgttgtttcagtagataggcatggagatcccattacttcacttgtttgttctagcagtggtttggaaagtcatggctgtgagcctagtggatcagccaccacctcaggtaatcaacagctattggatttgaacctggcagcgatatttcaggacagattaaatgatccaaggatttcatctatgctaaaaaagaatggtggacttggagatgtagaactggctaatcttcttcaggataaaggactagatccaaatttttcgtacatgctgaaagacaaagttatggatccacgtattttagctttgctacagaggagcagcttggatgcagatagagagcatcaagatgacgtagatgtcacagctactgattcagatagattggataccactattgcaaatcagatttctctgtcagaagaactaaggagaagtggtctagaaaaatggttgaacatttcaaggctaatattccatcatttagctggatctccaatacgtgcttttattgttttcacagtaatgtttataatagagactgctactgtggctatctatcggccagagaccatcaaggtgataaatgcaacacatgaacagtttgaatttggtttctcgatactgcttctgtcaccagttgtctgctccattatggcattcatttggtctctgcgtgctgaagaaatgttgatgacatccaagccccagaagtatggtttcattgcatggctactgagcacatgtgttggtttgtttctctctttcttaagcaaatcatctgttatattgggcctgtctctcacggtaccacttatggtggcttgcctctcatttgctgttcccatatggatacgcaatggttacagtttctggattcctggaagggagtttgcaaatcgtgaaaatcgggctctctttgttatcaccattgctgttttcactgcatcaattattggccttggtgcaatagtgtcagcaaagcctttagacgctctaggctataaaggatgggatgctgataagaacagctcctattctccctatgcaacatcaatgtatcttggatgggcattgtcttcaacaattgctgtgattaccacagggttgatacctattgttgcttggtttgcaacataccggttttcaccttcatcagctatatgtgttggcctctttgcaactgttcttgtgtctttttgcggtgcatcctactggggagtggtaaattcacgagaggatggtgttcctctaaaggctgatttccttgcagcattacttcccttgctttgcattccagcatttttctcactgttcactgggctttacaaatggaaggatgatgattggaagatttctcgtggtgtttacctttttgttggcatgggaatgttgctgttgtttggtgcagttgcagctgttattgtcacaatcaggccctggactgttggagttgcttgcctcgtagccattctgttccttgtatttgttattggggtcatccactactggacatctaacaacttctatctaacgaggactcagatgttgcttgtttgttccattgcttttctcttagccttggctgccttcctgatgggtttatttcacggaaagccttttgttggagcatctataggttatttctcatttatatttcttctcactggaagggctttgactgtccttctatcaccgccaatcgtagtgtattcgccaagagtattgcctgtatacgtttatgatgctcatgcagactctgctaaaaatgttagctatgcctttcttattctgtatgggattgcattagcaactgaagtttggggtgttattgctagtctaataatgaatccaccatttgttggggctggcgtttctgctactactcttgtaattgctttcagttttgctgtttctcgaccatgcctgactcttaagatgatggaggatgcagttcattttctcagcaaggatacagttgtgcaagcgatgtcacggtctgctaataaaactagaaatgctatatctgggacttactcagcacctcagaggtccgcaagttctgctgctcttttggttggagatcctgctcttacattggacagggctgggaactttgtgcttcctagggctgatgttatgaaactgagagatcgtttgagaaatgaagaaattgctgcaggatctttcttatgtggagtaaaagattgtttactaatttgcccccagtccctgtcaaacatagattatcggaggaatatgtgtgcccatgcacgtattttggctttggaagaagcaattgatacagaatgggtgtatatgtgggacaaatttggtggttatttacttctgttgcttggattgactgccaaagctgaacaaatacaggatgaagttcgtctaagactctttttggatagcataggcctttccgatttgagtgccaaagaaattaagaaatggatgcctgaagatcggaggcaatttgagcttattcaagaaagctacataagggaaaaagaaatggaagaggaggctttgatgcaaagacgagaggaagaagggaagggaagagaaaggaggagggcattgctagagagagaggagcgaaaatggaaggagctcgaaatatcattgctttcttccattccaaatactggaagcagggatgctgcagctatggcagcagctgtcagagctgttggaggtgattctgccctggaagattcttttgcaagagatagggtctcttcaatagccaatcacatacgaaaggcacaattggctcggcgagcagaacagactggtattccaggcactatatgcatactcgatgatgaaccgaggagtactggtcgtcattgtggagaacttgacttgtgcctctgtcaaagtcaaaaggttactttgtctattgctgtcatggttcagcctgtatctggcccagtgtgtctttttggaagtgaattccaaaaggtttgttgggaaatcttagtggcaggatcagaacagggtatggaagctggacaagttggtcttcgattagtaactaagggtgaaaggatgactactgttgctaaagagtggaatattggtgcgtctagtattgcagatggcaggtggcatcttgtcactgtaactttagatgccgacctaggtgaagcaacttctttcattgatggagtttatgatggatatcagaatgggttgccgttgccaacagataacggtatttgggaacctggaactgatatttgggttggtgctaggccacccatggacttagatgcctttggtaggtcagatagcgaaggttctgactcaaagatgcagatcatggatgcttttctatggggaagatgtctcagtgaagatgaggttactgttttacatactgccatgtctcctgctgagtatggattttttgaccttgcacccggcgatgcttggcatggaagttattctgcaagggtggatgactgggaaagcgaagaagcttatgagctttatgatcaaggggatgtcgaatgggatggacagtactcaagtggtaggaaacgtccggtacatgatgctgtagctattgaccttgactcctttgctaggagaccaagaaaaccaaggtttgagacacgtgatgaagtcaaccagcgtatgctttctgttgaaagggctgtcagggatgctcttatcgcgaaaggagagagaaacttcactgatcaagagttccctccagaggatcgttctttatttgtagatccgatgaatccacctctgaaactgcaggttgtttctgagtggatgaggccttctgacatagcaaaggatatatctatcagttgtcagccttgcttgttttcgggttctgtgaattcctcagatgtgtgtcagggtcggttgggagactgttggttcctaagtgcagtcgcagttttaactgagatgtctcggatatcagaagttataatcactcccgagtacaatgatgaagggatttatacagtcagattctgtattcaggtacccaatattccaatgtttaaaccatttgactgataagtatctgctcaacttgaattgctccttttctattaatatactagccttgtgtcatctggtcagtatgttatctaggaaggttcagttgattcattttgcaaagtttataatacagttatcttaaaatgttagaccaaaaaatcacggtgaagtttaccatttgacaatcatatgtccagtttaatattagagttctatttctgaagcaaatgtgtacatcatgctacatgcatcgataacatatttaactgtgtcaggaaaaataaattattttattagttttttttgaagggaaaaccgtaggaaattccctacagtgaaatatattgaattaaattaggaaaaataaggacgaccgctgtacaaaaccgaaaaataggaaaaaggaaaggggggaaaggcaaagaacatcccaaattacaactccaataactagcaagatataagggataa

SEQ ID NO: 1423 - DNA, 6619 bp, Zea Mays
cgctgccttcccacttccgtccgcagtccgctgcattgctcgcgtgtgttctgtctgtcactctcgcccagtcgccctcctcttgctctccgacgactggtgggccgccgctgccgccgccgccgccgccgccctacgccaggtgctgaggctttcatcggtctcttcgccggtgtctttgccggcgtcgagcacccgccaggctatccatgatttttgcctacaaaaggtgattgaaaaggggggaggatggaaggggagggacaccacggagttgttttggcatgcagcatctgtgggttcctcttcgctgtccttagccctttcagcttttgggttttatgggctgtgaattggaggccatggaggttatacagttggatatatgcaaggaaatggccaacatatgttcaaggacctcaattgagcacactttgcagccttttgactctttgtgcatggcttgttgtcatttcccctatagcagttctgctcgtgtggggaagcgtccttattgctcttatggaaaggaatataattggtttagctgttataatggcgggtgttgctttgctcctgtcattctactctataatgctctggtggagaacacaatggcaaagctcccaggctgttgcttaccttctcctcctggcagtatgcctgctatgtgcctacgatttttgtgctatttatgtgacagctggtgctagtgcttccgagcttaattctccatcagggttcttcttcggggtgtctgtaatatcattggccatcaatatgctttttatatgtaaaatactgtttaatgtaagtggatttgatgttgatgaatatgtgcggaggtcatacaaatttgcctattctgactgtgttgaagtggctcctgtttcatgctctcctgagccaccggatcctagtgaattatacatgacaaaatccagcagggtcaagcatttagggcttctgtacattagctctctgcttgtgcttgttggttattccatcttgtacggtcttacgtcaaaagaagctcgttggttgggtgctttaacttcagttgcagttgttatccttgactggaatctgggcttatgttcatttagatttgagcttcttaaaagtaggatgatagtgttatttgtggctggaacatcaagggctttccttgtatcctttggagtgcattactggtaccttggccattgcatcagctatgcttttgtagcatctgtgcttttatctgctgctgtttcttcctggctttctatttcaaacccctcagttgcaaggatagacgctctaagaagtacggtaataaagctacgagagggatttcgaagaaaaggacaaaatagttcttcaaattcatcagaaggctgtggctctagtgtgaagcgtagtagcggtagtgttgaagctggtcaaaatggtaatgcaatggattctatgtacagaagcaactcacaaagcgatggtgtcaattggagcagtattccttttgatcgatcaaacagttgtcaagaaggccggagctccgacaagaacatagatagtgcacgtgcaagcttagctcatcggagtaattcatgcttatctgccgtccaagactctgaaaccgctgttgtttcagtagataggcatggagatcccattacttcacttgtttgttctagcagtggtttggaaagtcatggctgtgagcctagtggatcagccaccacctcaggtaatcaacagctattggatttgaacctggcagcgatatttcaggacagattaaatgatccaaggatttcatctatgctaaaaaagaatggtggacttggagatgtagaactggctaatcttcttcaggataaaggactagatccaaatttttcgtacatgctgaaagacaaagttatggatccacgtattttagctttgctacagaggagcagcttggatgcagatagagagcatcaagatgacgtagatgtcacagctactgattcagatagattggataccactattgcaaatcagatttctctgtcagaagaactaaggagaagtggtctagaaaaatggttgaacatttcaaggctaatattccatcatttagctggatctccaatacgtgcttttattgttttcacagtaatgtttataatagagactgctactgtggctatctatcggccagagaccatcaaggtgataaatgcaacacatgaacagtttgaatttggtttctcgatactgcttctgtcaccagttgtctgctccattatggcattcatttggtctctgcgtgctgaagaaatgttgatgacatccaagccccagaagtatggtttcattgcatggctactgagcacatgtgttggtttgtttctctctttcttaagcaaatcatctgttatattgggcctgtctctcacggtaccacttatggtggcttgcctctcatttgctgttcccatatggatacgcaatggttacagtttctggattcctggaagggagtttgcaaatcgtgaaaatgttagtcaagctccaggagagaaagagcgggctctctttgttatcaccattgctgttttcactgcatcaattattggccttggtgcaatagtgtcagcaaagcctttagacgctctaggctataaaggatgggatgctgataagaacagctcctattctccctatgcaacatcaatgtatcttggatgggcattgtcttcaacaattgctgtgattaccacagggttgatacctattgttgcttggtttgcaacataccggttttcaccttcatcagctatatgtgttggcctctttgcaactgttcttgtgtctttttgcggtgcatcctactggggagtggtaaattcacgagaggatggtgttcctctaaaggctgatttccttgcagcattacttcccttgctttgcattccagcatttttctcactgttcactgggctttacaaatggaaggatgatgattggaagatttctcgtggtgtttacctttttgttggcatgggaatgttgctgttgtttggtgcagttgcagctgttattgtcacaatcaggccctggactgttggagttgcttgcctcgtagccattctgttccttgtatttgttattggggtcatccactactggacatctaacaacttctatctaacgaggactcagatgttgcttgtttgttccattgcttttctcttagccttggctgccttcctgatgggtttatttcacggaaagccttttgttggagcatctataggttatttctcatttatatttcttctcactggaagggctttgactgtccttctatcaccgccaatcgtagtgtattcgccaagagtattgcctgtatacgtttatgatgctcatgcagactctgctaaaaatgttagctatgcctttcttattctgtatgggattgcattagcaactgaagtttggggtgttattgctagtctaataatgaatccaccatttgttggggctggcgtttctgctactactcttgtaattgctttcagttttgctgtttctcgaccatgcctgactcttaagatgatggaggatgcagttcattttctcagcaaggatacagttgtgcaagcgatgtcacggtctgctaataaaactagaaatgctatatctgggacttactcagcacctcagaggatctttcttatgtggagtaaaagattgtttactaatttgcccccagtccctgtcaaacatagattatcggaggaatatgtgtgcccatgcacgtattttggctttggaagaagcaattgatacagaatgggtgtatatgtgggacaaatttggtggttatttacttctgttgcttggattgactgccaaagctgaacaaatacaggatgaagttcgtctaagactctttttggatagcataggcctttccgatttgagtgccaaagaaattaagaaatggatgcctgaagatcggaggcaatttgagcttattcaagaaagctacataagggaaaaagaaatggaagaggaggctttgatgcaaagacgagaggaagaagggaagggaagagaaaggaggagggcattgctagagagagaggagcgaaaatggaaggagctcgaaatatcattgctttcttccattccaaatactggaagcagggatgctgcagctatggcagcagctgtcagagctgttggaggtgattctgccctggaagattcttttgcaagagatagggtctcttcaatagccaatcacatacgaaaggcacaattggctcggcgagcagaacagactggtattccaggcactatatgcatactcgatgatgaaccgaggagtactggtcgtcattgtggagaacttgacttgtgcctctgtcaaagtcaaaaggttactttgtctattgctgtcatggttcagcctgtatctggcccagtgtgtctttttggaagtgaattccaaaaggtttgttgggaaatcttagtggcaggatcagaacagggtatggaagctggacaagttggtcttcgattagtaactaagggtgaaaggatgactactgttgctaaagagtggaatattggtgcgtctagtattgcagatggcaggtggcatcttgtcactgtaactttagatgccgacctaggtgaagcaacttctttcattgatggagtttatgatggatatcagaatgggttgccgttgccaacagataacggtatttgggaacctggaactgatatttgggttggtgctaggccacccatggacttagatgcctttggtaggtcagatagcgaaggttctgactcaaagatgcagatcatggatgcttttctatggggaagatgtctcagtgaagatgaggttactgttttacatactgccatgtctcctgctgagtatggattttttgaccttgcacccggcgatgcttggcatggaagttattctgcaagggtggatgactgggaaagcgaagaagcttatgagctttatgatcaaggggatgtcgaatgggatggacagtactcaagtggtaggaaacgtccggtacatgatgctgtagctattgaccttgactcctttgctaggagaccaagaaaaccaaggtttgagacacgtgatgaagtcaaccagcgtatgctttctgttgaaagggctgtcagggatgctcttatcgcgaaaggagagagaaacttcactgatcaagagttccctccagaggatcgttctttatttgtagatccgatgaatccacctctgaaactgcaggttgtttctgagtggatgaggccttctgacatagcaaaggatatatctatcagttgtcagccttgcttgttttcgggttctgtgaattcctcagatgtgtgtcagggtcggttgggagactgttggttcctaagtgcagtcgcagttttaactgagatgtctcggatatcagaagttataatcactcccgagtacaatgatgaagggatttatacagtcagattctgtattcaggtacccaatattccaatgtttaaaccatttgactgataagtatctgctcaacttgaattgctccttttctattaatatactagccttgtgtcatctggtcagtatgttatctaggaaggttcagttgattcattttgcaaagtttataatacagttatcttaaaatgttagaccaaaaaatcacggtgaagtttaccatttgacaatcatatgtccagtttaatattagagttctatttctgaagcaaatgtgtacatcatgctacatgcatcgataacatatttaactgtgtcaggaaaaataaattattttattagttttttttgaagggaaaaccgtaggaaattccctacagtgaaatatattgaattaaattaggaaaaataaggacgaccgctgtacaaaaccgaaaaataggaaaaaggaaaggggggaaaggcaaagaacatcccaaattacaactccaataactagcaagatataagggataattattttattaatagttcattggtctgcaatatttactggagccatgctggagtcatcttggatgtgcactgctctatggagatatatactgcatgattggttggttgggccccgcgccgaggtcccgtgcatgcgttgactgcgcttggccgtgtgcttgattggctgcacggcagcgaccgagcctgtgtgcgcaggtgcaaggcctccgcgagtcaggcgcggaggctgctagcaaccaaacaggaggataatgtatattactaaaaatagtagcttagttatacttcacctctgcaatgtaagtacttgcctccctcaatactttttatgccctgacctggtaagtccctcagtgacacactgacacctatctataaacctgaggttggtaagaaaatacctttctgttactgatcccatgtggtttccgtgtgttgttgatatcgatttcaggagtgatatctttatatcacaatacaaattggctgtagttggtgtaaccagaagggaaaaacagtgcacatgaagagcacttgtaatatgttttttattagggcttaacactaagggctgatttggtgaccagg

SEQ ID NO: 1424 - DNA, 7120 bp, Zea Mays
cgctgccttcccacttccgtccgcagtccgctgcattgctcgcgtgtgttctgtctgtcactctcgcccagtcgccctcctcttgctctccgacgactggtgggccgccgctgccgccgccgccgccgccgccctacgccaggtgctgaggctttcatcggtctcttcgccggtgtctttgccggcgtcgagcacccgccaggctatccatgatttttgcctacaaaaggtgattgaaaaggggggaggatggaaggggagggacaccacggagttgttttggcatgcagcatctgtgggttcctcttcgctgtccttagccctttcagcttttgggttttatgggctgtgaattggaggccatggaggttatacagttggatatatgcaaggaaatggccaacatatgttcaaggacctcaattgagcacactttgcagccttttgactctttgtgcatggcttgttgtcatttcccctatagcagttctgctcgtgtggggaagcgtccttattgctcttatggaaaggaatataattggtttagctgttataatggcgggtgttgctttgctcctgtcattctactctataatgctctggtggagaacacaatggcaaagctcccaggctgttgcttaccttctcctcctggcagtatgcctgctatgtgcctacgatttttgtgctatttatgtgacagctggtgctagtgcttccgagcttaattctccatcagggttcttcttcggggtgtctgtaatatcattggccatcaatatgctttttatatgtaaaatactgtttaatgtaagtggatttgatgttgatgaatatgtgcggaggtcatacaaatttgcctattctgactgtgttgaagtggctcctgtttcatgctctcctgagccaccggatcctagtgaattatacatgacaaaatccagcagggtcaagcatttagggcttctgtacattagctctctgcttgtgcttgttggttattccatcttgtacggtcttacgtcaaaagaagctcgttggttgggtgctttaacttcagttgcagttgttatccttgactggaatctgggcttatgttcatttagatttgagcttcttaaaagtaggatgatagtgttatttgtggctggaacatcaagggctttccttgtatcctttggagtgcattactggtaccttggccattgcatcagctatgcttttgtagcatctgtgcttttatctgctgctgtttcttcctggctttctatttcaaacccctcagttgcaaggatagacgctctaagaagtacggtaataaagctacgagagggatttcgaagaaaaggacaaaatagttcttcaaattcatcagaaggctgtggctctagtgtgaagcgtagtagcggtagtgttgaagctggtcaaaatggtaatgcaatggattctatgtacagaagcaactcacaaagcgatggtgtcaattggagcagtattccttttgatcgatcaaacagttgtcaagaaggccggagctccgacaagaacatagatagtgcacgtgcaagcttagctcatcggagtaattcatgcttatctgccgtccaagactctgaaaccgctgttgtttcagtagataggcatggagatcccattacttcacttgtttgttctagcagtggtttggaaagtcatggctgtgagcctagtggatcagccaccacctcaggtaatcaacagctattggatttgaacctggcagcgatatttcaggacagattaaatgatccaaggatttcatctatgctaaaaaagaatggtggacttggagatgtagaactggctaatcttcttcaggataaaggactagatccaaatttttcgtacatgctgaaagacaaagttatggatccacgtattttagctttgctacagaggagcagcttggatgcagatagagagcatcaagatgacgtagatgtcacagctactgattcagatagattggataccactattgcaaatcagatttctctgtcagaagaactaaggagaagtggtctagaaaaatggttgaacatttcaaggctaatattccatcatttagctggatctccaatacgtgcttttattgttttcacagtaatgtttataatagagactgctactgtggctatctatcggccagagaccatcaaggtgataaatgcaacacatgaacagtttgaatttggtttctcgatactgcttctgtcaccagttgtctgctccattatggcattcatttggtctctgcgtgctgaagaaatgttgatgacatccaagccccagaagtatggtttcattgcatggctactgagcacatgtgttggtttgtttctctctttcttaagcaaatcatctgttatattgggcctgtctctcacggtaccacttatggtggcttgcctctcatttgctgttcccatatggatacgcaatggttacagtttctggattcctggaagggagtttgcaaatcgtgaaaatgttagtcaagctccaggagagaaagagcgggctctctttgttatcaccattgctgttttcactgcatcaattattggccttggtgcaatagtgtcagcaaagcctttagacgctctaggctataaaggatgggatgctgataagaacagctcctattctccctatgcaacatcaatgtatcttggatgggcattgtcttcaacaattgctgtgattaccacagggttgatacctattgttgcttggtttgcaacataccggttttcaccttcatcagctatatgtgttggcctctttgcaactgttcttgtgtctttttgcggtgcatcctactggggagtggtaaattcacgagaggatggtgttcctctaaaggctgatttccttgcagcattacttcccttgctttgcattccagcatttttctcactgttcactgggctttacaaatggaaggatgatgattggaagatttctcgtggtgtttacctttttgttggcatgggaatgttgctgttgtttggtgcagttgcagctgttattgtcacaatcaggccctggactgttggagttgcttgcctcgtagccattctgttccttgtatttgttattggggtcatccactactggacatctaacaacttctatctaacgaggactcagatgttgcttgtttgttccattgcttttctcttagccttggctgccttcctgatgggtttatttcacggaaagccttttgttggagcatctataggttatttctcatttatatttcttctcactggaagggctttgactgtccttctatcaccgccaatcgtagtgtattcgccaagagtattgcctgtatacgtttatgatgctcatgcagactctgctaaaaatgttagctatgcctttcttattctgtatgggattgcattagcaactgaagtttggggtgttattgctagtctaataatgaatccaccatttgttggggctggcgtttctgctactactcttgtaattgctttcagttttgctgtttctcgaccatgcctgactcttaagatgatggaggatgcagttcattttctcagcaaggatacagttgtgcaagcgatgtcacggtctgctaataaaactagaaatgctatatctgggacttactcagcacctcagaggtccgcaagttctgctgctcttttggttggagatcctgctcttacattggacagggctgggaactttgtgcttcctagggctgatgttatgaaactgagagatcgtttgagaaatgaagaaattgctgcaggatctttcttatgtggagtaaaagattgtttactaatttgcccccagtccctgtcaaacatagattatcggaggaatatgtgtgcccatgcacgtattttggctttggaagaagcaattgatacagaatgggtgtatatgtgggacaaatttggtggttatttacttctgttgcttggattgactgccaaagctgaacaaatacaggatgaagttcgtctaagactctttttggatagcataggcctttccgatttgagtgccaaagaaattaagaaatggatgcctgaagatcggaggcaatttgagcttattcaagaaagctacataagggaaaaagaaatggaagaggaggctttgatgcaaagacgagaggaagaagggaagggaagagaaaggaggagggcattgctagagagagaggagcgaaaatggaaggagctcgaaatatcattgctttcttccattccaaatactggaagcagggatgctgcagctatggcagcagctgtcagagctgttggaggtgattctgccctggaagattcttttgcaagagatagggtctcttcaatagccaatcacatacgaaaggcacaattggctcggcgagcagaacagactggtattccaggcactatatgcatactcgatgatgaaccgaggagtactggtcgtcattgtggagaacttgacttgtgcctctgtcaaagtcaaaaggttactttgtctattgctgtcatggttcagcctgtatctggcccagtgtgtctttttggaagtgaattccaaaaggtttgttgggaaatcttagtggcaggatcagaacagggtatggaagctggacaagttggtcttcgattagtaactaagggtgaaaggatgactactgttgctaaagagtggaatattggtgcgtctagtattgcagatggcaggtggcatcttgtcactgtaactttagatgccgacctaggtgaagcaacttctttcattgatggagtttatgatggatatcagaatgggttgccgttgccaacagataacggtatttgggaacctggaactgatatttgggttggtgctaggccacccatggacttagatgcctttggtaggtcagatagcgaaggttctgactcaaagatgcagatcatggatgcttttctatggggaagatgtctcagtgaagatgaggttactgttttacatactgccatgtctcctgctgagtatggattttttgaccttgcacccggcgatgcttggcatggaagttattctgcaagggtggatgactgggaaagcgaagaagcttatgagctttatgatcaaggggatgtcgaatgggatggacagtactcaagtggtaggaaacgtccggtacatgatgctgtagctattgaccttgactcctttgctaggagaccaagaaaaccaaggtttgagacacgtgatgaagtcaaccagcgtatgctttctgttgaaagggctgtcagggatgctcttatcgcgaaaggagagagaaacttcactgatcaagagttccctccagaggatcgttctttatttgtagatccgatgaatccacctctgaaactgcaggttgtttctgagtggatgaggccttctgacatagcaaaggatatatctatcagttgtcagccttgcttgttttcgggttctgtgaattcctcagatgtgtgtcagggtcggttgggagactgttggttcctaagtgcagtcgcagttttaactgagatgtctcggatatcagaagttataatcactcccgagtacaatgatgaagggatttatacagtcagattctgtattcagggtgagtgggtggccgtggttgttgatgattggattccttgcgagtctccggggaaaccagcatttgctactagtagaaagcaaaacgagctttgggtatccattcttgagaaggcttatgcaaaacttcatggctcttatgaggcattggaaggtgggcttgttcaagatgctctagtcgatctcacaggaggagctggtgaagagattgatatgcgaagtcctcaagcccaacttgatcttgctagtggaagattgtggtcgcagttgttgcatttcaaacaagaaggtaagagaagttgatggccacaaactcatccaaatcagaaatccatgggcaaatgaagttgaatggaatggaccatggtcagactcgtcaccagagtggacggaacggatgaagcataagctcatgcatgttccacagtcgaagaatggggtattctggatgtcttggcaagattttcagattcactttcggtcaatatatgtttgtcgtgtttatccacctgagatgcgttactctgtccatgggcaatggcgtggctacaatgcaggtggttgccaagattatgactcgtggcaccaaaatccacagtatcgacttagagtaacaggacgtgatgcactataccctgttcacgtttttattacccttactcagggtgttggtttctctagaaagacgaatggttttcggaactaccaatctagccatgattcttcaatgttttacattggaatgaggatactcaagacacagggctgccgtgctgcttacaatatctacatgcatgaaagcgctggtggaacagattacgttaactcgagggagatatcatgcgaactggtcttggatccttatcccaaagggtacacaattgtgccaactaccatccaccctggggaggaagcaccttttgttttgtcagttttttcaaaagcatcaatcagactagaggctgtttagttcaagattgagatcccatgtgtttgatggtagctgcgtctgctgggcacccgtgcacgcaggatccagctgtgggttctcgggaactagataatgatctgacaaacggcaatgcttcttgtgctgaagggaaaggagagaaggcatgatccatggttctttggtagctgcgcaaagtgcagggtgagaggcttggttcaatgtttgtagatagccgtggtaactgacctggtagcccatcctatgtataggtgtcccgtttaccctgtaaatgctatagagttaggttaggtagcctgtcgttcctgttaacgcatagggctcttatgcagctgtgaaatgtcttgttagcaagctgcagttttgctgatttgagcgtggagtagtcggccatagctgttcccattggtttgccctgtatgtaatcggaatctgatgtcattcaatgaacctattttttgggtgccatgcgaagctgtctaa

SEQ ID NO: 1425 - DNA, 7289 bp, Zea Mays
cgctgccttcccacttccgtccgcagtccgctgcattgctcgcgtgtgttctgtctgtcactctcgcccagtcgccctcctcttgctctccgacgactggtgggccgccgctgccgccgccgccgccgccgccctacgccaggtgctgaggctttcatcggtctcttcgccggtgtctttgccggcgtcgagcacccgccaggctatccatgatttttgcctacaaaaggtgattgaaaaggggggaggatggaaggggagggacaccacggagttgttttggcatgcagcatctgtgggttcctcttcgctgtccttagccctttcagcttttgggttttatgggctgtgaattggaggccatggaggttatacagttggatatatgcaaggaaatggccaacatatgttcaaggacctcaattgagcacactttgcagccttttgactctttgtgcatggcttgttgtcatttcccctatagcagttctgctcgtgtggggaagcgtccttattgctcttatggaaaggaatataattggtttagctgttataatggcgggtgttgctttgctcctgtcattctactctataatgctctggtggagaacacaatggcaaagctcccaggctgttgcttaccttctcctcctggcagtatgcctgctatgtgcctacgatttttgtgctatttatgtgacagctggtgctagtgcttccgagcttaattctccatcagggttcttcttcggggtgtctgtaatatcattggccatcaatatgctttttatatgtaaaatactgtttaatgtaagtggatttgatgttgatgaatatgtgcggaggtcatacaaatttgcctattctgactgtgttgaagtggctcctgtttcatgctctcctgagccaccggatcctagtgaattatacatgacaaaatccagcagggtcaagcatttagggcttctgtacattagctctctgcttgtgcttgttggttattccatcttgtacggtcttacgtcaaaagaagctcgttggttgggtgctttaacttcagttgcagttgttatccttgactggaatctgggcttatgttcatttagatttgagcttcttaaaagtaggatgatagtgttatttgtggctggaacatcaagggctttccttgtatcctttggagtgcattactggtaccttggccattgcatcagctatgcttttgtagcatctgtgcttttatctgctgctgtttcttcctggctttctatttcaaacccctcagttgcaaggatagacgctctaagaagtacggtaataaagctacgagagggatttcgaagaaaaggacaaaatagttcttcaaattcatcagaaggctgtggctctagtgtgaagcgtagtagcggtagtgttgaagctggtcaaaatggtaatgcaatggattctatgtacagaagcaactcacaaagcgatggtgtcaattggagcagtattccttttgatcgatcaaacagttgtcaagaaggccggagctccgacaagaacatagatagtgcacgtgcaagcttagctcatcggagtaattcatgcttatctgccgtccaagactctgaaaccgctgttgtttcagtagataggcatggagatcccattacttcacttgtttgttctagcagtggtttggaaagtcatggctgtgagcctagtggatcagccaccacctcaggtaatcaacagctattggatttgaacctggcagcgatatttcaggacagattaaatgatccaaggatttcatctatgctaaaaaagaatggtggacttggagatgtagaactggctaatcttcttcaggataaaggactagatccaaatttttcgtacatgctgaaagacaaagttatggatccacgtattttagctttgctacagaggagcagcttggatgcagatagagagcatcaagatgacgtagatgtcacagctactgattcagatagattggataccactattgcaaatcagatttctctgtcagaagaactaaggagaagtggtctagaaaaatggttgaacatttcaaggctaatattccatcatttagctggatctccaatacgtgcttttattgttttcacagtaatgtttataatagagactgctactgtggctatctatcggccagagaccatcaaggtgataaatgcaacacatgaacagtttgaatttggtttctcgatactgcttctgtcaccagttgtctgctccattatggcattcatttggtctctgcgtgctgaagaaatgttgatgacatccaagccccagaagtatggtttcattgcatggctactgagcacatgtgttggtttgtttctctctttcttaagcaaatcatctgttatattgggcctgtctctcacggtaccacttatggtggcttgcctctcatttgctgttcccatatggatacgcaatggttacagtttctggattcctggaagggagtttgcaaatcgtgaaaatgttagtcaagctccaggagagaaagagcgggctctctttgttatcaccattgctgttttcactgcatcaattattggccttggtgcaatagtgtcagcaaagcctttagacgctctaggctataaaggatgggatgctgataagaacagctcctattctccctatgcaacatcaatgtatcttggatgggcattgtcttcaacaattgctgtgattaccacagggttgatacctattgttgcttggtttgcaacataccggttttcaccttcatcagctatatgtgttggcctctttgcaactgttcttgtgtctttttgcggtgcatcctactggggagtggtaaattcacgagaggatggtgttcctctaaaggctgatttccttgcagcattacttcccttgctttgcattccagcatttttctcactgttcactgggctttacaaatggaaggatgatgattggaagatttctcgtggtgtttacctttttgttggcatgggaatgttgctgttgtttggtgcagttgcagctgttattgtcacaatcaggccctggactgttggagttgcttgcctcgtagccattctgttccttgtatttgttattggggtcatccactactggacatctaacaacttctatctaacgaggactcagatgttgcttgtttgttccattgcttttctcttagccttggctgccttcctgatgggtttatttcacggaaagccttttgttggagcatctataggttatttctcatttatatttcttctcactggaagggctttgactgtccttctatcaccgccaatcgtagtgtattcgccaagagtattgcctgtatacgtttatgatgctcatgcagactctgctaaaaatgttagctatgcctttcttattctgtatgggattgcattagcaactgaagtttggggtgttattgctagtctaataatgaatccaccatttgttggggctggcgtttctgctactactcttgtaattgctttcagttttgctgtttctcgaccatgcctgactcttaagatgatggaggatgcagttcattttctcagcaaggatacagttgtgcaagcgatgtcacggtctgctaataaaactagaaatgctatatctgggacttactcagcacctcagaggtccgcaagttctgctgctcttttggttggagatcctgctcttacattggacagggctgggaactttgtgcttcctagggctgatgttatgaaactgagagatcgtttgagaaatgaagaaattgctgcaggatctttcttatgtggagtaaaagattgtttactaatttgcccccagtccctgtcaaacatagattatcggaggaatatgtgtgcccatgcacgtattttggctttggaagaagcaattgatacagaatgggtgtatatgtgggacaaatttggtggttatttacttctgttgcttggattgactgccaaagctgaacaaatacaggatgaagttcgtctaagactctttttggatagcataggcctttccgatttgagtgccaaagaaattaagaaatggatgcctgaagatcggaggcaatttgagcttattcaagaaagctacataagggaaaaagaaatggaagaggaggctttgatgcaaagacgagaggaagaagggaagggaagagaaaggaggagggcattgctagagagagaggagcgaaaatggaaggagctcgaaatatcattgctttcttccattccaaatactggaagcagggatgctgcagctatggcagcagctgtcagagctgttggaggtgattctgccctggaagattcttttgcaagagatagggtctcttcaatagccaatcacatacgaaaggcacaattggctcggcgagcagaacagactggtattccaggcactatatgcatactcgatgatgaaccgaggagtactggtcgtcattgtggagaacttgacttgtgcctctgtcaaagtcaaaaggttactttgtctattgctgtcatggttcagcctgtatctggcccagtgtgtctttttggaagtgaattccaaaaggtttgttgggaaatcttagtggcaggatcagaacagggtatggaagctggacaagttggtcttcgattagtaactaagggtgaaaggatgactactgttgctaaagagtggaatattggtgcgtctagtattgcagatggcaggtggcatcttgtcactgtaactttagatgccgacctaggtgaagcaacttctttcattgatggagtttatgatggatatcagaatgggttgccgttgccaacagataacggtatttgggaacctggaactgatatttgggttggtgctaggccacccatggacttagatgcctttggtaggtcagatagcgaaggttctgactcaaagatgcagatcatggatgcttttctatggggaagatgtctcagtgaagatgaggttactgttttacatactgccatgtctcctgctgagtatggattttttgaccttgcacccggcgatgcttggcatggaagttattctgcaagggtggatgactgggaaagcgaagaagcttatgagctttatgatcaaggggatgtcgaatgggatggacagtactcaagtggtaggaaacgtccggtacatgatgctgtagctattgaccttgactcctttgctaggagaccaagaaaaccaaggtttgagacacgtgatgaagtcaaccagcgtatgctttctgttgaaagggctgtcagggatgctcttatcgcgaaaggagagagaaacttcactgatcaagagttccctccagaggatcgttctttatttgtagatccgatgaatccacctctgaaactgcaggttgtttctgagtggatgaggccttctgacatagcaaaggatatatctatcagttgtcagccttgcttgttttcgggttctgtgaattcctcagatgtgtgtcagggtcggttgggagactgttggttcctaagtgcagtcgcagttttaactgagatgtctcggatatcagaagttataatcactcccgagtacaatgatgaagggatttatacagtcagattctgtattcagggtgagtgggtggccgtggttgttgatgattggattccttgcgagtctccggggaaaccagcatttgctactagtagaaagcaaaacgagctttgggtatccattcttgagaaggcttatgcaaaacttcatggctcttatgaggcattggaaggtgggcttgttcaagatgctctagtcgatctcacaggaggagctggtgaagagattgatatgcgaagtcctcaagcccaacttgatcttgctagtggaagattgtggtcgcagttgttgcatttcaaacaagaaggttttcttcttggtgctggaagtccttctggatctgatgctcacatctcatcaagtggcattgttcagggacatgcgtactcaattttgcaggtaagagaagttgatggccacaaactcatccaaatcagaaatccatgggcaaatgaagttgaatggaatggaccatggtcagactcgtcaccagagtggacggaacggatgaagcataagctcatgcatgttccacagtcgaagaatggggtattctggatgtcttggcaagattttcagattcactttcggtcaatatatgtttgtcgtgtttatccacctgagatgcgttactctgtccatgggcaatggcgtggctacaatgcaggtggttgccaagattatgactcgtggcaccaaaatccacagtatcgacttagagtaacaggacgtgatgcactataccctgttcacgtttttattacccttactcagggtgttggtttctctagaaagacgaatggttttcggaactaccaatctagccatgattcttcaatgttttacattggaatgaggatactcaagacacagggctgccgtgctgcttacaatatctacatgcatgaaagcgctggtggaacagattacgttaactcgagggagatatcatgcgaactggtcttggatccttatcccaaagggtacacaattgtgccaactaccatccaccctggggaggaagcaccttttgttttgtcagttttttcaaaagcatcaatcagactagaggctgtttagttcaagattgagatcccatgtgtttgatggtagctgcgtctgctgggcacccgtgcacgcaggatccagctgtgggttctcgggaactagataatgggtataggaattgcctcctggacaacttcaatcaatcttgctgcatgcaagtacctaagttcggttgcttgttgcagatctgacaaacggcaatgcttcttgtgctgaagggaaaggagagaaggcatgatccatggttctttggtagctgcgcaaagtgcagggtgagaggcttggttcaatgtttgtagatagccgtggtaactgacctggtagcccatcctatgtataggtgtcccgtttaccctgtaaatgctatagagttaggttaggtagcctgtcgttcctgttaacgcatagggctcttatgcagctgtgaaatgtcttgttagcaagctgcagttttgctgatttgagcgtggagtagtcggccatagctgttcccattggtttgccctgtatgtaatcggaatctgatgtcattcaatgaacctattttttgggtgccatgcgaagctgtctaa

SEQ ID NO: 1426 - DNA, 6534 bp, Zea Mays
cttgcaggctatccatgatttttgcctacaaaaggtgattgaaaaggggggaggatggaaggggagggacaccacggagttgttttggcatgcagcatctgtgggttcctcttcgctgtccttagccctttcagcttttgggttttatgggctgtgaattggaggccatggaggttatacagttggatatatgcaaggaaatggccaacatatgttcaaggacctcaattgagcacactttgcagccttttgactctttgtgcatggcttgttgtcatttcccctatagcagttctgctcgtgtggggaagcgtccttattgctcttatggaaaggaatataattggtttagctgttataatggcgggtgttgctttgctcctgtcattctactctataatgctctggtggagaacacaatggcaaagctcccaggctgttgcttaccttctcctcctggcagtatgcctgctatgtgcctacgatttttgtgctatttatgtgacagctggtgctagtgcttccgagcttaattctccatcagggttcttcttcggggtgtctgtaatatcattggccatcaatatgctttttatatgtaaaatactgtttaatgtaagtggatttgatgttgatgaatatgtgcggaggtcatacaaatttgcctattctgactgtgttgaagtggctcctgtttcatgctctcctgagccaccggatcctagtgaattatacatgacaaaatccagcagggtcaagcatttagggcttctgtacattagctctctgcttgtgcttgttggttattccatcttgtacggtcttacgtcaaaagaagctcgttggttgggtgctttaacttcagttgcagttgttatccttgactggaatctgggcttatgttcatttagatttgagcttcttaaaagtaggatgatagtgttatttgtggctggaacatcaagggctttccttgtatcctttggagtgcattactgctatgcttttgtagcatctgtgcttttatctgctgctgtttcttcctggctttctatttcaaacccctcagttgcaaggatagacgctctaagaagtacggtaataaagctacgagagggatttcgaagaaaaggacaaaatagttcttcaaattcatcagaaggctgtggctctagtgtgaagcgtagtagcggtagtgttgaagctggtcaaaatggtaatgcaatggattctatgtacagaagcaactcacaaagcgatggtgtcaattggagcagtattccttttgatcgatcaaacagttgtcaagaaggccggagctccgacaagaacatagatagtgcacgtgcaagcttagctcatcggagtaattcatgcttatctgccgtccaagactctgaaaccgctgttgtttcagtagataggcatggagatcccattacttcacttgtttgttctagcagtggtttggaaagtcatggctgtgagcctagtggatcagccaccacctcaggtaatcaacagctattggatttgaacctggcagcgatatttcaggacagattaaatgatccaaggatttcatctatgctaaaaaagaatggtggacttggagatgtagaactggctaatcttcttcaggataaaggactagatccaaatttttcgtacatgctgaaagacaaagttatggatccacgtattttagctttgctacagaggagcagcttggatgcagatagagagcatcaagatgacgtagatgtcacagctactgattcagatagattggataccactattgcaaatcagatttctctgtcagaagaactaaggagaagtggtctagaaaaatggttgaacatttcaaggctaatattccatcatttagctggatctccaatacgtgcttttattgttttcacagtaatgtttataatagagactgctactgtggctatctatcggccagagaccatcaaggtgataaatgcaacacatgaacagtttgaatttggtttctcgatactgcttctgtcaccagttgtctgctccattatggcattcatttggtctctgcgtgctgaagaaatgttgatgacatccaagccccagaagtatggtttcattgcatggctactgagcacatgtgttggtttgtttctctctttcttaagcaaatcatctgttatattgggcctgtctctcacggtaccacttatggtggcttgcctctcatttgctgttcccatatggatacgcaatggttacagtttctggattcctggaagggagtttgcaaatcgtgaaaatgttagtcaagctccaggagagaaagagcgggctctctttgttatcaccattgctgttttcactgcatcaattattggccttggtgcaatagtgtcagcaaagcctttagacgctctaggctataaaggatgggatgctgataagaacagctcctattctccctatgcaacatcaatgtatcttggatgggcattgtcttcaacaattgctgtgattaccacagggttgatacctattgttgcttggtttgcaacataccggttttcaccttcatcagctatatgtgttggcctctttgcaactgttcttgtgtctttttgcggtgcatcctactggggagtggtaaattcacgagaggatggtgttcctctaaaggctgatttccttgcagcattacttcccttgctttgcattccagcatttttctcactgttcactgggctttacaaatggaaggatgatgattggaagatttctcgtggtgtttacctttttgttggcatgggaatgttgctgttgtttggtgcagttgcagctgttattgtcacaatcaggccctggactgttggagttgcttgcctcgtagccattctgttccttgtatttgttattggggtcatccactactggacatctaacaacttctatctaacgaggactcagatgttgcttgtttgttccattgcttttctcttagccttggctgccttcctgatgggtttatttcacggaaagccttttgttggagcatctataggttatttctcatttatatttcttctcactggaagggctttgactgtccttctatcaccgccaatcgtagtgtattcgccaagagtattgcctgtatacgtttatgatgctcatgcagactctgctaaaaatgttagctatgcctttcttattctgtatgggattgcattagcaactgaagtttggggtgttattgctagtctaataatgaatccaccatttgttggggctggcgtttctgctactactcttgtaattgctttcagttttgctgtttctcgaccatgcctgactcttaagatgatggaggatgcagttcattttctcagcaaggatacagttgtgcaagcgatgtcacggtctgctaataaaactagaaatgctatatctgggacttactcagcacctcagaggtccgcaagttctgctgctcttttggttggagatcctgctcttacattggacagggctgggaactttgtgcttcctagggctgatgttatgaaactgagagatcgtttgagaaatgaagaaattgctgcaggatctttcttatgtggagtaaaagattgtttactaatttgcccccagtccctgtcaaacatagattatcggaggaatatgtgtgcccatgcacgtattttggctttggaagaagcaattgatacagaatgggtgtatatgtgggacaaatttggtggttatttacttctgttgcttggattgactgccaaagctgaacaaatacaggatgaagttcgtctaagactctttttggatagcataggcctttccgatttgagtgccaaagaaattaagaaatggatgcctgaagatcggaggcaatttgagcttattcaagaaagctacataagggaaaaagaaatggaagaggaggctttgatgcaaagacgagaggaagaagggaagggaagagaaaggaggagggcattgctagagagagaggagcgaaaatggaaggagctcgaaatatcattgctttcttccattccaaatactggaagcagggatgctgcagctatggcagcagctgtcagagctgttggaggtgattctgccctggaagattcttttgcaagagatagggtctcttcaatagccaatcacatacgaaaggcacaattggctcggcgagcagaacagactggtattccaggcactatatgcatactcgatgatgaaccgaggagtactggtcgtcattgtggagaacttgacttgtgcctctgtcaaagtcaaaaggttactttgtctattgctgtcatggttcagcctgtatctggcccagtgtgtctttttggaagtgaattccaaaaggtttgttgggaaatcttagtggcaggatcagaacagggtatggaagctggacaagttggtcttcgattagtaactaagggtgaaaggatgactactgttgctaaagagtggaatattggtgcgtctagtattgcagatggcaggtggcatcttgtcactgtaactttagatgccgacctaggtgaagcaacttctttcattgatggagtttatgatggatatcagaatgggttgccgttgccaacagataacggtatttgggaacctggaactgatatttgggttggtgctaggccacccatggacttagatgcctttggtaggtcagatagcgaaggttctgactcaaagatgcagatcatggatgcttttctatggggaagatgtctcagtgaagatgaggttactgttttacatactgccatgtctcctgctgagtatggattttttgaccttgcacccggcgatgcttggcatggaagttattctgcaagggtggatgactgggaaagcgaagaagcttatgagctttatgatcaaggggatgtcgaatgggatggacagtactcaagtggtaggaaacgtccggtacatgatgctgtagctattgaccttgactcctttgctaggagaccaagaaaaccaaggtttgagacacgtgatgaagtcaaccagcgtatgctttctgttgaaagggctgtcagggatgctcttatcgcgaaaggagagagaaacttcactgatcaagagttccctccagaggatcgttctttatttgtagatccgatgaatccacctctgaaactgcaggttgtttctgagtggatgaggccttctgacatagcaaaggatatatctatcagttgtcagccttgcttgttttcgggttctgtgaattcctcagatgtgtgtcagggtcggttgggagactgttggttcctaagtgcagtcgcagttttaactgagatgtctcggatatcagaagttataatcactcccgagtacaatgatgaagggatttatacagtcagattctgtattcaggtacccaatattccaatgtttaaaccatttgactgataagtatctgctcaacttgaattgctccttttctattaatatactagccttgtgtcatctggtcagtatgttatctaggaaggttcagttgattcattttgcaaagtttataatacagttatcttaaaatgttagaccaaaaaatcacggtgaagtttaccatttgacaatcatatgtccagtttaatattagagttctatttctgaagcaaatgtgtacatcatgctacatgcatcgataacatatttaactgtgtcaggaaaaataaattattttattagttttttttgaagggaaaaccgtaggaaattccctacagtgaaatatattgaattaaattaggaaaaataaggacgaccgctgtacaaaaccgaaaaataggaaaaaggaaaggggggaaaggcaaagaacatcccaaattacaactccaataactagcaagatataagggataattattttattaatagttcattggtctgcaatatttactggagccatgctggagtcatcttggatgtgcactgctctatggagatatatactgcatgattggttggttgggccccgcgccgaggtcccgtgcatgcgttgactgcgcttggccgtgtgcttgattggctgcacggcagcgaccgagcctgtgtgcgcaggtgcaaggcctccgcgagtcaggcgcggaggctgctagcaaccaaacaggaggataatgtatattactaaaaatagtagcttagttatacttcacctctgcaatgtaagtacttgcctccctcaatactttttatgccctgacctggtaagtccctcagtgacacactgacacctatctataaacctgaggttggtaagaaaatacctttctgttactgatcccatgtggtttccgtgtgttgttgatatcgatttcaggagtgatatctttatatcacaatacaaattggctgtagttggtgtaaccagaagggaaaaacagtgcacatgaagagcacttgtaatatgttttttattagggcttaacactaagggctgatttggtgaccagg

SEQ ID NO: 1427 - DNA, 7069 bp, Zea Mays
cttgcaggctatccatgatttttgcctacaaaaggtgattgaaaaggggggaggatggaaggggagggacaccacggagttgttttggcatgcagcatctgtgggttcctcttcgctgtccttagccctttcagcttttgggttttatgggctgtgaattggaggccatggaggttatacagttggatatatgcaaggaaatggccaacatatgttcaaggacctcaattgagcacactttgcagccttttgactctttgtgcatggcttgttgtcatttcccctatagcagttctgctcgtgtggggaagcgtccttattgctcttatggaaaggaatataattggtttagctgttataatggcgggtgttgctttgctcctgtcattctactctataatgctctggtggagaacacaatggcaaagctcccaggctgttgcttaccttctcctcctggcagtatgcctgctatgtgcctacgatttttgtgctatttatgtgacagctggtgctagtgcttccgagcttaattctccatcagggttcttcttcggggtgtctgtaatatcattggccatcaatatgctttttatatgtaaaatactgtttaatgtaagtggatttgatgttgatgaatatgtgcggaggtcatacaaatttgcctattctgactgtgttgaagtggctcctgtttcatgctctcctgagccaccggatcctagtgaattatacatgacaaaatccagcagggtcaagcatttagggcttctgtacattagctctctgcttgtgcttgttggttattccatcttgtacggtcttacgtcaaaagaagctcgttggttgggtgctttaacttcagttgcagttgttatccttgactggaatctgggcttatgttcatttagatttgagcttcttaaaagtaggatgatagtgttatttgtggctggaacatcaagggctttccttgtatcctttggagtgcattactggtaccttggccattgcatcagctatgcttttgtagcatctgtgcttttatctgctgctgtttcttcctggctttctatttcaaacccctcagttgcaaggatagacgctctaagaagtacggtaataaagctacgagagggatttcgaagaaaaggacaaaatagttcttcaaattcatcagaaggctgtggctctagtgtgaagcgtagtagcggtagtgttgaagctggtcaaaatggtaatgcaatggattctatgtacagaagcaactcacaaagcgatggtgtcaattggagcagtattccttttgatcgatcaaacagttgtcaagaaggccggagctccgacaagaacatagatagtgcacgtgcaagcttagctcatcggagtaattcatgcttatctgccgtccaagactctgaaaccgctgttgtttcagtagataggcatggagatcccattacttcacttgtttgttctagcagtggtttggaaagtcatggctgtgagcctagtggatcagccaccacctcaggtaatcaacagctattggatttgaacctggcagcgatatttcaggacagattaaatgatccaaggatttcatctatgctaaaaaagaatggtggacttggagatgtagaactggctaatcttcttcaggataaaggactagatccaaatttttcgtacatgctgaaagacaaagttatggatccacgtattttagctttgctacagaggagcagcttggatgcagatagagagcatcaagatgacgtagatgtcacagctactgattcagatagattggataccactattgcaaatcagatttctctgtcagaagaactaaggagaagtggtctagaaaaatggttgaacatttcaaggctaatattccatcatttagctggatctccaatacgtgcttttattgttttcacagtaatgtttataatagagactgctactgtggctatctatcggccagagaccatcaaggtgataaatgcaacacatgaacagtttgaatttggtttctcgatactgcttctgtcaccagttgtctgctccattatggcattcatttggtctctgcgtgctgaagaaatgttgatgacatccaagccccagaagtatggtttcattgcatggctactgagcacatgtgttggtttgtttctctctttcttaagcaaatcatctgttatattgggcctgtctctcacggtaccacttatggtggcttgcctctcatttgctgttcccatatggatacgcaatggttacagtttctggattcctggaagggagtttgcaaatcgtgaaaatgttagtcaagctccaggagagaaagagcgggctctctttgttatcaccattgctgttttcactgcatcaattattggccttggtgcaatagtgtcagcaaagcctttagacgctctaggctataaaggatgggatgctgataagaacagctcctattctccctatgcaacatcaatgtatcttggatgggcattgtcttcaacaattgctgtgattaccacagggttgatacctattgttgcttggtttgcaacataccggttttcaccttcatcagctatatgtgttggcctctttgcaactgttcttgtgtctttttgcggtgcatcctactggggagtggtaaattcacgagaggatggtgttcctctaaaggctgatttccttgcagcattacttcccttgctttgcattccagcatttttctcactgttcactgggctttacaaatggaaggatgatgattggaagatttctcgtggtgtttacctttttgttggcatgggaatgttgctgttgtttggtgcagttgcagctgttattgtcacaatcaggccctggactgttggagttgcttgcctcgtagccattctgttccttgtatttgttattggggtcatccactactggacatctaacaacttctatctaacgaggactcagatgttgcttgtttgttccattgcttttctcttagccttggctgccttcctgatgggtttatttcacggaaagccttttgttggagcatctataggttatttctcatttatatttcttctcactggaagggctttgactgtccttctatcaccgccaatcgtagtgtattcgccaagagtattgcctgtatacgtttatgatgctcatgcagactctgctaaaaatgttagctatgcctttcttattctgtatgggattgcattagcaactgaagtttggggtgttattgctagtctaataatgaatccaccatttgttggggctggcgtttctgctactactcttgtaattgctttcagttttgctgtttctcgaccatgcctgactcttaagatgatggaggatgcagttcattttctcagcaaggatacagttgtgcaagcgatgtcacggtctgctaataaaactagaaatgctatatctgggacttactcagcacctcagaggtccgcaagttctgctgctcttttggttggagatcctgctcttacattggacagggctgggaactttgtgcttcctagggctgatgttatgaaactgagagatcgtttgagaaatgaagaaattgctgcaggatctttcttatgtggagtaaaagattgtttactaatttgcccccagtccctgtcaaacatagattatcggaggaatatgtgtgcccatgcacgtattttggctttggaagaagcaattgatacagaatgggtgtatatgtgggacaaatttggtggttatttacttctgttgcttggattgactgccaaagctgaacaaatacaggatgaagttcgtctaagactctttttggatagcataggcctttccgatttgagtgccaaagaaattaagaaatggatgcctgaagatcggaggcaatttgagcttattcaagaaagctacataagggaaaaagaaatggaagaggaggctttgatgcaaagacgagaggaagaagggaagggaagagaaaggaggagggcattgctagagagagaggagcgaaaatggaaggagctcgaaatatcattgctttcttccattccaaatactggaagcagggatgctgcagctatggcagcagctgtcagagctgttggaggtgattctgccctggaagattcttttgcaagagatagggtctcttcaatagccaatcacatacgaaaggcacaattggctcggcgagcagaacagactggtattccaggcactatatgcatactcgatgatgaaccgaggagtactggtcgtcattgtggagaacttgacttgtgcctctgtcaaagtcaaaaggttactttgtctattgctgtcatggttcagcctgtatctggcccagtgtgtctttttggaagtgaattccaaaaggtttgttgggaaatcttagtggcaggatcagaacagggtatggaagctggacaagttggtcttcgattagtaactaagggtgaaaggatgactactgttgctaaagagtggaatattggtggcatcttgtcactgtaactttagatgccgacctaggtgaagcaacttctttcattgatggagtttatgatggatatcagaatgggttgccgttgccaacagataacggtatttgggaacctggaactgatatttgggttggtgctaggccacccatggacttagatgcctttggtaggtcagatagcgaaggttctgactcaaagatgcagatcatggatgcttttctatggggaagatgtctcagtgaagatgaggttactgttttacatactgccatgtctcctgctgagtatggattttttgaccttgcacccggcgatgcttggcatggaagttattctgcaagggtggatgactgggaaagcgaagaagcttatgagctttatgatcaaggggatgtcgaatgggatggacagtactcaagtggtaggaaacgtccggtacatgatgctgtagctattgaccttgactcctttgctaggagaccaagaaaaccaaggtttgagacacgtgatgaagtcaaccagcgtatgctttctgttgaaagggctgtcagggatgctcttatcgcgaaaggagagagaaacttcactgatcaagagttccctccagaggatcgttctttatttgtagatccgatgaatccacctctgaaactgcaggttgtttctgagtggatgaggccttctgacatagcaaaggatatatctatcagttgtcagccttgcttgttttcgggttctgtgaattcctcagatgtgtgtcagggtcggttgggagactgttggttcctaagtgcagtcgcagttttaactgagatgtctcggatatcagaagttataatcactcccgagtacaatgatgaagggatttatacagtcagattctgtattcagggtgagtgggtggccgtggttgttgatgattggattccttgcgagtctccggggaaaccagcatttgctactagtagaaagcaaaacgagctttgggtatccattcttgagaaggcttatgcaaaacttcatggctcttatgaggcattggaaggtgggcttgttcaagatgctctagtcgatctcacaggaggagctggtgaagagattgatatgcgaagtcctcaagcccaacttgatcttgctagtggaagattgtggtcgcagttgttgcatttcaaacaagaaggttttcttcttggtgctggaagtccttctggatctgatgctcacatctcatcaagtggcattgttcagggacatgcgtactcaattttgcaggtaagagaagttgatggccacaaactcatccaaatcagaaatccatgggcaaatgaagttgaatggaatggaccatggtcagactcgtcaccagagtggacggaacggatgaagcataagctcatgcatgttccacagtcgaagaatggggtattctggatgtcttggcaagattttcagattcactttcggtcaatatatgtttgtcgtgtttatccacctgagatgcgttactctgtccatgggcaatggcgtggctacaatgcaggtggttgccaagattatgactcgtggcaccaaaatccacagtatcgacttagagtaacaggacgtgatgcactataccctgttcacgtttttattacccttactcagggtgttggtttctctagaaagacgaatggttttcggaactaccaatctagccatgattcttcaatgttttacattggaatgaggatactcaagacacagggctgccgtgctgcttacaatatctacatgcatgaaagcgctggtggaacagattacgttaactcgagggagatatcatgcgaactggtcttggatccttatcccaaagggtacacaattgtgccaactaccatccaccctggggaggaagcaccttttgttttgtcagttttttcaaaagcatcaatcagactagaggctgtttagttcaagattgagatcccatgtgtttgatggtagctgcgtctgctgggcacccgtgcacgcaggatccagctgtgggttctcgggaactagataatgggtataggaattgcctcctggacaacttcaatcaatcttgctgcatgcaagtacctaagttcggttgcttgttgcagatctgacaaacggcaatgcttcttgtgctgaagggaaaggagagaaggcatgatccatggttctttggtagctgcgcaaagtgcagggtgagaggcttggttcaatgtttgtagatagccgtggtaactgacctggtagcccatcctatgtataggtgtcccgtttaccctgtaaatgctatagagttaggttaggtagcctgtcgttcctgttaacgcatagggctcttatgcagctgtgaaatgtcttgttagcaagctgcagttttgctgatttgagcgtggagtagtcggccatagctgttcccattggtttgccctgtatgtaatcggaatctgatgtcattcaatgaacctattttttgggtgccatgcgaagctgtctaa

SEQ ID NO: 1428 - DNA, 2667 bp, Zea Mays
aagaacgcacaaaatagcctgatgaggtaaaactggccggtgactcggcggcctcgtccgctgtgtgcctgcatagcagcctactagcaggccagggcagcagtggcgcttgcctgctcccccgcaacccgctccgctcccctctcttcgtcttcgtcaaggtctagtctagagagaaaaaagggcgagaggcggagagagataaaccccgatacccggaatcgccgtgcaaaatcaaacaaagccagagcggcagatacaataagccgcagctgcagcaagcggcaagccgcatcacagcaggcgccaccgtcacgccaccgcgcagccgagaggggacggacgaaagggggaaatcgcctgcctgcctgccgcggtgggttggcgggggtgcctgcacgggcacggcgtctgtgagttctccttgtttccgccccaagcctggcctgacgtcatcgcgcgcctgcacggcgtcttggtggtgtggtcgaagcagcagaggccgccgccgcgcgggagaagccggcgcgaggaagcggtggccgggccgggggagcgcgatgctgtgggtggcgcgcctgtccggcttcttatccgccgccatggtgatggtggtgctgtcgccgtcgctccagtccttcccgcccgccgaggccatccgctcgtcgcagttcgacggcagcgtccgcttcccgggccagatcgcggggggcgccaggggggtcgccttccgccgcgccccgtcgttccgcaatgccgccgattgcggcgccggcgcgggcaacggcaccgccgccaatgtctgcgacccttcgctcgtccacacggcgattacgctcgacgaggagtacctgaggggctccgtcgccgcggtccactcggtggtgcagcacgccaggtgccccgagagcgtcttcttccacttcctcgtgtccgacccgagcctcggggacctcgtccgcgcggtcttcccgcagctccggttcaaggtctactacttcgaccccgggcgcgtccgcgggctcatctccacgtcggtgcggcaggcgctggagcagccgctcaactatgcgcgcaactacctggccgacctcctcgagccctgcgtgcgccgcgtcatctacctcgactccgacctcgtcctcgtcgatgacgtcgccaagctctggcgcaccgacctcggcggtcgcaccgtcggtgctcccgagtactgccacgccaactttaccaagtacttcaccagccggttctggtcggaccagcggttcgccgggacgttcgtggggcggcggccgtgctacttcaacacaggtgtcatggtgcttgacctcgagcggtggcggcgagcgggctacacgcagcgcatcgagcgctggatggagatacagaagtcgccgccggggcgcatctacgagctggggtcgctgccgcccttcctgctggtgttcgcggggcacgtggcgccgatcgagcaccggtggaaccagcatggcctcggcggcgacaatgtcctgggcagctgccgcgacctacacccgggacccgtcagcctgctgcattggtccgggtccggcaagccatgggcgcgtctgggcgcggggcggccgtgcccgctcgatgcgctctgggcacccttcgacctgtacggccccgccggcgccggcggcgaggagtcccggtaaccataacacccgaaaaaaaagagagaaagattcttttccttctttggcccaccccgtacaaattctgagcttctttctaaatttcactccataaattactctacattaccatttaaagagtgatttacataaaaaatcgttctctgtattcattttactctagagcagttttcctaaatctatattctatcgattgaaaaggatacagagagtcgctctgttttcttggtctccattacctgttcaaaacctatatgtttttcatctttttttttctctccgagcaattggtttggattaaatgttttgtcttagattgttcatgtttgttcttatagtgatccctttatgctcgttctgttacttattaaaccatttgtatcctactctacagagctgcaggattgcagactcatcaccataaatagaaggaacagagaaatagactttgcagtctgcagcatttgaccctccctctcaccctgtgggctctgccgttcggtgtctgcccatacccactcttgccatcaaacccgcaatccaccacccatccatctcaatgacgagtcagccagtccaatgcagcagctgcacaaccggccctttaaaatgctctgtccctggtctcgacgaatggtaccgcctctccatcatggaccggttccttgtgccaccaacggccgagtcaccgtcagtcgctcacagtcacagacatgagtaacttggaatcctcatctttgtggtcgtgcacgaactgactgacactaccaacctttcgctcgcgcttaagcacttgctagagataaagcaagaggggttgctgttaaccaagctcgcggggattaaaggaagccggcggaaatggccggtgtggtgtggggtgcaaggactcggtggctgcaagcaacatgggacttgtgagctaccgcccaagaccaccaccctttttccttcggggcctcctcttccctctttccttgggtgg

SEQ ID NO: 1429 - DNA, 1894 bp, Zea Mays
ttcccctcaccttcggaccttcctcccctcctccgacccttttcacgcgcgacgccttctgcgcccccgccgcccaagactcgtcaccaacccgcagcgagcctcctccactgacgccccctatcttcccctcgctgcagctctctcgttgaagagctgcatccccagtcagtgctcagcccgccgaaggatcggtctccttggcggcctccccgcggcgagtgcagccgcccttctccaggttttcacctgcgacgagcatccaccaattgatcttctggctggaaattcacgttgacggtggcgagtagggcttctaccatcggtagcctcatctcaaggagcaaaattcttccatgatccctttaaaccggaggacaagcctgcccagggctgggatggactactttgatgcaaggcggaagcctcataatgttggtaaaatcattgcagccctggtcctcacaacactctgtatatttgttctgaagcaatctcctggttttggtggcaatagtgtgttttctcgccatgaacatggggttacccacgtcttagtaacaggaggagctggttatattggttcacatgctgctttaaggctcttaaaggataactatcgagttactatcgtggataatctatctagaggaaacatgggagcagtaaaggttctgcagggcttatttccgcagcctgggagactacaattcatctttgctgatctggggaaccagaaatctgtcaacaagatatttgctgaaaatgcatttgatgctgtgatgcactttgcagctgttgcttatgtgggagagagcacattggaaccccttaggtactatcacaatattacatcgaacacactactgattttggaggctatggcatctcatggagtccaaacccttatttactccagtacatgtgctacctacggagaaccagataagatgcctattacagaagccacacctcagttccctatcaatccatatggaaaagctaagaaaatggcagaggatatcataatagatttctcaaactcaaagggagctgacatggctgtcatgattttaagatatttcaatgttattggatctgaccctgagggaagattaggtgaggctcctaggccagaacttcgagagcatggtcggatatctggggcttgctttgatgcagcattaggagtcattccaggattaaaggttaaaggaacagattatcccacagctgatggaacctgcataagagattatattgatgtcacagatttagttgatgctcatgtgaaagcactcaacaaggcagagcctagaaaagtcggcatttacaatgttggaacaggaagaggtcgctcagttaatgagtttgttgatgcctgcaagaaggcaactggggtcaacatcaaaattgagtacctcaacagaaggccaggagattatgcagaagtatacagcgacccaacaaagataaacaaggagctcaactggacagctcattataccgatctcaaagagagcctatcagtcgcatggaggtggcaaaagtcgcatccgcgtggctacgggccaaactaaatatagcctgctgatctataattcacttaatcgtcaatacatattagttctttagttagagatacaagatcttgctgcgatactcctcaaaatcagtccttcgtattcttctttctctcgtcctttttatttcaaaagtttgcatttttggctagcagaaacatgaatggtgatttggatgaaaaaaaggacctgtgatgacaatttcattgtttctgacacattgttggtaaaaaaaatgtaaattgcttcagccaatgagctgcaagattgattgaattgagttaagaaaaaaacttgtgttgcgatccttg

SEQ ID NO: 1430 - DNA, 1580 bp, Zea Mays
gccactttgctaagatcacattccaaggcaatgccagagtatacttgtactgcatgttataagtaacagcaggattatttggggatggactactttgatgcaaggcggaagcctcataatgttggtaaaatcattgcagccctggtcctcacaacactctgtatatttgttctgaagcaatctcctggttttggtggcaatagtgtgttttctcgccatgaacatggggttacccacgtcttagtaacaggaggagctggttatattggttcacatgctgctttaaggctcttaaaggataactatcgagttactatcgtggataatctatctagaggaaacatgggagcagtaaaggttctgcagggcttatttccgcagcctgggagactacaattcatctttgctgatctggggaaccagaaatctgtcaacaagatatttgctgaaaatgcatttgatgctgtgatgcactttgcagctgttgcttatgtgggagagagcacattggaaccccttaggtactatcacaatattacatcgaacacactactgattttggaggctatggcatctcatggagtccaaacccttatttactccagtacatgtgctacctacggagaaccagataagatgcctattacagaagccacacctcagttccctatcaatccatatggaaaagctaagaaaatggcagaggatatcataatagatttctcaaactcaaagggagctgacatggctgtcatgattttaagatatttcaatgttattggatctgaccctgagggaagattaggtgaggctcctaggccagaacttcgagagcatggtcggatatctggggcttgctttgatgcagcattaggagtcattccaggattaaaggttaaaggaacagattatcccacagctgatggaacctgcataagagattatattgatgtcacagatttagttgatgctcatgtgaaagcactcaacaaggcagagcctagaaaagtcggcatttacaatgttggaacaggaagaggtcgctcagttaatgagtttgttgatgcctgcaagaaggcaactggggtcaacatcaaaattgagtacctcaacagaaggccaggagattatgcagaagtatacagcgacccaacaaagataaacaaggagctcaactggacagctcattataccgatctcaaagagagcctatcagtcgcatggaggtggcaaaagtcgcatccgcgtggctacgggccaaactaaatatagcctgctgatctataattcacttaatcgtcaatacatattagttctttagttagagatacaagatcttgctgcgatactcctcaaaatcagtccttcgtattcttctttctctcgtcctttttatttcaaaagtttgcatttttggctagcagaaacatgaatggtgatttggatgaaaaaaaggacctgtgatgacaatttcattgtttctgacacattgttggtaaaaaaaatgtaaattgcttcagccaatgagctgcaagattgattgaattgagttaagaaaaaaacttgtgttgcgatccttg

SEQ ID NO: 1431 - DNA, 1060 bp, Zea Mays
gcacgtgccacttgcagaaacaggaaaccagtagaccacgcccgcggtgcggtgcggtggatccgccaacaacgggcgcccgccccgccccccgcccggtctccggttcccgaacccccactcctcctccctctccgctcgccactcccgtcgctcctctcctccacgcctccctcgctcgctcgccccctcgtccggtcgtccctccctcgctcgtcttggcatccccgcaaggaatgtcccttccgtagcgtcccttgcttcttccccaccccatcctgtattagtgcgttctctgccgctttattttccggtttctttgggctctttcgccgccttggatcttggttgcctcatccggttcataggtaccttctttaacctttgctgggactccattgatgcactctttggttgtttttcggtggagcatttcgtcgaacacaggggcggagggcccagtatggtccagaaatcaaagtaaaaaaaagccctagtgtcttcgcatcgcgctcccgcacacagaccgaccagccgcagcccgtggcgcacctgcctgcgcccgccgcctccgtcatccactcaacctcgcccctcggccactgccgcgcggcgcccgcccgcctgccgcaccggccgaatcatccgccgtctcgcccgggccgccgtcgttgctcgtcggtgaacgacgtctcactgttaagtttctgatacttcaaaaggcttcagggtatcagtatcactgctgttctgaatttccaaagtgaaagcgcgcgcattaacttgggaatcaattctcatactataaacaattttctgtcgtaagaataatatcttgatggttagctatcctttaaggtatgttgtaattcctctatgaagaatagactttagaacgtttgattctatttatattgaaccaactatagcttccttctagatttcaggaaaccattatcttgtgccaaacaatacttgactttatataggatagaattgttgtttatgatgatacttagataactgctgtacttggtattcagtgtgtactatttttgtt

SEQ ID NO: 1432 - DNA, 1551 bp, Zea Mays
gcacgtgccacttgcagaaacaggaaaccagtagaccacgcccgcggtgcggtgcggtggatccgccaacaacgggcgcccgccccgccccccgcccggtctccggttcccgaacccccactcctcctccctctccgctcgccactcccgtcgctcctctcctccacgcctccctcgctcgctcgccccctcgtccggtcgtccctccctcgctcgtcttggcatccccgcaaggaatgtcccttccgtagcgtcccttgcttcttccccaccccatcctgtattagtgcgttctctgccgctttattttccggtttctttgggctctttcgccgccttggatcttggttgcctcatccggttcataggtgcagtaaggagctcgcacctgaaagaagcaatgaatctttttagctggttggtcagttcaggccttgtgcctgattgcttctcattctccttagttctgtcagcatgtgctcgagctggtgctcgctgatatggagtgtgggcgcatcacctgatgactcgactggcagtggaaatgaatcattcttgagctcaacacttgttgacatgtatgccaaatgtggaaggattgatgtgggaactgagatattcaaagtcaagagaaaccatattcctgtctggaataaaatgattaatggcttggcatcacatgttcttggatccgacatagtggttttgttccacaagatgaaaagtgaagatctggttcctgatggggttatgtttgttgcactcttgacagcatgcagtcactgtggcatggttgaataggctcgccaatacttcagatcaattactccagagtattctatcacgccagaggttgagcactatggtgtattggtggatatgtcattgcgagctgggttgctggatgaggcatacaagttggtaatgtcgatgaatgtagcctgatgttgtgatatggagggcattgcttagcacctgttgcatatattgccaaacagaattaggtttggtcactattgagcatgaggcatgccatggcagtgtggtttacgcccttctttcaaacaggtactcatcagcaaatagatggaatgattcagaggaagtatggaaacagaagaaacaaaaggaaattaggaagagcaaagacttgagctgggttgagttaggggggagcagccatgaatttaagctggtggtagatctcatcctgacactgaggatatatacctagtgctgcgtggattacgtaaaaagagctaaggttgaaggttatgctccattgactgatccagtaacaaaagatgtctcagaggaggaaagagaagaaaaccttaccttccatagtgacaagctagcagtggcttatatagtatcctgaagattggtccagggacagcaataatgctttccaagaatttgcagatttgcagtgattgtcatgaatggattaagatagtctcaaaggtactttgtcgtgttattattttgagggatagaattcgatttcaccagtttgaaagcggatgctgctcctgcaaggattactgg

SEQ ID NO: 1433 - DNA, 2159 bp, Zea Mays
gcacgtgccacttgcagaaacaggaaaccagtagaccacgcccgcggtgcggtgcggtggatccgccaacaacgggcgcccgccccgccccccgcccggtctccggttcccgaacccccactcctcctccctctccgctcgccactcccgtcgctcctctcctccacgcctccctcgctcgctcgccccctcgtccggtcgtccctccctcgctcgtcttggcatccccgcaaggaatgtcccttccgtagcgtcccttgcttcttccccaccccatcctgtattagtgcgttctctgccgctttattttccggtttctttgggctctttcgccgccttggatcttggttgcctcatccggttcataggtaccttctttaacctttgctgggactccattgatgcactctttggttgtttttcggtggagcatttcgtcgaacacaggggcggagggcccagtatggtccagaaatcaaagtaaaaaaaagccctagtgtcttcgcatcgcgctcccgcacacagaccgaccagccgcagcccgtggcgcacctgcctgcgcccgccgcctccgtcatccactcaacctcgcccctcggccactgccgcgcggcgcccgcccgcctgccgcaccggccgaatcatccgccgtctcgcccgggccgccgtcgttgctcgtcggtgaacgacgtctcactggattagcattgaagggttatccaatattcagtgaaaactagctactgaagaataggagtagcaatacctttgatgccccataaccccattcattagtttctgcaatgtctttgtcttctatttgctgtgcgaagttccatctactaaggaactctataggagacacttgcagtgtcagatggcttaaataccatagcagattgatatatgaaactttcctctcaagcagaatacatcaaagtaggcctcctagtacaacagtgctagcaagaagcacaagaaaaggaagtaagcagtcatttagcaatggccgccatttgcacagtaaatcggttgaatcatcaattgaagtgttcaagcagtcagagcttgagcagcttaaatcacttcattgctacaatgttgaggaagagttttctgaagtcaagaccgaatggcctgcaactatccttgtttttgatattgaaactactggcttctcacgtcgtgatgacagaattattgagtttgctgtccgtgatcttatggggggaaagaatagcacttttcagacactcataaatcctgagaaagatgtgaaaaatacatatgttcatggtattaacaacagtatgctctgcaggcctgatgttccaagatttggagagattattcccattctgctacaatatgtgtggagtcgtcaaatggacggtaaaccagttctctgggttgctcataatgggcgttcctttgacgtaccctttctcatgtttgagtttcgacggtgtaaagtagaaatgcctggtgattggctctttgtggatactcttcctatcgcaaaacaattggtcgattctaatgggtcaaaactcagttctgtgtcattgaagttcctgagggaacgctacaaaatcccactcacagggagcgcgcatcgtgccatgcaggatgtgacaaccctctcttacgtgcttcagaaattgacctttgagctgaaactaactgttcctcagctgctcgagaagtctttccgagcatcggatcttccagctaatcgtcctgcaaagtgactgtatctgcctcacctgaatatcgcctgaagcactaaattattatcaccgccgttttcgaatatttgtcgtctgcaagtttatttttgaactaaaacacgacaaaaaaagagggagtacattgttgttgtattattacagagatgttatttggagatcccagctctgatttcttctatgttctttctaacaacctaataaagccagcctgattgccactgatacatcagtagcacagtaatccgtattactgatactctgacattgtaggcttgtatacattactaaatcatcaattcaacatatatttacttgactgcgaacttatgcgtagggatggcaatgggtacgagtatgggtaaatagtcgcagatttatctattggatatgagtatggtagaattaggt

SEQ ID NO: 1434 - DNA, 2390 bp, Zea Mays
gcacgtgccacttgcagaaacaggaaaccagtagaccacgcccgcggtgcggtgcggtggatccgccaacaacgggcgcccgccccgccccccgcccggtctccggttcccgaacccccactcctcctccctctccgctcgccactcccgtcgctcctctcctccacgcctccctcgctcgctcgccccctcgtccggtcgtccctccctcgctcgtcttggcatccccgcaaggaatgtcccttccgtagcgtcccttgcttcttccccaccccatcctgtattagtgcgttctctgccgctttattttccggtttctttgggctctttcgccgccttggatcttggttgcctcatccggttcataggtaccttctttaacctttgctgggactccattgatgcactctttggttgtttttcggtggagcatttcgtcgaacacaggggcggagggcccagtatggtccagaaatcaaagtaaaaaaaagccctagtgtcttcgcatcgcgctcccgcacacagaccgaccagccgcagcccgtggcgcacctgcctgcgcccgccgcctccgtcatccactcaacctcgcccctcggccactgccgcgcggcgcccgcccgcctgccgcaccggccgaatcatccgacggcccttaagctgaggcggtgtggcctaagtagcagcgcggcggtcgccccgtgtctcgtccacttcggccccgacaggctgtccacggtggcgcgaactgcccctcgccggttcggccccgcccgcccgtagcagctcaccagagaactagcctctcgtcggccttccccaggtctgcgcgtggcgcggcgccgcagcaaagctccacgcgtgcgtgtccgccacccgccgtctcgcccgggccgccgtcgttgctcgtcggtgaacgacgtctcactggattagcattgaagggttatccaatattcagtgaaaactagctactgaagaataggagtagcaatacctttgatgccccataaccccattcattagtttctgcaatgtctttgtcttctatttgctgtgcgaagttccatctactaaggaactctataggagacacttgcagtgtcagatggcttaaataccatagcagattgatatatgaaactttcctctcaagcagaatacatcaaagtaggcctcctagtacaacagtgctagcaagaagcacaagaaaaggaagtaagcagtcatttagcaatggccgccatttgcacagtaaatcggttgaatcatcaattgaagtgttcaagcagtcagagcttgagcagcttaaatcacttcattgctacaatgttgaggaagagttttctgaagtcaagaccgaatggcctgcaactatccttgtttttgatattgaaactactggcttctcacgtcgtgatgacagaattattgagtttgctgtccgtgatcttatggggggaaagaatagcacttttcagacactcataaatcctgagaaagatgtgaaaaatacatatgttcatggtattaacaacagtatgctctgcaggcctgatgttccaagatttggagagattattcccattctgctacaatatgtgtggagtcgtcaaatggacggtaaaccagttctctgggttgctcataatgggcgttcctttgacgtaccctttctcatgtttgagtttcgacggtgtaaagtagaaatgcctggtgattggctctttgtggatactcttcctatcgcaaaacaattggtcgattctaatgggtcaaaactcagttctgtgtcattgaagttcctgagggaacgctacaaaatcccactcacagggagcgcgcatcgtgccatgcaggatgtgacaaccctctcttacgtgcttcagaaattgacctttgagctgaaactaactgttcctcagctgctcgagaagtctttccgagcatcggatcttccagctaatcgtcctgcaaagtgactgtatctgcctcacctgaatatcgcctgaagcactaaattattatcaccgccgttttcgaatatttgtcgtctgcaagtttatttttgaactaaaacacgacaaaaaaagagggagtacattgttgttgtattattacagagatgttatttggagatcccagctctgatttcttctatgttctttctaacaacctaataaagccagcctgattgccactgatacatcagtagcacagtaatccgtattactgatactctgacattgtaggcttgtatacattactaaatcatcaattcaacatatatttacttgactgcgaacttatgcgtagggatggcaatgggtacgagtatgggtaaatagtcgcagatttatctattggatatgagtatggtagaattaggt

SEQ ID NO: 1435 - DNA, 1605 bp, Zea Mays
ctttcctagccatgaattactttggtgtatagtgaattttttcgtcgttgcgttagcaacaccttgattttgtcacgtcctccgccactggtcgaacatctgggatgcatcgctgcgtcagccgttgagcttttcttgtacccaggattagcattgaagggttatccaatattcagtgaaaactagctactgaagaataggagtagcaatacctttgatgccccataaccccattcattagtttctgcaatgtctttgtcttctatttgctgtgcgaagttccatctactaaggaactctataggagacacttgcagtgtcagatggcttaaataccatagcagattgatatatgaaactttcctctcaagcagaatacatcaaagtaggcctcctagtacaacagtgctagcaagaagcacaagaaaaggaagtaagcagtcatttagcaatggccgccatttgcacagtaaatcggttgaatcatcaattgaagtgttcaagcagtcagagcttgagcagcttaaatcacttcattgctacaatgttgaggaagagttttctgaagtcaagaccgaatggcctgcaactatccttgtttttgatattgaaactactggcttctcacgtcgtgatgacagaattattgagtttgctgtccgtgatcttatggggggaaagaatagcacttttcagacactcataaatcctgagaaagatgtgaaaaatacatatgttcatggtattaacaacagtatgctctgcaggcctgatgttccaagatttggagagattattcccattctgctacaatatgtgtggagtcgtcaaatggacggtaaaccagttctctgggttgctcataatgggcgttcctttgacgtaccctttctcatgtttgagtttcgacggtgtaaagtagaaatgcctggtgattggctctttgtggatactcttcctatcgcaaaacaattggtcgattctaatgggtcaaaactcagttctgtgtcattgaagttcctgagggaacgctacaaaatcccactcacagggagcgcgcatcgtgccatgcaggatgtgacaaccctctcttacgtgcttcagaaattgacctttgagctgaaactaactgttcctcagctgctcgagaagtctttccgagcatcggatcttccagctaatcgtcctgcaaagtgactgtatctgcctcacctgaatatcgcctgaagcactaaattattatcaccgccgttttcgaatatttgtcgtctgcaagtttatttttgaactaaaacacgacaaaaaaagagggagtacattgttgttgtattattacagagatgttatttggagatcccagctctgatttcttctatgttctttctaacaacctaataaagccagcctgattgccactgatacatcagtagcacagtaatccgtattactgatactctgacattgtaggcttgtatacattactaaatcatcaattcaacatatatttacttgactgcgaacttatgcgtagggatggcaatgggtacgagtatgggtaaatagtcgcagatttatctattggatatgagtatggtagaattaggt

SEQ ID NO: 1436 - DNA, 1405 bp, Zea Mays
agcttggttcagtggagctttcccttgccctagagttctagccagtgtttctcacgagatcgaggtagttcctgtgttcaaaccagtgttagctcctcttcttagtcaccaggttgatctgccttggtgctgcgcacgccaaccctattgtctggtgaccacacccactgaaacccccacctcgccgtggccaaagcgttccagagagttgcatgtccgtatggtcttcgttctgtggtcttcaaaggtcagtgaagctctcaagactcgatgttcgaactctactcgccgtcatggattagcactggggacagcctctgcgctgaccgtccaacccgtgtcatccctgctcgatttcacgagagcaccgtaatcatggtaggtctctgatgctcctcgcgtcgtttgtgtgagctctaccgtgcagttgccgcgggatcgagctcgcgggtctgtgcttcccgtcgccgccgtcggtagcctaggttctcgggtccccgtggtcgattaagcccatgtctgagtccgacgttgttcggggttcgtgatggtgccatcgccgtcgtttgcgtcaagccaccttggccgattgggcgctagttcgccggagcaccgcgtggcggtgttgtaggcgagtctttgtaaagaaccgaagctgaggggtttatgtgcgtttatcagtgagagtggccaacagtggatagggcctttgcttgaatgttgttggcggcagggttcctgacacaaaagcgcgcacacagagcatgggctgcccgtgatgggccagcttgccttgttacgcatgctgtctgggctaatttgggggccaggactattcagcctttttgccttttcttttaccgaaaaagttgtaaattaattcagaaatcaaagaaaaatggtaaaatcgtagaaccacctttagtaggtgtctaaaatcaagggctctctgatagatacattcttggaatttttctagcaaatagatatttttaaaggaataaaaggtgccttaaaatgcttaactgaaattttagtaataacaatagagcactaaaaattatgaggaaaaattatgtaagattatgttgagcatgtgaaccgttggataaaatttggagctgtttggacaagatttgcttagcaaattaattattgctcaataaaggaaaagagttttacctctcggtagttaaagcacctgatgtcttagtaaaggatgaaattgtttagcaagttgtgaatggttagatgagttctaaggataagtagctccctggtagttatggcttgtgatgatagcttgtatgttacgtctaggagtaatatgtgttgtctcctttgcaagttgcatattcctagtttaagcaaacatccatattcatatcatttcatgtagaacacc

SEQ ID NO: 1437 - DNA, 659 bp, Zea Mays
cttggttcagtggagctttcccttgccctagagttctagccagtgtttctcacgagatcgaggtagttcctgtgttcaaaccagtgttagctcctcttcttagtcaccaggttgatctgccttggtgctgcgcacgccaaccctattgtctggtgaccacacccactgaaacccccacctcgccgtggccaaagcgttccagagagttgcatgtccgtatggtcttcgttctgtggtcttcaaaggtcagtgaagctctcaagactcgatgttcgaactctactcgccgtcatggattagcactggggacagcctctgcgctgaccgtccaacccgtgtcatccctgctcgatttcacgagagcaccgtaatcatgaacaccaagaacaagaattggtccttgtgaatatggaacctactccagtgttattgatccagtggtggactccatctaactgcctatcgtgatagaagatctcagatctcctcctgtaataaggcaagtcccggtgcatttgccccttccttgtgttttaaatgctttatcacctaaaatgatgcattaggtgataggagttgtgtgatgaacaattgatgcattaccattccttggaagttgaatactataccttgatccttgattttaaaaaaaagaactg

SEQ ID NO: 1438 - DNA, 2882 bp, Zea Mays
ctctcgacccgaaccaggacgaaatccccaatccccagacgttgatacgagtatacgaggccgcatcaagcacgcaatcgccgtcagctcggtctacggccccgtaccggtattccaccgcttgcacgccaacgcgaacgccggccgccatggcctcctctgagtctcccaataccgcgcctgcggccgcggccgtcgcttcccaaccggcccgcgatttcctcgcccacctcgaggcctatctcgcccgccgcgacggcgtcgacaagctcctcaagatttcccgctacgccacgcgcctcgcgctcgccgccgggcccccgctgccccccggcgcctccgcccgcctcaagtccttcgagtccagcgtcggcctcagccgcaaggctttccgtctcggcaagttcgtgcagtccctcaacgccctcctcgcccacccgcaccctcccccgtccctcgcgctactcgcctacggcggtgagggcgtctactacttcgtcgagcagttcgtctggatcgccaaggccgggctcctgcctgcgcaccttcttccgcgcctccagcgtctcagcgcctgggctgagctgctgggctacgtcggttccattttaattaagctggaggaggtggctaagatcgaatcttcgataaagaagcggctcgtgaaggactgtgataaggagagcgaggcggtgaagactatgcagggtaaactgctgctgaagcggatgtcagtggtgcaggacgtggcggatgccgtcatggctctgggagacgtcaccgatggcaagggtttgctcgggagctccacgctgatggcagcagctggactgctctcggcgttgatcagcacgcataagaattggaattcttgttgaagcctggaggtacatgttatagatagcacatcatataatgaaataaagctctgattatagcgataactaagagtttcctctggaaatatggatgctcctaaaactgataccaggtcctctggggaatgaatgaagtttattcttattcatttggttggaccaaggaatcttgtgttttttcagccatcttgatcattcaataatttttttgttcttaaaagtatatctactgctgcggtgtatgattgagttcagctaagatgatcttgcttttctccaacccacttttacagtgtagtgttttgcttcatcttcatagttctcaaatcaaaagcattgtggttgagtctcacctgcaaccttgagctatccatgtcaaattaattttgagcaccaagatgcacggtctgttctccatatatcaacttagccatcataatctgcttctcatgaacaaaaaataagaaatacagagtacattcagattcctaaataaggaatagtttgcaaattgggtaacaaaactatggaacttatgtaatcaaagcctggcacatcatgaaataaaatacccagttccccaagcgcaagtaaggtataaaaatgatgaaggattgctaacaactaaatcaatgacataaacttgagaatagcaggaggtctgagcttgaatatcgaaacattattgagttattgactcttattttttcaggccaaatacaaattagattttgtttgtatggccgattgccatatattaagttaggctaattcaatgaacctagaaagaatggtgatcagagcaaaatagaactccaagagctatttaattgaaataaattaatgtagggcatgctttgttcattacctccaaaaccgtggctggacttgtcttttatactgctataagtggagagctgcaatgcaactaatggatgcaacttagctcatttcatttatttgttagccattgattgattcaaatatgcatgtcataaagtatggcaatgtgccaaatttcatctgattatatgtttcactgtggttgtgtgactggcattctggcaatattattactgtgcaatatatagtggtatgcactatgaaatttggttaattttgactatgctgttaagatgatctgctgctaaggttctcgtgttgctgtggtgggtgatgggctggtggcaactagggagctgtaagtgcctcaaggtactgctgtgcagtgctcttttttcctattattgtaaaccacatttggcacttaaatgttgcagggatgatttagcatttgtaccttttctttgggattctcttcaccatgtttagtgggataaaacttcgatgtttgattgggtggctaagaaaatttgtatccttgtttgcacttgtttttcatgtgaatattgtgttatgagtatggccattaatgtgttttgtttcaatggctgagtaagtcagcttaatgctgttcttggaatgtctctatatcggtgcgcattaatgaaaagggttaattagcaagtaatgtattactgtttttgttgaattcaatactttgtatttactgtatgctaagcagccaacattcatcttattgcttatgcatatattgaggagataggagaattaatttctctcatgatagatttgctttaccacctattaaaacatatccagtgatccagctgcctataatgaattcgatactctgtatttactgtttgcaaagtaacacatgttttttatgtctgtttatattgatcagactataggagaattagttacttaatcatctgccttccctgtgatttctgttgatgcatgtcaaatttgacaaatggattatggttgtgactagaaaaccatgggcgtcagggacggagccagaaaaaagtttagaagggactgaactaaactgttgtagtgtagaagccttttctacgttatattatttacattttaaattttaggggaggctctagtggggctccatgagat

SEQ ID NO: 1439 - DNA, 653 bp, Zea Mays
tgtgacgggtgaatacagagaaatagagtattggactggctgaatcgagaggtggaggcagcaaccaacaaggcaagttatttgtattagcaaatgtagcactatgaaggtcaagattcttcagtggcatgcagtggcttcttggacgtgggatgcacaggatgagacatgtggcatatgcaggatggcttttgatggctgctgtcctgactgtaagttccctggtgatgattgcccactcatttggggtgtctgcaaccatgcttatcatcttcactgcatactgaagtgggtcaattctcaaacatccacacccctttgccccatgtgccgtagagagtggcagtttaagggctaaggtactatggacatctagaactgcaccaagcgactctcagttctcagagaagactgatgtttttctggtacttctgtgatgctttattttaactactacatattgttttccgtacttagtataaatcctgatgtcagcgcctgatcctgtgtatgcttccaagcttgtagtggaacaaatgaaattattgcttttcttagggctgatttcctaatcttatcccatattggtttgttcttattgtttatcttctgaaggattacaagaagtctagtatcagagctaggcaattgat

SEQ ID NO: 1440 - DNA, 779 bp, Zea Mays
gttacatttgcagtactaaaagaaattatgttaacttggaccaccctttcttaaaatcctggatacgccattcatgggcagtgccgggtcaggcctcaggcagtcagggctgagtgtgccacaagtggatcattggaggggaggaagaagctgaccactgtgtctccatcggagtcgggcctagtgggttgatcaacatggttgtttgttagttggtcatggtagcactatgaaggtcaagattcttcagtggcatgcagtggcttcttggacgtgggatgcacaggatgagacatgtggcatatgcaggatggcttttgatggctgctgtcctgactgtaagttccctggtgatgattgcccactcatttggggtgtctgcaaccatgcttatcatcttcactgcatactgaagtgggtcaattctcaaacatccacacccctttgccccatgtgccgtagagagtggcagtttaagggctaaggtactatggacatctagaactgcaccaagcgactctcagttctcagagaagactgatgtttttctggtacttctgtgatgctttattttaactactacatattgttttccgtacttagtataaatcctgatgtcagcgcctgatcctgtgtatgcttccaagcttgtagtggaacaaatgaaattattgcttttcttagggctgatttcctaatcttatcccatattggtttgttcttattgtttatcttctgaaggattacaagaagtctagtatcagagctaggcaattgat

SEQ ID NO: 1441 - DNA, 652 bp, Zea Mays
ccagtctgtgcatgtcccttctctcgttcttgctcccagattaagaagttacaaagttattgattcccaaataactggagagaatcacaaattggtagcactatgaaggtcaagattcttcagtggcatgcagtggcttcttggacgtgggatgcacaggatgagacatgtggcatatgcaggatggcttttgatggctgctgtcctgactgtaagttccctggtgatgattgcccactcatttggggtgtctgcaaccatgcttatcatcttcactgcatactgaagtgggtcaattctcaaacatccacacccctttgccccatgtgccgtagagagtggcagtttaagggctaaggtactatggacatctagaactgcaccaagcgactctcagttctcagagaagactgatgtttttctggtacttctgtgatgctttattttaactactacatattgttttccgtacttagtataaatcctgatgtcagcgcctgatcctgtgtatgcttccaagcttgtagtggaacaaatgaaattattgcttttcttagggctgatttcctaatcttatcccatattggtttgttcttattgtttatcttctgaaggattacaagaagtctagtatcagagctaggcaattgat

SEQ ID NO: 1442 - DNA, 2692 bp, Zea Mays
atggagcaccccttgatagttgacatggcggcgtgtgccatggacgagctcatctggctcgcccaggccggcaagcaaatctgggtcaagggaatgcccggtgacgcgagggatttctcagctcagacgcctaccggtctgtttatttcctacaaatgctccccaaaagttccaattgattcttctgcctttgccaagttccccagaatccccaggttgatgctgcccctgcccatcgattggatcttgttcgatttctctgttctgcaaatcctgtgtgcatccgctccagcagcccgattgaaaggttccagatggaagcattgccaccaaggtccgcaaagcacctacccatgtctcaccatagattgttgtcccccatcaagaatccaggtttcagttcagcgaggaatgctgcccagatcatggaggaagcagccaagattcttcagccaagggcacaagccagctctagggagaaaatctgctcttttagcccggcacggattcctttgagagtttcggagccaagggagagcattcctccttctcagagaactgtgcctctgaagccgcaatcatccaggaccgctcctgagctgccagatgtgaggttctctagagcgcaacagatgaaccgaagctggaatagcgaggaagatattgtcatattcagaccttcaattgattcttatgagatcaataatccgagttgttcgaaaaacaagggaaagtctatttctttggcagtccaggcaaagaacaatgtccagaagagggaaggtgtaactggttctgggaggaattcaggagtacaaaaagagcatgatgagcaaagagcaaaccaaccatttaggactcagtctaatctccagagaaagaagccatcgtcgtctggcacttcttcccctgtccttcggcaaaataatcagaaacagaattcgttggtgaccagaggcaaggtgccagcaaacaagaccgtctcaacacaacaaggcagaaaactaatggcaggagattcctcttctgggaagatcaagagtggaagcaaggtatctaaagttggtggcagaaaagacattgtggaaagcataagtggtgatagagaaggatcgtcatcaaacaacaaggacttcccacagaagaaacggttgatagagaggaactccacaaacgagaagggtacatttgttcctgaaaaaccagtgggtaaacttaagaagcaggttcaacctaatgttgttatggatgagcacattaagtggaacaaggaaagtaaggatactacagatgtcgtgtcatttactttcacctcacccttggtcaaaccgtcggcaggactgtccagactggtgggtaagtgggatacaagaagcaaccttgatatggatgcaggatgtgataaagatgattcagataacaaggttgaaggtctgtcatcagtggggctgaactttgtaaatggtgatgcattgagccttctcctagaaaagaagctgaaggagctaacatcaaaaattgatccatcaatcacctttacgagaggtgacacatttgtgcctgctacttttaccttggaggaaccaccaacctcttcatgcagcaattggggctcggaaagtggagtatttgactgtagcccttctgaagtcaaaccttctcaatatgattactgcccttcagcaaaaggccaaattttccgaggcagtaaaataaaggtggaagaacaagaatgcagcagcataagtaatgcaaggaaggaacatgaaaatgaagagctaagtcccctatctgtgcttgaaccaacctctctaagtgagagttgctggtcttccgagtgttcaggcagcagcggtgggggtaagagttattcatcaatttttgatgttaagaatgccaaagggaatttcttgattgacccagcatcagttgatatcgaggcaaagacaacaacagactcagcctcttccgcatccgtagatacatcagatatttcagatgtcacccaatgttctaaaacatcaagacacacagagctggactacattgcagacgtgttaagcagtgtcaacttgacaacagatgaactgggaccactctttgtcgatcaggatagaccagctttggactcgtccctcttccagaaattggagaacatgcatgtgtacaacaaacaagggaaagagcccttttgccgtggagggtacaggcggctgttgttcgactgcgtaaatgagtgcctggagacaaggcgcacggcctacttccgggcaggatatgcagcatggagcaagggagcagcagcgctgatccggggcgttgaggcccaagtctgcagtgagatcaccagctggaagagcatgggagactggacggaggatgagcttgtcgacaaggacatgagcagcgggctgggcacatgggtcgacttcctggtggaggagttcgaggctggtgtggaggtggagaaccacgtactgggctcgctgcttgacgaggtcgtcgccgacatggtcgtgggacgccacggcaggagtgtaaatttgtagtttgagatgaatcgtgtggttgttggtctgtaattttgctgttacatatcccctatttattctgtcaccccagacatgttgttcagaacagtgataaatgttgtttacccaatgagatagatagttttcacttttcagctcga

SEQ ID NO: 1443 - DNA, 2204 bp, Zea Mays
ctcccagcaggcagcataaatgtccggcctttagcggcgtccccgatccgatgctcccggccgcctccgcccctcctctccgccgcctccgcttcgtccgcgctgcgcggctgcctcgagctcgagaccgcgtcggctgtataggtgattttctcttccttttggggggatgctgcggagcgaacgctgaggagcgacgacgagttttgattcaggtgtagagggtttctagaatcgatggggtcggagaagggtggagcgaaggttattggcggcggcgggatcttcaacctatttgattggaagcgaaagtcgcgcaagaagctgttctccaactcgcccgaggggtccaagcttgttaagaggagcgaagaaaccttgctatcagggcgtctccacttgggtgatgatgatgaaggaattggtgtatcaagcttcaaggggagcagcgactacagctgtgcgtcttcagtgaccgatgaggaagtgcgtgagatgaaggcgccaggtgtggtggccaggctcatgggcttggacgccatgcccacctcgggcgttccagaaccgtactgcacacctttccgagacacaagattgttcagggacagccacagcctcaagaggagccctgagtactcaatgaatgaccagttcagtcatgttcctcaaagagtcgatggctatatcaggaagccattggatctccgagcaccaaagatgccaagcagcccgattgaaaggttccagatggaagcattgccaccaaggtccgcaaagcacctacccatgtctcaccatagattgttgtcccccatcaagaatccaggtttcagttcagcgaggaatgctgcccagatcatggaggaagcagccaagattcttcagccaagggcacaagccagctctagggagaaaatctgctcttttagcccggcacggattcctttgagagtttcggagccaagggagagcattcctccttctcagagaactgtgcctctgaagccgcaatcatccaggaccgctcctgagctgccagatgtgaggttctctagagcgcaacagatgaaccgaagctggaatagcgaggaagatattgtcatattcagaccttcaattgattcttatgagatcaataatccgagttgttcgaaaaacaagggaaagtctatttctttggcagtccaggcaaagaacaatgtccagaagagggaaggtgtaactggttctgggaggaattcaggagtacaaaaagagcatgatgagcaaagagcaaaccaaccatttaggactcagtctaatctccagagaaagaagccatcgtcgtctggcacttcttcccctgtccttcggcaaaataatcagaaacagaattcgttggtgaccagaggcaaggtgccagcaaacaagaccgtctcaacacaacaaggcagaaaactaatggcaggagattcctcttctgggaagatcaagagtggaagcaaggtatctaaagttggtggcagaaaagacattgtggaaagcataagtggtgatagagaaggatcgtcatcaaacaacaaggacttcccacagaagaaacggttgatagagaggaactccacaaacgagaagggtacatttgttcctgaaaaaccagtgggtaaacttaagaagcaggttcaacctaatgttgttatggatgagcacattaagtggaacaaggaaagtaaggatactacagatgtcgtgtcatttactttcacctcacccttggtcaaaccgtcggcaggactgtccagactggtgggtaagtgggatacaagaagcaaccttgatatggatgcaggatgtgataaagatgattcagataacaaggttgaaggtctgtcatcagtggggctgaactttgtaaatggtgatgcattgagccttctcctagaaaagaagctgaaggagctaacatcaaaaattgatccatcaatcacctttacgagaggtgacacatttgtgcctgctacttttaccttggaggaaccaccaacctcttcatgcagcaattggggctcggaaagtggagtatttgactgtagcccttctgaagtcaaaccttctcaatatgattactgcccttcagcaaaaggccaaattttccgaggcagtaaaataaagagaccctgtctgctgaacccatcaaggaggaagaattaacatgtggaataatg

SEQ ID NO: 1444 - DNA, 3117 bp, Zea Mays
cagcataaatgtccggcctttagcggcgtccccgatccgatgctcccggccgcctccgcccctcctctccgccgcctccgcttcgtccgcgctgcgcggctgcctcgagctcgagaccgcgtcgcaggctgtataggtgattttctcttccttttggggggatgctgcggagcgaacgctgaggagcgacgacgagttttgattcaggtgtagagggtttctagaatcgatggggtcggagaagggtggagcgaaggttattggcggcggcgggatcttcaacctatttgattggaagcgaaagtcgcgcaagaagctgttctccaactcgcccgaggggtccaagcttgttaagaggagcgaagaaaccttgctatcagggcgtctccacttgggtgatgatgatgaaggaattggtgtatcaagcttcaaggggagcagcgactacagctgtgcgtcttcagtgaccgatgaggaagtgcgtgagatgaaggcgccaggtgtggtggccaggctcatgggcttggacgccatgcccacctcgggcgttccagaaccgtactgcacacctttccgagacacaagattgttcagggacagccacagcctcaagaggagccctgagtactcaatgaatgaccagttcagtcatgttcctcaaagagtcgatggctatatcaggaagccattggatctccgagcaccaaagatgccaagcagcccgattgaaaggttccagatggaagcattgccaccaaggtccgcaaagcacctacccatgtctcaccatagattgttgtcccccatcaagaatccaggtttcagttcagcgaggaatgctgcccagatcatggaggaagcagccaagattcttcagccaagggcacaagccagctctagggagaaaatctgctcttttagcccggcacggattcctttgagagtttcggagccaagggagagcattcctccttctcagagaactgtgcctctgaagccgcaatcatccaggaccgctcctgagctgccagatgtgaggttctctagagcgcaacagatgaaccgaagctggaatagcgaggaagatattgtcatattcagaccttcaattgattcttatgagatcaataatccgagttgttcgaaaaacaagggaaagtctatttctttggcagtccaggcaaagaacaatgtccagaagagggaaggtgtaactggttctgggaggaattcaggagtacaaaaagagcatgatgagcaaagagcaaaccaaccatttaggactcagtctaatctccagagaaagaagccatcgtcgtctggcacttcttcccctgtccttcggcaaaataatcagaaacagaattcgttggtgaccagaggcaaggtgccagcaaacaagaccgtctcaacacaacaaggcagaaaactaatggcaggagattcctcttctgggaagatcaagagtggaagcaaggtatctaaagttggtggcagaaaagacattgtggaaagcataagtggtgatagagaaggatcgtcatcaaacaacaaggacttcccacagaagaaacggttgatagagaggaactccacaaacgagaagggtacatttgttcctgaaaaaccagtgggtaaacttaagaagcaggttcaacctaatgttgttatggatgagcacattaagtggaacaaggaaagtaaggatactacagatgtcgtgtcatttactttcacctcacccttggtcaaaccgtcggcaggactgtccagactggtgggtaagtgggatacaagaagcaaccttgatatggatgcaggatgtgataaagatgattcagataacaaggttgaaggtctgtcatcagtggggctgaactttgtaaatggtgatgcattgagccttctcctagaaaagaagctgaaggagctaacatcaaaaattgatccatcaatcacctttacgagaggtgacacatttgtgcctgctacttttaccttggaggaaccaccaacctcttcatgcagcaattggggctcggaaagtggagtatttgactgtagcccttctgaagtcaaaccttctcaatatgattactgcccttcagcaaaaggccaaattttccgaggcagtaaaataaaggtggaagaacaagaatgcagcagcataagtaatgcaaggaaggaacatgaaaatgaagagctaagtcccctatctgtgcttgaaccaacctctctaagtgagagttgctggtcttccgagtgttcaggcagcagcggtgggggtaagagttattcatcaatttttgatgttaagaatgccaaagggaatttcttgattgacccagcatcagttgatatcgaggcaaagacaacaacagactcagcctcttccgcatccgtagatacatcagatatttcagatgtcacccaatgttctaaaacatcaagacacacagagctggactacattgcagacgtgttaagcagtgtcaacttgacaacagatgaactgggaccactctttgtcgatcaggatagaccagctttggactcgtccctcttccagaaattggagaacatgcatgtgtacaacaaacaagggaaagagcccttttgccgtggagggtacaggcggctgttgttcgactgcgtaaatgagtgcctggagacaaggcgcacggcctacttccgggcaggatatgcagcatggagcaagggagcagcagcgctgatccggggcgttgaggcccaagtctgcagtgagatcaccagctggaagagcatgggagactggacggaggatgagcttgtcgacaaggacatgagcagcgggctgggcacatgggtcgacttcctggtggaggagttcgaggctggtgtggaggtggagaaccacgtactgggctcgctgcttgacgaggtcgtcgccgacatggtcgtgggacgccacggcaggagtgtaaatttgtagtttgagatgaatcgtgtggttgttggtctgtaattttgctgttacatatcccctatttattctgtcaccccagacatgttgttcagaacagtgataaatgttgtttacccaatgagatagatagttttcacttttcagctcga

SEQ ID NO: 1445 - DNA, 699 bp, Zea Mays
gtcaacgctgagggctgggatcgaggattggaggggtgagaggcgggcccgacgacggtgggggtgggcgtgggcgtggaggagtgttcggtgctgcgggaggtggtggtggcagcgtagtccatggccatgatgatgtgtctccagcttgagaaggccgaggtccaaatggagctccaccagttccactgagttttgcttaagtcttctggatggcacactcctgtcgtaccacaaatcagaaccaatgcgtcaataggcaccgtagttgataataatatctgccacccaacagaatttgatttcttcctgtgcatccatgctggggccaagggaacaagccgtcctacgcattaccatgtgctacgagatgacaacaagttcaccgcagatgctctgcagtctctaacatataacttgtgctacattttcagtgcgcagatcatccagggcggacctataagatgtcaagtgtgtacgccccaacaacccacagatgcggctcgacgctctccatcgtctggtataccaggataggcttcaagagaggctaagaaagtctaagtgtttaggacttgaagaggctgcaaagaacaaaggttttgaccttggtaacgaacaaggagcggctcgttcatctcctgaaggggattacggtcggaatagagaagtgccaagcgacaccactatctcaggaag

SEQ ID NO: 1446 - DNA, 4932 bp, Zea Mays
gaaagattagtttcatttccctccgaaacagagatccgcatttgatttttctctcgccctctcctgacctagtgacttctcgagatttcccattccggtgccgcgcgcgcagctcgagcaagaacaatccccaatctccaatcccaaatcctaacgattccacacccgtctcccctctgcatcccgctgtttcactgcccgctatggcctcacctgccacggacaacgacatcggcgacgagcacctgttcgacggcgtccgcttcatgctggtcggattcaacacctatgacgcgtcccagtaccggtcggagatggtgcggcgcggcggcaccgacgccgggccgtcgggcaacgggtgcacacacgtggtcgtgtggaaccgcatctacgatgacccgacgtgcgtggccgagcgggcgcaagggaagaaggtcgtcagcgggctgtgggtggaggacagcttggatcgcggggtgcttgctgatgccgataggtcttttccaggttttgtattggccgatgagacatttgaagggaataccgggtgctcaatcgttgcttatatgcttgacgggttaccaaaaacgctatcgcgaagacatgatgaaaatggtttctttgatgggagcacggttctcaaaacctttgatagcaaatgcagtcactcaccttgtttgttataaattcgaaggtgagaagtatgaggttgcaaaaaaggtgaacatcaaacttgttaatcaccagtggttggaagactgcttaaaggcatggaaaattctcccagtcagtgattatagcaaaagtagttgggagctagaattaatggatacacatgccattgactctgaacatgaagcagaagcatcagaaccaaggtcattgaacaataggcccagtgtcagtggtaacagagaggtggtggtaggaaggaattcgaacactcctgttcatatcgtaaatacagaagatgacaacagcaagacacatggcattagaggccgaatcagtgctaactctacggttgcagtttctgctaatgttgatgtgtttggacccattcaaagtccttctgttcatatcatgaatatagaagatgcagacatcaatacccatgatattacaggccaagacaatcctgactctagtttgttgccaatttctgccaaggttgatatactcgctcccattcaatcttctggtgaaaagagagacactgtaagaaccacaaatagcccaaatctgcaggaagttaaagaaaaatatgttggtgcaaggacacaggaccttgcaagtggtgttctaggtcctcaaagcacaagcaaaatgcctgtttttagaaatcatgtagataccttaaatgggaccctggacgttctaaaaggccatacagatcatgtttctcgaaaatattctgccagccatgatcagactgatgttgctgaagtcttattgaccagtcctttgagaggaaatcagtctgtggacgagctcgattcatcaaaagttgacagatggcaacatcaggagaaggatagaccctcaggtagtcatatcacagcagctggttacttaaatgccgatgccaagctcaacaatcatgagttcaatccgaagcctcgtagtgattccatgtctaactacatcaagaacacaaataactataaaaagacctctcggaattcatttttacaggaagggtattcagttaaccatatggtatcacctcagagggctgaagaaagcacactgagaggttactccaatctttctacattagaaacaagacagcaaaaggttattcaacctgctgatgttcagagcattgcaggcaatgaaaatcctaagcgtgaggatggactagatggtgcatgtgctcagaaaaggaagagcttggtctccccagctagcataaatttgcaaacggaagatttggcgtcagaaactggtcctttagattctccatttgtgagtagagtgagtgatgcatctgaaaggataataaatctagttgaagctaatgctgttaatttgggaaaggaacgctctagcttttctacaagcagacaagcaagatctaggaagacttctctcaagcatggtggtcccatcaatggaatcaaactttctgaatattcttcaagtgataagaatgtaaaatctttacagaaaggaaggatgtcattcaaagcaatgacagaaagtaaatgtgccatgagttcttcagccactgttcaagatggaaaaacaagtgcaggtttcccgtttcaggataaggatggggaaagtacacacagtagtggtaatgcagcaaatcaagattgcttgaatgagataggaaatgccttcacaaaggatccggcacatgacaaatctgtgcacagttcaaataattcacaagttgtgccctcttatagaaatgccagcagtaggatagaagatccagtcaaagttaatggtaatgaaatggcagtggcatcaaattctgaacttgagaaggtggtgtctgatgccactgtgaaagaaagcacaaaacaatttcaagacacttcaaggaatgtccaggctgaaacgagttattcaaagaaagcaccaactactataagaaggaatgcaggtgtcaagaggcaccggagcgctgatatcgaggctgaagggtcagttatcaacagtgctaagaaagttgttcctgaatcctggcctgccaaagggtcagttatcaacagtgctaagaaagttgttcctgaatcctggcctgccaaagtgattcatggtgagcatgctgacccagcctctaaaaatggctacagcacatcatgtgcagctgaactcaaaacaaatcgtccaaagaaagcattgatctgtagagtgacaaatactgttgcaaagaggacacggggtgcttgcgccaagaaagatgatgcacgggtaagttctagtttggagttcagtaaagtgacgtctcaagaaaattttgagataatctctcccaaaaaacttgacactgcaaatgctgatgaacaacgaagaaattcacctaagaaaatacagaacaccagagtaaggaatagagccacgaagaggtcatggaaatctgacaccaacatgagcaatgatacagtaatggacaaagctgagacagtggctgctggtgcattgtctgatgacttgcttcccacagacaatgttgaagactggcctaaaaagctttccagtcatggaagtgttagtgactgtgaaacactttctccaaaaaccatatcaaaggccagaattaggaatgcagcttccaacaggaaaataagaactgtagaccacaagtccggcgacaagtttggcaaaattggtagtgccgttaagtctgaaacaaaagctttttcatcaaacagaaccgaagggatttcatgcaatatcagcaaagtaattgctgatccagactccgagaagtccaacaaggatgtggtaagagaggtgtcggggctgttttgccaagattcttgcacgatagacaagcaaggatcatacaattctaagttgagaagcagcacaaggaacaaagctccgactccagatcatgaaaaggagaacagactaggctctagtgatctcaactctaaaccaaacagaactggcagtctgcgttccaaatctgatgcaaaatcgatcaagaaaaacacgcgtgtgctcagtaagcaccaaaggggaaatagaagtgaaccttgcaccttgatcacgagcaaacctgcattgtttatcttaagtggaaatagtgagcagagaaggggttatcgctcgatacttagacggctgaaggggcgagtttgtagggattcacatcactggtcataccaagcaacgcatttcatcgctccagaccctctgaggagaaccgagaagttctttgcagcggctgcagctggcaggtggatactgaagagagagtacttgaccgcgtgcattgaggccggcaagttcgtggacgaagaaccgtttgaatggttcggcacaggcttcaacgatggacgaacaatcagtttcgacgctcccaggaaatggcgaaacataaggcagcagatgggccatggcgccttctacggaatgcagatcgttgcctacggacagttcatattaccaactctggacacagtaaagcgtgcagtaaaggccggcgatggcgccgttttagcaacatcgccgccatacacccggttcctagactctggagtcgacttcgccgtggtatcagagagcatatcacgaacagacgcgtgggtccaggaattcatcagccacggcattccctgtgtcagcgccgattacctggtcgagtacgtgtgcaagccgggccagcccctggaccggcacgttctcttcgagacgaactgcgtggccagcaagtccctggagaaactcacgaagaagcaggtagagatggcaacggcggagaagtcggaaccgtcggaagacgacgatccggaggacctgagctgctcggcgtgcggccgcagggaccggggagacgtgatgctgatctgcggcgacgaggccggcgaggccggctgcgggatcggcatgcacatcgactgctgcgaccctcccctggacgccgtccccgacgacgactggatgtgccccaggtgcgccgtgccggagcccgagaccgagacgaagcatgctagaggcaccgaacgcaggggcagagggtccaggcgaaggtgatctttctgtacgctgtgtggtggtctttccatggtgtgtggattacacgcgcttacttaattgaacaaaaataaatgtactacacgaatagttggaggcattgtatgtttttagaaagaaaaaccttgtagaatgccgcacgcttctgctgtccgttctcgctacctccagcagcttactcccaatatgtacacgatctgttggccctaagat

SEQ ID NO: 1447 - DNA, 4922 bp, Zea Mays
gaaagattagtttcatttccctccgaaacagagatccgcatttgatttttctctcgccctctcctgacctagtgacttctcgagatttcccattccggtgccgcgcgcgcagctcgagcaagaacaatccccaatctccaatcccaaatcctaacgattccacacccgtctcccctctgcatcccgctgtttcactgcccgctatggcctcacctgccacggacaacgacatcggcgacgagcacctgttcgacggcgtccgcttcatgctggtcggattcaacacctatgacgcgtcccagtaccggtcggagatggtgcggcgcggcggcaccgacgccgggccgtcgggcaacgggtgcacacacgtggtcgtgtggaaccgcatctacgatgacccgacgtgcgtggccgagcgggcgcaagggaagaaggtcgtcagcgggctgtgggtggaggacagcttggatcgcggggtgcttgctgatgccgatagggttttgtattggccgatgagacatttgaagggaataccgggtgctcaatcgttgcttatatgcttgacgggttaccaaaaacgctatcgcgaagacatgatgaaaatggtttctttgatgggagcacggttctcaaaacctttgatagcaaatgcagtcactcaccttgtttgttataaattcgaaggtgagaagtatgaggttgcaaaaaaggtgaacatcaaacttgttaatcaccagtggttggaagactgcttaaaggcatggaaaattctcccagtcagtgattatagcaaaagtagttgggagctagaattaatggatacacatgccattgactctgaacatgaagcagaagcatcagaaccaaggtcattgaacaataggcccagtgtcagtggtaacagagaggtggtggtaggaaggaattcgaacactcctgttcatatcgtaaatacagaagatgacaacagcaagacacatggcattagaggccgaatcagtgctaactctacggttgcagtttctgctaatgttgatgtgtttggacccattcaaagtccttctgttcatatcatgaatatagaagatgcagacatcaatacccatgatattacaggccaagacaatcctgactctagtttgttgccaatttctgccaaggttgatatactcgctcccattcaatcttctggtgaaaagagagacactgtaagaaccacaaatagcccaaatctgcaggaagttaaagaaaaatatgttggtgcaaggacacaggaccttgcaagtggtgttctaggtcctcaaagcacaagcaaaatgcctgtttttagaaatcatgtagataccttaaatgggaccctggacgttctaaaaggccatacagatcatgtttctcgaaaatattctgccagccatgatcagactgatgttgctgaagtcttattgaccagtcctttgagaggaaatcagtctgtggacgagctcgattcatcaaaagttgacagatggcaacatcaggagaaggatagaccctcaggtagtcatatcacagcagctggttacttaaatgccgatgccaagctcaacaatcatgagttcaatccgaagcctcgtagtgattccatgtctaactacatcaagaacacaaataactataaaaagacctctcggaattcatttttacaggaagggtattcagttaaccatatggtatcacctcagagggctgaagaaagcacactgagaggttactccaatctttctacattagaaacaagacagcaaaaggttattcaacctgctgatgttcagagcattgcaggcaatgaaaatcctaagcgtgaggatggactagatggtgcatgtgctcagaaaaggaagagcttggtctccccagctagcataaatttgcaaacggaagatttggcgtcagaaactggtcctttagattctccatttgtgagtagagtgagtgatgcatctgaaaggataataaatctagttgaagctaatgctgttaatttgggaaaggaacgctctagcttttctacaagcagacaagcaagatctaggaagacttctctcaagcatggtggtcccatcaatggaatcaaactttctgaatattcttcaagtgataagaatgtaaaatctttacagaaaggaaggatgtcattcaaagcaatgacagaaagtaaatgtgccatgagttcttcagccactgttcaagatggaaaaacaagtgcaggtttcccgtttcaggataaggatggggaaagtacacacagtagtggtaatgcagcaaatcaagattgcttgaatgagataggaaatgccttcacaaaggatccggcacatgacaaatctgtgcacagttcaaataattcacaagttgtgccctcttatagaaatgccagcagtaggatagaagatccagtcaaagttaatggtaatgaaatggcagtggcatcaaattctgaacttgagaaggtggtgtctgatgccactgtgaaagaaagcacaaaacaatttcaagacacttcaaggaatgtccaggctgaaacgagttattcaaagaaagcaccaactactataagaaggaatgcaggtgtcaagaggcaccggagcgctgatatcgaggctgaagggtcagttatcaacagtgctaagaaagttgttcctgaatcctggcctgccaaagggtcagttatcaacagtgctaagaaagttgttcctgaatcctggcctgccaaagtgattcatggtgagcatgctgacccagcctctaaaaatggctacagcacatcatgtgcagctgaactcaaaacaaatcgtccaaagaaagcattgatctgtagagtgacaaatactgttgcaaagaggacacggggtgcttgcgccaagaaagatgatgcacgggtaagttctagtttggagttcagtaaagtgacgtctcaagaaaattttgagataatctctcccaaaaaacttgacactgcaaatgctgatgaacaacgaagaaattcacctaagaaaatacagaacaccagagtaaggaatagagccacgaagaggtcatggaaatctgacaccaacatgagcaatgatacagtaatggacaaagctgagacagtggctgctggtgcattgtctgatgacttgcttcccacagacaatgttgaagactggcctaaaaagctttccagtcatggaagtgttagtgactgtgaaacactttctccaaaaaccatatcaaaggccagaattaggaatgcagcttccaacaggaaaataagaactgtagaccacaagtccggcgacaagtttggcaaaattggtagtgccgttaagtctgaaacaaaagctttttcatcaaacagaaccgaagggatttcatgcaatatcagcaaagtaattgctgatccagactccgagaagtccaacaaggatgtggtaagagaggtgtcggggctgttttgccaagattcttgcacgatagacaagcaaggatcatacaattctaagttgagaagcagcacaaggaacaaagctccgactccagatcatgaaaaggagaacagactaggctctagtgatctcaactctaaaccaaacagaactggcagtctgcgttccaaatctgatgcaaaatcgatcaagaaaaacacgcgtgtgctcagtaagcaccaaaggggaaatagaagtgaaccttgcaccttgatcacgagcaaacctgcattgtttatcttaagtggaaatagtgagcagagaaggggttatcgctcgatacttagacggctgaaggggcgagtttgtagggattcacatcactggtcataccaagcaacgcatttcatcgctccagaccctctgaggagaaccgagaagttctttgcagcggctgcagctggcaggtggatactgaagagagagtacttgaccgcgtgcattgaggccggcaagttcgtggacgaagaaccgtttgaatggttcggcacaggcttcaacgatggacgaacaatcagtttcgacgctcccaggaaatggcgaaacataaggcagcagatgggccatggcgccttctacggaatgcagatcgttgcctacggacagttcatattaccaactctggacacagtaaagcgtgcagtaaaggccggcgatggcgccgttttagcaacatcgccgccatacacccggttcctagactctggagtcgacttcgccgtggtatcagagagcatatcacgaacagacgcgtgggtccaggaattcatcagccacggcattccctgtgtcagcgccgattacctggtcgagtacgtgtgcaagccgggccagcccctggaccggcacgttctcttcgagacgaactgcgtggccagcaagtccctggagaaactcacgaagaagcaggtagagatggcaacggcggagaagtcggaaccgtcggaagacgacgatccggaggacctgagctgctcggcgtgcggccgcagggaccggggagacgtgatgctgatctgcggcgacgaggccggcgaggccggctgcgggatcggcatgcacatcgactgctgcgaccctcccctggacgccgtccccgacgacgactggatgtgccccaggtgcgccgtgccggagcccgagaccgagacgaagcatgctagaggcaccgaacgcaggggcagagggtccaggcgaaggtgatctttctgtacgctgtgtggtggtctttccatggtgtgtggattacacgcgcttacttaattgaacaaaaataaatgtactacacgaatagttggaggcattgtatgtttttagaaagaaaaaccttgtagaatgccgcacgcttctgctgtccgttctcgctacctccagcagcttactcccaatatgtacacgatctgttggccctaagat

SEQ ID NO: 1448 - DNA, 4383 bp, Zea Mays
gaaaacttgagcgaagtaatccaacaacataatcattatgtctatgaggtgtctgtctttggtgagaagtatgaggttgcaaaaaaggtgaacatcaaacttgttaatcaccagtggttggaagactgcttaaaggcatggaaaattctcccagtcagtgattatagcaaaagtagttgggagctagaattaatggatacacatgccattgactctgaacatgaagcagaagcatcagaaccaaggtcattgaacaataggcccagtgtcaggtgcgcttttcaactgaaaaaaaatacgatgaaacttttaccaagcctgatgtagatttatcagtgatcacctatcattcacagtggtaacagagaggtggtggtaggaaggaattcgaacactcctgttcatatcgtaaatacagaagatgacaacagcaagacacatggcattagaggccgaatcagtgctaactctacggttgcagtttctgctaatgttgatgtgtttggacccattcaaagtccttctgttcatatcatgaatatagaagatgcagacatcaatacccatgatattacaggccaagacaatcctgactctagtttgttgccaatttctgccaaggttgatatactcgctcccattcaatcttctggtgaaaagagagacactgtaagaaccacaaatagcccaaatctgcaggaagttaaagaaaaatatgttggtgcaaggacacaggaccttgcaagtggtgttctaggtcctcaaagcacaagcaaaatgcctgtttttagaaatcatgtagataccttaaatgggaccctggacgttctaaaaggccatacagatcatgtttctcgaaaatattctgccagccatgatcagactgatgttgctgaagtcttattgaccagtcctttgagaggaaatcagtctgtggacgagctcgattcatcaaaagttgacagatggcaacatcaggagaaggatagaccctcaggtagtcatatcacagcagctggttacttaaatgccgatgccaagctcaacaatcatgagttcaatccgaagcctcgtagtgattccatgtctaactacatcaagaacacaaataactataaaaagacctctcggaattcatttttacaggaagggtattcagttaaccatatggtatcacctcagagggctgaagaaagcacactgagaggttactccaatctttctacattagaaacaagacagcaaaaggttattcaacctgctgatgttcagagcattgcaggcaatgaaaatcctaagcgtgaggatggactagatggtgcatgtgctcagaaaaggaagagcttggtctccccagctagcataaatttgcaaacggaagatttggcgtcagaaactggtcctttagattctccatttgtgagtagagtgagtgatgcatctgaaaggataataaatctagttgaagctaatgctgttaatttgggaaaggaacgctctagcttttctacaagcagacaagcaagatctaggaagacttctctcaagcatggtggtcccatcaatggaatcaaactttctgaatattcttcaagtgataagaatgtaaaatctttacagaaaggaaggatgtcattcaaagcaatgacagaaagtaaatgtgccatgagttcttcagccactgttcaagatggaaaaacaagtgcaggtttcccgtttcaggataaggatggggaaagtacacacagtagtggtaatgcagcaaatcaagattgcttgaatgagataggaaatgccttcacaaaggatccggcacatgacaaatctgtgcacagttcaaataattcacaagttgtgccctcttatagaaatgccagcagtaggatagaagatccagtcaaagttaatggtaatgaaatggcagtggcatcaaattctgaacttgagaaggtggtgtctgatgccactgtgaaagaaagcacaaaacaatttcaagacacttcaaggaatgtccaggctgaaacgagttattcaaagaaagcaccaactactataagaaggaatgcaggtgtcaagaggcaccggagcgctgatatcgaggctgaagggtcagttatcaacagtgctaagaaagttgttcctgaatcctggcctgccaaagggtcagttatcaacagtgctaagaaagttgttcctgaatcctggcctgccaaagtgattcatggtgagcatgctgacccagcctctaaaaatggctacagcacatcatgtgcagctgaactcaaaacaaatcgtccaaagaaagcattgatctgtagagtgacaaatactgttgcaaagaggacacggggtgcttgcgccaagaaagatgatgcacgggtaagttctagtttggagttcagtaaagtgacgtctcaagaaaattttgagataatctctcccaaaaaacttgacactgcaaatgctgatgaacaacgaagaaattcacctaagaaaatacagaacaccagagtaaggaatagagccacgaagaggtcatggaaatctgacaccaacatgagcaatgatacagtaatggacaaagctgagacagtggctgctggtgcattgtctgatgacttgcttcccacagacaatgttgaagactggcctaaaaagctttccagtcatggaagtgttagtgactgtgaaacactttctccaaaaaccatatcaaaggccagaattaggaatgcagcttccaacaggaaaataagaactgtagaccacaagtccggcgacaagtttggcaaaattggtagtgccgttaagtctgaaacaaaagctttttcatcaaacagaaccgaagggatttcatgcaatatcagcaaagtaattgctgatccagactccgagaagtccaacaaggatgtggtaagagaggtgtcggggctgttttgccaagattcttgcacgatagacaagcaaggatcatacaattctaagttgagaagcagcacaaggaacaaagctccgactccagatcatgaaaaggagaacagactaggctctagtgatctcaactctaaaccaaacagaactggcagtctgcgttccaaatctgatgcaaaatcgatcaagaaaaacacgcgtgtgctcagtaagcaccaaaggggaaatagaagtgaaccttgcaccttgatcacgagcaaacctgcattgtttatcttaagtggaaatagtgagcagagaaggggttatcgctcgatacttagacggctgaaggggcgagtttgtagggattcacatcactggtcataccaagcaacgcatttcatcgctccagaccctctgaggagaaccgagaagttctttgcagcggctgcagctggcaggtggatactgaagagagagtacttgaccgcgtgcattgaggccggcaagttcgtggacgaagaaccgtttgaatggttcggcacaggcttcaacgatggacgaacaatcagtttcgacgctcccaggaaatggcgaaacataaggcagcagatgggccatggcgccttctacggaatgcagatcgttgcctacggacagttcatattaccaactctggacacagtaaagcgtgcagtaaaggccggcgatggcgccgttttagcaacatcgccgccatacacccggttcctagactctggagtcgacttcgccgtggtatcagagagcatatcacgaacagacgcgtgggtccaggaattcatcagccacggcattccctgtgtcagcgccgattacctggtcgagtacgtgtgcaagccgggccagcccctggaccggcacgttctcttcgagacgaactgcgtggccagcaagtccctggagaaactcacgaagaagcaggtagagatggcaacggcggagaagtcggaaccgtcggaagacgacgatccggaggacctgagctgctcggcgtgcggccgcagggaccggggagacgtgatgctgatctgcggcgacgaggccggcgaggccggctgcgggatcggcatgcacatcgactgctgcgaccctcccctggacgccgtccccgacgacgactggatgtgccccaggtgcgccgtgccggagcccgagaccgagacgaagcatgctagaggcaccgaacgcaggggcagagggtccaggcgaaggtgatctttctgtacgctgtgtggtggtctttccatggtgtgtggattacacgcgcttacttaattgaacaaaaataaatgtactacacgaatagttggaggcattgtatgtttttagaaagaaaaaccttgtagaatgccgcacgcttctgctgtccgttctcgctacctccagcagcttactcccaatatgtacacgatctgttggccctaagat

SEQ ID NO: 1449 - DNA, 1975 bp, Zea Mays
gttcgataaaaaaatagtcaaattgtgtatgcttagtgtgcaaagcttcatcaatatgtccataaaatgacaatatttttggagcaattcccaatattgtaagagaaatcaaaagtcaaaaattacgatttctcatcaaatacgccttacataatgcagggagagaggtctccaaggtcatacatttgatgtttggttgtctgacattcttgggtggagacagaatcgagtataatgtttgatgcatatgaaaaggagttattgttagaactacttggtagcatctggggggaaaagtttactttgggggatcaagggtatcgaggaagctaaacgtcaagccagtactgccctaggttttactcaaaggacatcaacaacattggcccagctaaatgtgaacctattcattccatttgtgtgggtatgtggccattgtatcacatgcaagaccattaaagcccaccttgttttcctgagttatgagcagttagtaaaacttgtgatacgaacaaaatcttaccacaacttattaatgagaaaccgaagtgaataagaaagataaggcatcattcagcttccaattaaaaatccatgatgtcctgcttataccggcacaaatgacaatcttaattctagccagacaacataccaatgcagtacctaccaagtataatttcgtgtcatgtatttccttttatctccatatatataattcaggctaacatctttcatgtttacacttcaatgtttttgaaaactgctccaaaccatcgatcagcagcaacatagcttcaattactagtttctctccacacattcatacttgttcagttactccgttcatcattctttattttctctattagtactaagtgtttcatctatgcaggtttccatttttttctctatttctctttgttaatatatcatgcttcatttttttatatcaacatgctgaaagcagaccttgtgacattagcatcaacaagttaccagagtgtcttttctgatgacctgacttgacttgtgctcttgttcttgaagttgtgcaaatcaccttctattttgcgtagacatgacatccaatcaaacatgagattccatagagcagcaagtgtccatgtatagcaccaaccgttgcaatggaacattggcaaagtccacaagtaaacagcgccttcgttcattccccatatcaaagcaccactcagtgacattagataaggcaaagagagtaatggttgcagctgctcagggtttccttttacattggcaaatggcaaatgacagtgaattagtgggttggccttccaatacattcctggataaacttgaccataaaattcccaaacaagcagcgaccattctcaaatatagtgagcagtgattttctgacatggaagctttgttgaaacaagagatttttatcaaaacttggaaacatgtgaccatagttctaagttgtacctacgcccaggtgaatatggcacaggattcaagatctgcccttgtagcacaatgccacagatatggtaaatgagctaaatttggattttttttcctggtcctcggggatactgataatcgtgctctttgcctctttgacatatttgagggaaaccatactagtggtgagtggtgagtggtgacaatagtgggcgcacttttatcatcctatttcagttcgatggctcccacttgccaccggcatcaagatatgaaaacggatgatctgtaccaacagatatggcagtcagcatgtgatgcatcaaagtcatgtctttgagcatacaagaaaaagtaactgaaataacaaactgattaagctttccgagatgccatgctgtttataccaagaaaacgctttctttcagccacccatatatccatcaccagaggatacaaacataaccatctgtttcagcgttgtacccgtctgtaataggcgcgtaccgcgtacggctaattagat

SEQ ID NO: 1450 - DNA, 2376 bp, Zea Mays
gtaaataccgcactccgcacggacacgtgctggcaaagcatgcgtacgtgtcctctccagttcttccccaggaggccaaggacccagtagaacgccgatctgttgtatacggagttacggactggcgccgccgcttagtcaccacccaccaaacttcacggcttcggctatcttcaagagacaagagtggagggcgaagagcagagctgggggggagatgaacagcggcgtggacacgcaggcgcgggcgctcgcggacgaggtgcgcggtagtttagagacgaagaactggatgctggacctcggtcacccgctcctgaaccgcgtcgccgagagcttcgccaaggccgcggggatcggcgcagtgcaggcggtcgccagggaatcgtacttcatggcgactgaaggcgagggaggatctgtgtccggcgcgaccggcgcaaggaaacgctcgttcccggagctcaatgggacgaacagtagcagcatcaagtcggcagaggccatggtgaaaagcgtgagcaaagagtcgttacagtggggtaacactttccatacagcatgaggctcgcggctggggtgcactccggcctcacctacggcctcgcgggggtgcgcgggacgcacgactggaggaacagcgccgtggctggcgccatcacgggcgccgcggtcgcgctcacgtcggagcacgcgtcgcacgagcaggtcgtgcagtgcgccatcaccggcgccgcgctctccacggccgccaacgtgctctccggcatattctgagccgccggccgtgccgtgccgctcgatttccgaggattggctgatagttctgtcacccaatcgttcgggtaccgtcgctcttacgcttcagtacgataacttgggagcgttgcattcatgcattcacttgcattgtcattacaacttatgccctactttactgttagccgtataacggttttactataatttacacgctgcttagtcatatctcctggtgggccgcgtaatcaccggggcattctattgactttcaacatgatgatggggaaattatctgtgacatacccctataaacttttaacatgatgggcaaattatctgtgacatactgacaaaagagtggctttagctcttgtactatctgcggcatactacgtcgataaaaaaaaattctatttcagggaaaaaaatctattttaggaggaatattgcggacagccaaattgaaaatttcaaattttaattgatgtggtgtgtcctaaataatgaataacatgtttagtgtgttgatgtgctgtgtcctaaataatgaataacatttttagtgtgtttctgatagatagtgtcctcaataaatagtatcatttctattatctaatctaagagcagctccaataggctcgttaaaacatttttagcccttgttcggttattcccaatacatatggattggatgaaattggaaaaaattaagaagaagtttgacttgtttgggattcaaacccatccaatcccactcaatccacatggattgagagctaaccgaacaagcccttagtgtgttgatatggtgtgtcctaaataatgagtaactattcattatttagtgtgtttctgatatataaatagtatcatttctagtatctaggcctgcaaatgggatgggtgtaaatgagtattttaggtgggtttaagaaatggttttgttttggtgggttatgatgggttttaattattaacgggttgggttgggtgggtttattttatattgcgggtcaaaatggtggatacccatgggtatagatggatttgtataggtatgggttttcatgggtattcaccaatcagactaccaccttaatcagtaccattttatttcaggtttagaaaagtctttgatttctttagtcacacacaacatactatactataccattttatcagtaccattttatttaaaaatgtgaccaactataaagttgtataactttttgatatctacaaattctattttaatagtttctacatccgagaccgtttacaaaatttgaattttaaatttgaaaacttcacacgaatttttcaatgataaatttttcaatgataagatgatttcaaataaaaaagttgacaattacaaagtttcataacatttcaagacctacaacttttattttggtggtttttccatccgaggtagtttgaaaattttaaaattcaaaattcaaacatagttttgtatggcaagatgatttcaaaccaaaacattgtcaactacaaagtttcataactcttcaatacctacaactttcatgttggtggttttttctttcgaggttgttttcaaaattcaaattttaaattttttaaattcag

SEQ ID NO: 1451 - DNA, 2353 bp, Zea Mays
gtaaataccgcactccgcacggacacgtgctggcaaagcatgcgtacgtgtcctctccagttcttccccaggaggccaaggacccagtagaacgccgatctgttgtatacggagttacggactggcgccgccgcttagtcaccacccaccaaacttcacggcttcggctatcttcaagagacaagagtggagggcgaagagcagagctgggggggagatgaacagcggcgtggacacgcaggcgcgggcgctcgcggacgaggtgcgcggtagtttagagacgaagaactggatgctggacctcggtcacccgctcctgaaccgcgtcgccgagagcttcgccaaggccgcggggatcggcgcagtgcaggcggtcgccagggaatcgtacttcatggcgactgaaggcgagggaggatctgtgtccggcgcgaccggcgcaaggaaacgctcgttcccggagctcaatgggacgaacagtagcagcatcaagtcggcagaggccatggtgaaaagcgtgagcaaagagtcgttacagtgggggctcgcggctggggtgcactccggcctcacctacggcctcgcgggggtgcgcgggacgcacgactggaggaacagcgccgtggctggcgccatcacgggcgccgcggtcgcgctcacgtcggagcacgcgtcgcacgagcaggtcgtgcagtgcgccatcaccggcgccgcgctctccacggccgccaacgtgctctccggcatattctgagccgccggccgtgccgtgccgctcgatttccgaggattggctgatagttctgtcacccaatcgttcgggtaccgtcgctcttacgcttcagtacgataacttgggagcgttgcattcatgcattcacttgcattgtcattacaacttatgccctactttactgttagccgtataacggttttactataatttacacgctgcttagtcatatctcctggtgggccgcgtaatcaccggggcattctattgactttcaacatgatgatggggaaattatctgtgacatacccctataaacttttaacatgatgggcaaattatctgtgacatactgacaaaagagtggctttagctcttgtactatctgcggcatactacgtcgataaaaaaaaattctatttcagggaaaaaaatctattttaggaggaatattgcggacagccaaattgaaaatttcaaattttaattgatgtggtgtgtcctaaataatgaataacatgtttagtgtgttgatgtgctgtgtcctaaataatgaataacatttttagtgtgtttctgatagatagtgtcctcaataaatagtatcatttctattatctaatctaagagcagctccaataggctcgttaaaacatttttagcccttgttcggttattcccaatacatatggattggatgaaattggaaaaaattaagaagaagtttgacttgtttgggattcaaacccatccaatcccactcaatccacatggattgagagctaaccgaacaagcccttagtgtgttgatatggtgtgtcctaaataatgagtaactattcattatttagtgtgtttctgatatataaatagtatcatttctagtatctaggcctgcaaatgggatgggtgtaaatgagtattttaggtgggtttaagaaatggttttgttttggtgggttatgatgggttttaattattaacgggttgggttgggtgggtttattttatattgcgggtcaaaatggtggatacccatgggtatagatggatttgtataggtatgggttttcatgggtattcaccaatcagactaccaccttaatcagtaccattttatttcaggtttagaaaagtctttgatttctttagtcacacacaacatactatactataccattttatcagtaccattttatttaaaaatgtgaccaactataaagttgtataactttttgatatctacaaattctattttaatagtttctacatccgagaccgtttacaaaatttgaattttaaatttgaaaacttcacacgaatttttcaatgataaatttttcaatgataagatgatttcaaataaaaaagttgacaattacaaagtttcataacatttcaagacctacaacttttattttggtggtttttccatccgaggtagtttgaaaattttaaaattcaaaattcaaacatagttttgtatggcaagatgatttcaaaccaaaacattgtcaactacaaagtttcataactcttcaatacctacaactttcatgttggtggttttttctttcgaggttgttttcaaaattcaaattttaaattttttaaattcag

SEQ ID NO: 1452 - DNA, 1131 bp, Zea Mays
agaatcctttccttcctgtgcaatttcacgtgttagtttccgacggagatctgtagctgagaagttcagggaacttgttggaaaggaggctgcatcaaagagtggtcaattcacattcatgaactgctttgacatgggctctggcagccttgcgtgcactgcaaaggagggtgtcaagttgtacgtcaacaacatccgaagtgcacacttggaaatggtgcggcaacgagccatggagaaagctttagctgatgctgtgacggaaggcctaacacctagtgaagcagccaaacaagctcagaagattagtgcaaaagcgactaaacttgctgctcgtcaagccaaaaggatattgggaccaataatttcttgtggttgggacttcttcgaagcaatgtactttggtggaagcatgacggaaggttttctccggggcactggcaccttgtttggaacttatatgggtggtttccatggtgaggagcgctttgggaagctgggatatcttgcaggaagccatctaggaagctggggtggaggaagaattggattgatgatttatgatatcataagcggcctgaaatttatgttccagtctatccaacctgagtatgaatcatcttcatatgctgaagatggtccagaatacgcagaaagttacacaaaccaagaggactcaacatactatgaaacatcagaggaaaagcaggaagaatcaaaatggtttggtttgttctgaaactgcgaaccgaattgttctgtcttgtacttaggggcgaagctaggtagtagctggagtgttgcaccccctgaaaatgtgaaaacagtgctttccactgaaatttcaccatatatgtatccacaaggcaagtgtactcactaatttgctctagcttcgccacagttatactggagcaggggaacagttagctgttttattatacctttctgaatgtttagcttcattttgtatgcttacataggttaggtatgattcttctctgtaattcttgttttggctactgtgtacataaaacatatggatcaactctggagattgggcaggcagaatgcaccataaataacagcaacagtgaacacttacggaaagttatgacgagtatcttgttt

SEQ ID NO: 1453 - DNA, 3299 bp, Zea Mays
acggaagcgcgaccccgaaaaaaaaatgtcctccatctccatcctgcacagatcctgcctccgcctaggtctgctgccgttctcaccactgcgtgctcgcgccaccactctacgccttccccttcctcttcctcagccgcggcggcatctccacctgccccgccggagcgccatgagctctgccgcgtccaggctgtcgcacatcgcggctgccaccggcggcgggggcggcgcggccggggagtcgaatgagtcgccgccggccgcatccgccgcgacccaggaagacgatggtctttcatctggggatatgggctaccgccttcctccaaaagaaatacaggacattgttgatgcaccaccacttcctgtcttgtcattctctccaaacaaagataaaattctgtttctgaagcgtcgagcactgccaccactatcagacattgcaaagcctgaggagaagcttgctggtctaaggattgatggaaattctaatactaggagccgaatgtctttctacactggaataagtatccataagctgttagacgatgggactttgggcccagagaaagaggtgcatggatatccagtaggtgcaaggattaattttgtcacctggtcacaagacggccgtcatatatccttcagtattcgagtcgatgaggaagacagcaaaagtggaaagctgagagtgtggattgctgatgtggagtctggagaagcaaggccactttttaaatcgcctgaaatatacctaaatgctatttttgacagctttgtatgggttaatgattgtacactgctagtctgcactattcctgcgacacgtggagatccaccacataagccatcagttccatctggcccgaaaattcaatctaatgagtcaaagaatgtagtccaagcgagaactttccaagatcttctgaaagatgaatatgatgcaaaactatttgattactatgcaacctcacagcttgtgttggcctctttggatggaacagtgaagccaattggccctccagctatatatacatctgttgatccatcaccggatgataaatacataatgctttcttctatccaccgcccatattcctacattgtaccttgtgggaggtttccaaagaaagttgagttgtggactgtagatggaaagtttattagggaactttgtgatttgcccctggctgaggacattccaattacgatgagcagtgtacgcaagggtaagcgctcaattaattggaggccagacaaaccttcgatgctgtactgggtggagacacaagatggtggagatgcaaaagtagaagtctcccctcgtgacatagtttacatggaaaatgctgagcctataaatggtgaacacccagagattctgcataaacttgaccttcgctatgctggcacctcttggtgtgatgaatctcttgctttagtgtatgaatcttggtttaaaactcggaaaatcagaacatgggtgctctctcctgataaaaaagatgtcagcccacgcgttttattcgaccggtcttcagaagatgtatactctgaccctggctcaccaatgatgcgaagaactgtgatgggaacatatgtcatcgcaaagatcaagaaagaagacggaaatatttatgtcttgttgaatgggatgggtgccacaccagaaggaaatattccattcctcgatttgtttgatataaatactgggagtaaagagcgtatatgggagagcgacagggaaaagtactatgaaactgttgttgcactgatgtcagacaaaactgacggggaactgctccttgatcagttaaagatacttacgtcgaaagaatcaaaaacagaaaacacacaatattacttgcagacttggccagaaaagaatcaagttaagataacaaatttcccccacccatatcctcagcttgcttcattgtataaggaaatgataagataccagcgaaaggatggagttcaacttacagcaaacttatacctgcccccagggtatgattcatcaaaagatggacctttgccatgtctagtttggtcctaccctggtgaatttaaaagcaaagatgctgctggtcaagttcgtggttcccctaatgaatttccagggattggtgctacatctcctcttctttggttagctagagggtttgtgattctgtctggtccgacaatcccaattatcggtgaaggcgatgaagaggccaatgacagatatgtggaacaactagtaacgagtgcagaggctgcagttgaggaagttgtcaaaagaggggtggctcaccctgataaaattgctgtcggtggtcattcatatggtgcattcatgacagctaatctgctggctcacgctcctcatcttttctgctgtggaatcgctcgctctggagcttacaacaggactctaactccatttggttttcagaacgaggatagaacactctgggaggcaacaaacacatatgtcgagatgagccctttcatgtctgcaaacaaaatcaagaaaccaattttacttatccatggagagcaggacaacaattctgggacattgacaatgcagtcagaccgattcttcaatgccttgaaaggtcatggtgcactgtctcgtttggtaatacttccttttgagagccatgggtactctgccagggagagtatcatgcacgtcctctgggagaccgatagctagtggtggcagtgcagcccgtgaaggtctaaaccctgaggaactctcatcattaccaagatcgcttctgtgatcaacttcagttggtgttcatgaaacattccctggacagcaagcctaaagggaaaaaatagtgtatcgttgcacttctaccttaaccgactaccagggatgccttgattggcctcatatttgtttcgattgctgcaggtgatcatgttactggcatgcaggagccccctacccccccccccccccccacccccaccccacaaatataagaaaggcctagtctctggtggccactgcactcagatatatttgggtcaatttgtattctattggtaatggccaatggaagtcattcttgcgattaatatcatgtacagaaatatagccttttgcagttttgatcccaactcttgcacttggcagcgaactgatacgttggttttctttgacagcaatctaaaataaaataataactaatgagattatcatatgctccaatgtctcgcatcgtcacattttacctgttaccattatttactgcagctgttgtactgacattcgttgcccatttgagaggcgc

SEQ ID NO: 1454 - DNA, 3142 bp, Zea Mays
cgaaaaaaaaatgtcctccatctccatcctgcacagatcctgcctccgcctaggtctttcatctggggatatgggctaccgccttcctccaaaagaaatacaggacattgttgatgcaccaccacttcctgtcttgtcattctctccaaacaaagataaaattctgtttctgaagcgtcgagcactgccaccactatcagacattgcaaagcctgaggagaagcttgctggtctaaggattgatggaaattctaatactaggagccgaatgtctttctacactggaataagtatccataagctgttagacgatgggactttgggcccagagaaagaggtgcatggatatccagtaggtgcaaggattaattttgtcacctggtcacaagacggccgtcatatatccttcagtattcgagtcgatgaggaagacagcaaaagtggaaagctgagagtgtggattgctgatgtggagtctggagaagcaaggccactttttaaatcgcctgaaatatacctaaatgctatttttgacagctttgtatgggttaatgattgtacactgctagtctgcactattcctgcgacacgtggagatccaccacataagccatcagttccatctggcccgaaaattcaatctaatgagtcaaagaatgtagtccaagcgagaactttccaagatcttctgaaagatgaatatgatgcaaaactatttgattactatgcaacctcacagcttgtgttggcctctttggatggaacagtgaagccaattggccctccagctatatatacatctgttgatccatcaccggatgataaatacataatgctttcttctatccaccgcccatattcctacattgtaccttgtgggaggtttccaaagaaagttgagttgtggactgtagatggaaagtttattagggaactttgtgatttgcccctggctgaggacattccaattacgatgagcagtgtacgcaagggtaagcgctcaattaattggaggccagacaaaccttcgatgctgtactgggtggagacacaagatggtggagatgcaaaagtagaagtctcccctcgtgacatagtttacatggaaaatgctgagcctataaatggtgaacacccagagattctgcataaacttgaccttcgctatgctggcacctcttggtgtgatgaatctcttgctttagtgtatgaatcttggtttaaaactcggaaaatcagaacatgggtgctctctcctgataaaaaagatgtcagcccacgcgttttattcgaccggtcttcagaagatgtatactctgaccctggctcaccaatgatgcgaagaactgtgatgggaacatatgtcatcgcaaagatcaagaaagaagacggaaatatttatgtcttgttgaatgggatgggtgccacaccagaaggaaatattccattcctcgatttgtttgatataaatactgggagtaaagagcgtatatgggagagcgacagggaaaagtactatgaaactgttgttgcactgatgtcagacaaaactgacggggaactgctccttgatcagttaaagatacttacgtcgaaagaatcaaaaacagaaaacacacaatattacttgcagacttggccagaaaagaatcaagttaagataacaaatttcccccacccatatcctcagcttgcttcattgtataaggaaatgataagataccagcgaaaggatggagttcaacttacagcaaacttatacctgcccccagggtatgattcatcaaaagatggacctttgccatgtctagtttggtcctaccctggtgaatttaaaagcaaagatgctgctggtcaagttcgtggttcccctaatgaatttccagggattggtgctacatctcctcttctttggttagctagagggtttgtgattctgtctggtccgacaatcccaattatcggtgaaggcgatgaagaggccaatgacagatatgtggaacaactagtaacgagtgcagaggctgcagttgaggaagttgtcaaaagaggggtggctcaccctgataaaattgctgtcggtggtcattcatatggtgcattcatgacagctaatctgctggctcacgctcctcatcttttctgctgtggaatcgctcgctctggagcttacaacaggactctaactccatttggttttcagaacgaggatagaacactctgggaggcaacaaacacatatgtcgagatgagccctttcatgtctgcaaacaaaatcaagaaaccaattttacttatccatggagagcaggacaacaattctgggacattgacaatgcagtcagaccgattcttcaatgccttgaaaggtcatggtgcactgtctcgtttggtaatacttccttttgagagccatgggtactctgccagggagagtatcatgcacgtcctctgggagaccgataggtggttgcagaactactgtgtaaatggtactagcaaggttgactcagtgtcagaggctgacagtaaaaacaaaacattgtcagctagtggtggcagtgcagcccgtgaaggtctaaaccctgaggaactctcatcattaccaagatcgcttctgtgatcaacttcagttggtgttcatgaaacattccctggacagcaagcctaaagggaaaaaatagtgtatcgttgcacttctaccttaaccgactaccagggatgccttgattggcctcatatttgtttcgattgctgcaggtgatcatgttactggcatgcaggagccccctacccccccccccccccccacccccaccccacaaatataagaaaggcctagtctctggtggccactgcactcagatatatttgggtcaatttgtattctattggtaatggccaatggaagtcattcttgcgattaatatcatgtacagaaatatagccttttgcagttttgatcccaactcttgcacttggcagcgaactgatacgttggttttctttgacagcaatctaaaataaaataataactaatgagattatcatatgctccaatgtctcgcatcgtcacattttacctgttaccattatttactgcagctgttgtactgacattcgttgcccatttgagaggcgc

SEQ ID NO: 1455 - DNA, 2996 bp, Zea Mays
aaatgtcctccatctccatcctgcacagatcctgcctccgcctaggtctttcatctggggatatgggctaccgccttcctccaaaagaaatacaggacattgttgatgcaccaccacttcctgtcttgtcattctctccaaacaaagataaaattctgtttctgaagcgtcgagcactgccaccactatcagacattgcaaagcctgaggagaagcttgctggtctaaggattgatggaaattctaatactaggagccgaatgtctttctacactggaataagtatccataagctgttagacgatgggactttgggcccagagaaagaggtgcatggatatccagtaggtgcaaggattaattttgtcacctggtcacaagacggccgtcatatatccttcagtattcgagtcgatgaggaagacagcaaaagtggaaagctgagagtgtggattgctgatgtggagtctggagaagcaaggccactttttaaatcgcctgaaatatacctaaatgctatttttgacagctttgtatgggttaatgattgtacactgctagtctgcactattcctgcgacacgtggagatccaccacataagccatcagttccatctggcccgaaaattcaatctaatgagtcaaagaatgtagtccaagcgagaactttccaagatcttctgaaagatgaatatgatgcaaaactatttgattactatgcaacctcacagcttgtgttggcctctttggatggaacagtgaagccaattggccctccagctatatatacatctgttgatccatcaccggatgataaatacataatgctttcttctatccaccgcccatattcctacattgtaccttgtgggaggtttccaaagaaagttgagttgtggactgtagatggaaagtttattagggaactttgtgatttgcccctggctgaggacattccaattacgatgagcagtgtacgcaagggtaagcgctcaattaattggaggccagacaaaccttcgatgctgtactgggtggagacacaagatggtggagatgcaaaagtagaagtctcccctcgtgacatagtttacatggaaaatgctgagcctataaatggtgaacacccagagattctgcataaacttgaccttcgctatgctggcacctcttggtgtgatgaatctcttgctttagtgtatgaatcttggtttaaaactcggaaaatcagaacatgggtgctctctcctgataaaaaagatgtcagcccacgcgttttattcgaccggtcttcagaagatgtatactctgaccctggctcaccaatgatgcgaagaactgtgatgggaacatatgtcatcgcaaagatcaagaaagaagacggaaatatttatgtcttgttgaatgggatgggtgccacaccagaaggaaatattccattcctcgatttgtttgatataaatactgggagtaaagagcgtatatgggagagcgacagggaaaagtactatgaaactgttgttgcactgatgtcagacaaaactgacggggaactgctccttgatcagttaaagatacttacgtcgaaagaatcaaaaacagaaaacacacaatattacttgcagacttggccagaaaagaatcaagttaagataacaaatttcccccacccatatcctcagcttgcttcattgtataaggaaatgataagataccagcgaaaggatggagttcaacttacagcaaacttatacctgcccccagggtatgattcatcaaaagatggacctttgccatgtctagtttggtcctaccctggtgaatttaaaagcaaagatgctgctggtcaagttcgtggttcccctaatgaatttccagggattggtgctacatctcctcttctttggttagctagagggtttgtgattctgtctggtccgacaatcccaattatcggtgaaggcgatgaagaggccaatgacagatatgtggaacaactagtaacgagtgcagaggctgcagttgaggaagttgtcaaaagaggggtggctcaccctgataaaattgctgtcggtggtcattcatatggtgcattcatgacagctaatctgctggctcacgctcctcatcttttctgctgtggaatcgctcgctctggagcttacaacaggactctaactccatttggttttcagaacgaggatagaacactctgggaggcaacaaacacatatgtcgagatgagccctttcatgtctgcaaacaaaatcaagaaaccaattttacttatccatggagagcaggacaacaattctgggacattgacaatgcagtcagaccgattcttcaatgccttgaaaggtcatggtgcactgtctcgtttggtaatacttccttttgagagccatgggtactctgccagggagagtatcatgcacgtcctctgggagaccgataggtggttgcagaactactgtgtaaatggtactagcaaggttgactcagtgtcagaggctgacagtaaaaacaaaacattgtcagctagtggtggcagtgcagcccgtgaaggtctaaaccctgaggaactctcatcattaccaagatcgcttctgtggtgatcatgttactggcatgcaggagccccctacccccccccccccccccacccccaccccacaaatataagaaaggcctagtctctggtggccactgcactcagatatatttgggtcaatttgtattctattggtaatggccaatggaagtcattcttgcgattaatatcatgtacagaaatatagccttttgcagttttgatcccaactcttgcacttggcagcgaactgatacgttggttttctttgacagcaatctaaaataaaataataactaatgagattatcatatgctccaatgtctcgcatcgtcacattttacctgttaccattatttactgcagctgttgtactgacattcgttgcccatttgagaggcgc

SEQ ID NO: 1456 - DNA, 3132 bp, Zea Mays
tccatgaagttgactatgggggtggttactggtcacaccgcaggtctttcatctggggatatgggctaccgccttcctccaaaagaaatacaggacattgttgatgcaccaccacttcctgtcttgtcattctctccaaacaaagataaaattctgtttctgaagcgtcgagcactgccaccactatcagacattgcaaagcctgaggagaagcttgctggtctaaggattgatggaaattctaatactaggagccgaatgtctttctacactggaataagtatccataagctgttagacgatgggactttgggcccagagaaagaggtgcatggatatccagtaggtgcaaggattaattttgtcacctggtcacaagacggccgtcatatatccttcagtattcgagtcgatgaggaagacagcaaaagtggaaagctgagagtgtggattgctgatgtggagtctggagaagcaaggccactttttaaatcgcctgaaatatacctaaatgctatttttgacagctttgtatgggttaatgattgtacactgctagtctgcactattcctgcgacacgtggagatccaccacataagccatcagttccatctggcccgaaaattcaatctaatgagtcaaagaatgtagtccaagcgagaactttccaagatcttctgaaagatgaatatgatgcaaaactatttgattactatgcaacctcacagcttgtgttggcctctttggatggaacagtgaagccaattggccctccagctatatatacatctgttgatccatcaccggatgataaatacataatgctttcttctatccaccgcccatattcctacattgtaccttgtgggaggtttccaaagaaagttgagttgtggactgtagatggaaagtttattagggaactttgtgatttgcccctggctgaggacattccaattacgatgagcagtgtacgcaagggtaagcgctcaattaattggaggccagacaaaccttcgatgctgtactgggtggagacacaagatggtggagatgcaaaagtagaagtctcccctcgtgacatagtttacatggaaaatgctgagcctataaatggtgaacacccagagattctgcataaacttgaccttcgctatgctggcacctcttggtgtgatgaatctcttgctttagtgtatgaatcttggtttaaaactcggaaaatcagaacatgggtgctctctcctgataaaaaagatgtcagcccacgcgttttattcgaccggtcttcagaagatgtatactctgaccctggctcaccaatgatgcgaagaactgtgatgggaacatatgtcatcgcaaagatcaagaaagaagacggaaatatttatgtcttgttgaatgggatgggtgccacaccagaaggaaatattccattcctcgatttgtttgatataaatactgggagtaaagagcgtatatgggagagcgacagggaaaagtactatgaaactgttgttgcactgatgtcagacaaaactgacggggaactgctccttgatcagttaaagatacttacgtcgaaagaatcaaaaacagaaaacacacaatattacttgcagacttggccagaaaagaatcaagttaagataacaaatttcccccacccatatcctcagcttgcttcattgtataaggaaatgataagataccagcgaaaggatggagttcaacttacagcaaacttatacctgcccccagggtatgattcatcaaaagatggacctttgccatgtctagtttggtcctaccctggtgaatttaaaagcaaagatgctgctggtcaagttcgtggttcccctaatgaatttccagggattggtgctacatctcctcttctttggttagctagagggtttgtgattctgtctggtccgacaatcccaattatcggtgaaggcgatgaagaggccaatgacagatatgtggaacaactagtaacgagtgcagaggctgcagttgaggaagttgtcaaaagaggggtggctcaccctgataaaattgctgtcggtggtcattcatatggtgcattcatgacagctaatctgctggctcacgctcctcatcttttctgctgtggaatcgctcgctctggagcttacaacaggactctaactccatttggttttcagaacgaggatagaacactctgggaggcaacaaacacatatgtcgagatgagccctttcatgtctgcaaacaaaatcaagaaaccaattttacttatccatggagagcaggacaacaattctgggacattgacaatgcagtcagaccgattcttcaatgccttgaaaggtcatggtgcactgtctcgtttggtaatacttccttttgagagccatgggtactctgccagggagagtatcatgcacgtcctctgggagaccgataggtggttgcagaactactgtgtaaatggtactagcaaggttgactcagtgtcagaggctgacagtaaaaacaaaacattgtcagctagtggtggcagtgcagcccgtgaaggtctaaaccctgaggaactctcatcattaccaagatcgcttctgtgatcaacttcagttggtgttcatgaaacattccctggacagcaagcctaaagggaaaaaatagtgtatcgttgcacttctaccttaaccgactaccagggatgccttgattggcctcatatttgtttcgattgctgcaggtgatcatgttactggcatgcaggagccccctacccccccccccccccccacccccaccccacaaatataagaaaggcctagtctctggtggccactgcactcagatatatttgggtcaatttgtattctattggtaatggccaatggaagtcattcttgcgattaatatcatgtacagaaatatagccttttgcagttttgatcccaactcttgcacttggcagcgaactgatacgttggttttctttgacagcaatctaaaataaaataataactaatgagattatcatatgctccaatgtctcgcatcgtcacattttacctgttaccattatttactgcagctgttgtactgacattcgttgcccatttgagaggcgc

SEQ ID NO: 1457 - DNA, 1847 bp, Zea Mays
ttaggaaggatatagactctcttggagttgcttgaagggtggagacacaagatggtggagatgcaaaagtagaagtctcccctcgtgacatagtttacatggaaaatgctgagcctataaatggtgaacacccagagattctgcataaacttgaccttcgctatgctggcacctcttggtgtgatgaatctcttgctttagtgtatgaatcttggtttaaaactcggaaaatcagaacatgggtgctctctcctgataaaaaagatgtcagcccacgcgttttattcgaccggtcttcagaagatgtatactctgaccctggctcaccaatgatgcgaagaactgtgatgggaacatatgtcatcgcaaagatcaagaaagaagacggaaatatttatgtcttgttgaatgggatgggtgccacaccagaaggaaatattccattcctcgatttgtttgatataaatactgggagtaaagagcgtatatgggagagcgacagggaaaagtactatgaaactgttgttgcactgatgtcagacaaaactgacggggaactgctccttgatcagttaaagatacttacgtcgaaagaatcaaaaacagaaaacacacaatattacttgcagacttggccagaaaagaatcaagttaagataacaaatttcccccacccatatcctcagcttgcttcattgtataaggaaatgataagataccagcgaaaggatggagttcaacttacagcaaacttatacctgcccccagggtttgtgattctgtctggtccgacaatcccaattatcggtgaaggcgatgaagaggccaatgacagatatgtggaacaactagtaacgagtgcagaggctgcagttgaggaagttgtcaaaagaggggtggctcaccctgataaaattgctgtcggtggtcattcatatggtgcattcatgacagctaatctgctggctcacgctcctcatcttttctgctgtggaatcgctcgctctggagcttacaacaggactctaactccatttggttttcagaacgaggatagaacactctgggaggcaacaaacacatatgtcgagatgagccctttcatgtctgcaaacaaaatcaagaaaccaattttacttatccatggagagcaggacaacaattctgggacattgacaatgcagtcagaccgattcttcaatgccttgaaaggtcatggtgcactgtctcgtttggtaatacttccttttgagagccatgggtactctgccagggagagtatcatgcacgtcctctgggagaccgataggtggttgcagaactactgtgtaaatggtactagcaaggttgactcagtgtcagaggctgacagtaaaaacaaaacattgtcagctagtggtggcagtgcagcccgtgaaggtctaaaccctgaggaactctcatcattaccaagatcgcttctgtggtgatcatgttactggcatgcaggagccccctacccccccccccccccccacccccaccccacaaatataagaaaggcctagtctctggtggccactgcactcagatatatttgggtcaatttgtattctattggtaatggccaatggaagtcattcttgcgattaatatcatgtacagaaatatagccttttgcagttttgatcccaactcttgcacttggcagcgaactgatacgttggttttctttgacagcaatctaaaataaaataataactaatgagattatcatatgctccaatgtctcgcatcgtcacattttacctgttaccattatttactgcagctgttgtactgacattcgttgcccatttgagaggcgc

SEQ ID NO: 1458 - DNA, 685 bp, Zea Mays
cgaccacaaccctaaccctatccctttcgacggttccacttgcaccctaccccaaccccatccatcgtaacccgccgccgccgcgatagatgccaatcctgccgccgcatccaaccccgcccgacgtggacgccagagaggtgcacgactgccgcaactcgtggcactcagtgtggtggtcgtccaagctcgtcctctagctcagcctcaacgccttcagcttcctcgtgccgtcgccgctcgcctagatctacgatgcaatgggtgggctgaacaagttccatggccagcatgcgctcagggagcgagcgaggaagctcgaccagggcatcctgattataagaatgcatatggtctgcaaatggagaatttgctattgctcaatgaagtggcggcatgctccaaaatcctagtgagacctctgcacctttggtcagatcccaggcctaggatgtccatgttgtgtgtatgtaccaacagctaaaatgtaaacacgacattatcatagttgagtacatgaataattatctattatatcttattgcaaaatttgaaacagttcttctgtagatggttaccttgcatcttacgctacaattagctcagatcacttcttgttgtatcttacaccaatttacgaaatttcttgatgcgttttatgacaacctcgtgcgctgagagatac

SEQ ID NO: 1459 - DNA, 860 bp, Zea Mays
agagtagaggattggtatgtatggatgaaacatatatgccaacaagttcaggaatgttcttcctaatcctttcctattagcttgttgtggttgattacctttcgaagcattaaacatccttaaacaacagtttggcagatggatcctactcccttatgtgtttgcaccttgaattgacgtggttcattgggttgcctttttggctgaaaggcagggtactgttgaatgatgtatcaactttaccgttaatatgtttattggatgagtacttatattggactaataaaagtggctggtaggtagttaaagtaaacagctgcatgtttctattgagtttgcctatttgcataggattatatatttcttttgcaaaaccgttattctagttttcttcatccgctggtttattatacacttgggttgatcttgcaggtttgacatgccttttaacatttggttttgtgatacactgcccatgtatccagaaggcaaactagattctgataatgatggacaagaatgcatatggtctgcaaatggagaatttgctattgctcaatgaagtggcggcatgctccaaaatcctagtgagacctctgcacctttggtcagatcccaggcctaggatgtccatgttgtgtgtatgtaccaacagctaaaatgtaaacacgacattatcatagttgagtacatgaataattatctattatatcttattgcaaaatttgaaacagttcttctgtagatggttaccttgcatcttacgctacaattagctcagatcacttcttgttgtatcttacaccaatttacgaaatttcttgatgcgttttatgacaacctcgtgcgctgagagatac

SEQ ID NO: 1460 - DNA, 923 bp, Zea Mays
gtatggatgaaacatatatgccaacaagttcaggaatgttcttcctaatcctttcctattagcttgttgtggttgattacctttcgaagcattaaacatccttaaacaacagtttggcagatggatcctactcccttatgtgtttgcaccttgaattgacgtggttcattgggttgcctttttggctgaaaggcagggtactgttgaatgatgtatcaactttaccgttaatatgtttattggatgagtacttatattggactaataaaagtggctggtaggtagttaaagtaaacagctgcatgtttctattgagtttgcctatttgcataggattatatatttcttttgcaaaaccgttattctagttttcttcatccgctggtttattatacacttgggttgatcttgcaggtttgacatgccttttaacatttggttttgtgatacactgcccatgtatccagaaggcaaactagattctgataatgatggacaaggtacaccaccacaacaataggatttttttacaccctggttatcttgttttaattcatcctttctgcgctccaattattttgaatgcatatggtctgcaaatggagaatttgctattgctcaatgaagtggcggcatgctccaaaatcctagtgagacctctgcacctttggtcagatcccaggcctaggatgtccatgttgtgtgtatgtaccaacagctaaaatgtaaacacgacattatcatagttgagtacatgaataattatctattatatcttattgcaaaatttgaaacagttcttctgtagatggttaccttgcatcttacgctacaattagctcagatcacttcttgttgtatcttacaccaatttacgaaatttcttgatgcgttttatgacaacctcgtgcgctgagagatac

SEQ ID NO: 1461 - DNA, 255 bp, Zea Mays
cttcatcctgcaagcgacgcacgccaccaacacctcccctgtggcgatcagagccgcgcgctagatccaacaccctccccgaaatcgcggcggattccggcgccagcggccctgctccagatctgcattccgcgcaggggcttctcctgaccacctcgcgccctcgtctctccaagtttactcagagcatctgttgcaacctctaatggagacaattactgcattatttctgcaaagcagttgtttgggaactac

SEQ ID NO: 1462 - DNA, 1391 bp, Zea Mays
gttcggctgtgggccagtggctgtcgccactcgctacctcacgcgcttccgctacctctcgttgtgtctcgtcctctctctcttctattccattcccaacttggctgcccaacccttgcgtcggtagacggcggccgcggcgaggatagagggttccctgaggaggcagtgatggagaccatggctaagtacaaccgaagcaacccggcagtgaagcggatcctgcaggaggttaaggagatgcagtccaacccctcacccgacttcatggccctccccctcgaggaagacatcttcgagtggcaatttgctatccttggcccgagagacagcgagtttgagggtggaatctatcatggcaggatccagcttccctcggattatccattcaagccgccgtccttcatgctactcacgtggacgctttgagattcagaagaagatttgtttgagcatatccaattatcaccctgagcactggcagccatcatggagtgtgcgcacagcgttggtggccttgattgcattcatgccaaccaaccctggtggggcattgggctcattggattacaaaaaggaagatagacgggcacttggtataaaatcacgtgaagcaccgccaaaatttgggtccccagaacgacaaaaactaattgatgagatccatgagcaaatgctcagtaaggctcctcctgtcccccaaacgctaccaaatgtgccaaacgaggagtctaacgaattacccgcatctgacccttctggcgagcatgcagacaaggtagatgaaggtgacaacacatctggttctgtatcagactcgtctagtggccttcctgtgcctgaatctgaatcgggggttacagaaaacactggtgaaacctcagcagttgaggttgccaaccatcatgtgcctgaagcaagccacagagagaacattccaagagttagttcgtctcaccagaatcctgctgttgcgatccagaagccaaatcatgacaggctgttgaccttggccgcatttgggctgactcttgctattatggcacttgtgatcaagaaattcttaaaaatcaatggcttgggcggtttcattgagggcaagttctgagtagggattgtgcataagttggatgtaagagatgactcattcctcatactaatatgctataagctatataaccccgtaagatttgtaaatgactgtttagttattatagatgaaatcaaaatggtgcggtactattaataccccattgtatctagtacacctgatggaaagtgccgagttttgaggcttctgatctgatgtatatgtttgctacaacgtgcacttcgtttgtctgccattatgaccagaattctcaatccttaatctccttctagagagtttt

SEQ ID NO: 1463 - DNA, 1311 bp, Zea Mays
gttcggctgtgggccagtggctgtcgccactcgctacctcacgcgcttccgctacctctcgttgtgtctcgtcctctctctcttctattccattcccaacttggctgcccaacccttgcgtcggtagacggcggccgcggcgaggatagagggttccctgaggaggcagtgatggagaccatggctaagtacaaccgaagcaacccggcagtgaagcggatcctgcaggaggttaaggagatgcagtccaacccctcacccgacttcatggccctccccctcgaggaagacatcttcgagtggcaatttgctatccttggcccgagagacagcgagtttgagggtggaatctatcatggcaggatccagcttccctcggattatccattcaagccgccgtccttcatgctactcacgccaagtggacgctttgagattcagaagaagatttgtttgagcatatccaattatcaccctgagcactggcagccatcatggagtgtgcgcacagcgttggtggccttgattgcattcatgccaaccaaccctggtggggcattgggctcattggattacaaaaaggaagatagacgggcacttggtataaaatcacgtgaagcaccgccaaaatttgggtccccagaacgacaaaaactaattgatgagatccatgagcaaatgctcagtaaggctcctcctgtcccccaaacgctaccaaatgtgccaaacgaggagtctaacgaattacccgcatctgacccttctggcgagcatgcagacaagaaaacactggtgaaacctcagcagttgaggttgccaaccatcatgtgcctgaagcaagccacagagagaacattccaagagttagttcgtctcaccagaatcctgctgttgcgatccagaagccaaatcatgacaggctgttgaccttggccgcatttgggctgactcttgctattatggcacttgtgatcaagaaattcttaaaaatcaatggcttgggcggtttcattgagggcaagttctgagtagggattgtgcataagttggatgtaagagatgactcattcctcatactaatatgctataagctatataaccccgtaagatttgtaaatgactgtttagttattatagatgaaatcaaaatggtgcggtactattaataccccattgtatctagtacacctgatggaaagtgccgagttttgaggcttctgatctgatgtatatgtttgctacaacgtgcacttcgtttgtctgccattatgaccagaattctcaatccttaatctccttctagagagtttt

SEQ ID NO: 1464 - DNA, 1043 bp, Zea Mays
tagcagtaggaacttgctgctgtagtagttgaggatcaagtggggaagacatcttcgagtggcaatttgctatccttggcccgagagacagcgagtttgagggtggaatctatcatggcaggatccagcttccctcggattatccattcaagccgccgtccttcatgctactcacgccaagtggacgctttgagattcagaagaagatttgtttgagcatatccaattatcaccctgagcactggcagccatcatggagtgtgcgcacagcgttggtggccttgattgcattcatgccaaccaaccctggtggggcattgggctcattggattacaaaaaggaagatagacgggcacttggtataaaatcacgtgaagcaccgccaaaatttgggtccccagaacgacaaaaactaattgatgagacaaggtagatgaaggtgacaacacatctggttctgtatcagactcgtctagtggccttcctgtgcctgaatctgaatcgggggttacagaaaacactggtgaaacctcagcagttgaggttgccaaccatcatgtgcctgaagcaagccacagagagaacattccaagagttagttcgtctcaccagaatcctgctgttgcgatccagaagccaaatcatgacaggctgttgaccttggccgcatttgggctgactcttgctattatggcacttgtgatcaagaaattcttaaaaatcaatggcttgggcggtttcattgagggcaagttctgagtagggattgtgcataagttggatgtaagagatgactcattcctcatactaatatgctataagctatataaccccgtaagatttgtaaatgactgtttagttattatagatgaaatcaaaatggtgcggtactattaataccccattgtatctagtacacctgatggaaagtgccgagttttgaggcttctgatctgatgtatatgtttgctacaacgtgcacttcgtttgtctgccattatgaccagaattctcaatccttaatctccttctagagagtttt

SEQ ID NO: 1465 - DNA, 2651 bp, Zea Mays
gccacaccatgacgaccaacgacccacggggcctcgggcacatttggtccaaggcaaggcctacattcatccagcacagcctacacggcccagtctctccggagaccggagcgacgagtccgcgagaccgccaccgccacccagcaagccgagcggcgccaattctgcgctgccatcgtcttcctccgtcacacccggctcgcaaaccctagctcgccccggccccacctccggccccgttcgtcggtgctatgtcgaagcggccgaagctcgagggtttcagcatcccgcggcccacctcctacaacttcgagcgctcgcagtccgtgcagcggctctaccgtccgaccgatgacccagacctcgacgacatcgccttctccgacgacgccccctcagatgcccaagccagcaccgcggtagaaggaaaggccgagaatgaggaggagatggacccgctcgacgccttcatggccgagatccaggaggagatccgtgcgccgcccccgccgcccaagcccgaggcgcttcgccgcacggattccgacgatgacgaggatgaccccgtcgagagcttcctgcgggccaagaaggacgctggcctcacgctggccgccgacgtcatgcgcgctggttacgactccgatgaggaggtctacgccgctgccaaggccgtcgacgccggcatgatggaatacgactctgatgacaaccccatagtcatcgacaagaagaaaatagagcccataccagcactcgatcactcgaccattgagtatgacgccttcacaaaagatttctacgaggagaagccatcgatttcaggtatgagtgaccaagaggtaacagattatatgaaaagtttgtcaattcgtgtttctggttttgatgtgccgaggccaataaaaaactttgaggattgtgggtttcatgtacctctaatgaatgctattgccaaacaagcttatgaaaaaccaactacaattcagtgccaggctttacctattgtactttcagggagagatatcattggtattgcaaaaactggctctggtaaaactgcagcttttgtgctccctatgattgttcatattatggatcagcctgagcttgagaaagaagaaggtccaataggagtcatttgtgctccaacaagagaattggcacatcagatatatctcgaagctaagaagtttgcaaagccttacaaccttcgagttgctgctatatatggtggtgtttccaaatttgaccagtttaaagaactgaaagcaggttgtgaaatagtcattgcaactccagggagattaatagacttgctgaagatgaaggcattgaagatgttcagggcaacttatctggttcttgatgaagctgatcgaatgttcgatcttggatttgagccacaaatacgatccattgttggtcaaattagaccagatcgacaaactttacttttttctgcaacaatgccatacaaagtagagcgtttggcaagagaaatattaactgatcctattagagttacagttggtcaagttggcggtgctaatgaagacattaaacaagttgttaatgtactcccttctgatgttgagaaaatgccttggcttttggggaaattgcctggaatgattgatgatggagatgttcttgtatttgcatctaaaaaggctagagtggacgagatagagaaagagttgaatcagagaggattcagaattgctgcgcttcatggcgacaaggatcaagcttctcgtatggagaccctgcagaagttcaaatctgggacatttcatgttctggttgcaactgatgttgctgcacgaggtcttgacatcaaatcgattaaaacagttgtcaactttgatattgcaaaagagatggatatgcatattcaccgaattggaagaactggtcgtgctggcgataaagatggcactgcatatactctgattacacagaaggaggcacattttgctggtgaactggttcacagtttgattgctgctggccaggatgtacccaatgaactcatggatctggctatgaaggatggaagattcagagcaaaacgagactccaggaaaggtgggaagaaaggtggcaaaggaaaaggtggtgttggcggtgctgggcgcgggcgcggtgtgcgtggagttgattttggcctcggcataggttacaatgccgaatctggttcacaagtgcctgctgcaagatctgctgctgtaaattctctgaagacagggatgttgcaacgatttaagagcagctttgtctctggatcttcaaatacaccaagcagcagtgcaccttcctttgtaagaccagcactccgtggctttgtgtctggcggcaccattggaggagacacacggcctgcacaggcagcccccactttcatccctgcatcccggcctgcacagcctgcccccgcggtccctgcatcccagcctgcaggaaataacaacgaaaatgggaacccgaatccagaaagttcacgggatcagttcagggagagaaaacgaccatcaggttgggatcgctagtccctgctaactgaggctaatgtcaggacatttcagggtagtggagtgggcgatggtatactttgagttgcagtgcagtaattttgtttgggcccaaac

SEQ ID NO: 1466 - DNA, 2826 bp, Zea Mays
tttttatcatcaaccatttgatctgctactgacgactaccaagcaccatacaccgaccgccgcctccagttcagtgtgtcgcaagcctcagctggccgggagggcgcgcgcaacgcacgtggcagctactagtatcttctaataaacagaaaaaggtgactcctccacctatcctctctccccaattccacattgcaacattagggtcctaggcttccagcacagggcgtcggttcgagctccaatatcctcgcgtcgctccggtggcgttctagcagacggaccatctccggcgtccggcggcctcggccatctcctgagccctctgacggctagaaataaagggcgcgctcgtcttcgccgcctcttcatctccggtgtctggcaggcttggccatctccgacgtccgcttcgagctcgaagcttgcgtcgcttcggtgctggtggatcgacgcggcgaggggatctatccgggggtttggatcgggttcttctccatctccatgttcatctgcttgataatgactgaatgatatccaataattttgcatgttacgattattaactcgtacttcagtttggtcgcgatgttgatatccctactgattatgataatatgatcatacctattattataaacttctctacactctctttgtcagtaggaacaaatgagttctgagtcatcttctaatacatctaggtcatcaacttcaaaaacctctgggtccataagtagctcatcttccactagcttgcattcagaggacattgtggaaaaaggttcttgtacttctgccaggcatagaacgaaacgaggtcacgccaaatgcaagaagctagaaaaaggaggtccccgtcgtcttacgtttgataaaaatgggattgcccagtcaccggtaaaacatgtcaatgaattctcaagctattatggttatatagcacacatgcgtgttgatattaggataaaggattggcgaaaagtgcctaaagtggtaaaagcaaacctatgggaggatgtgtcaaagaaatttgtcatgccaagggaggaaacccataccctcaatgtgaagaaggtcgctttgaaatctatgagccatgcatggaaggatttcaagtggaaactaaatataaattatgtcaagaaggacaaaactccatttgaggactatccagaactcaagaaagagtggtggccaaactttgtggagtgggttacctctgatgactatattgctcttggagaaaagggcaagaaaagccaaagcatgaatccgtcaaaaactaggtcgccaaagctatactgtacaaaagagaaaatgggcaaaggaagatgcacaagcattaactgagggtaaatctattccatttcaagacatgccagatggccatcataaggattgggcaagtgcgaggaatccttctggcgacgtgaagataacagagtcgcatccaatcataaagaaaattgtagatctaaatgaaaagtcagtagctggtacctttacaccattggataatatggacatacttgcaacaacaatagggagtaatcatccaggaaggacaacaggggaggcgatgaaatgcaagttggtggcgcagataggtctgcattctgttgtggtcgctagagggcaggcttaccctccaaaggatgttgtaactgtccatgggattgagcggcgagatgaccacacaaaatgcaggaaacaacagttcatgcaaagcctcaacaagtcccacacacatcgcctcagatgcatgaagaagatagacaaatacagaggcatagttggctttttagatccagagatggtcattttaaagagaatcaatgaagaggctgatgaagtcaaagcatacattgtgaaagcattgcttgctcagcaggacaaagagtgcatatttgttgtttgccaggaagggtaaggcctagcactaataacactctatagttttttaatctgtatcttaatgttctatcttcctcatttcagttaccattggccttgttagttatttttctaaaatggaatacagtgtacaatattgactccaaaggttaccaatcccctagctgctatagtattaagaagctattcgatgagtgggtattacctttatcataattctattttcctctatatttcaattgttacttacaccgttagtcaccattattgtagggcttttggtgcttatgtcgacaaaaaaggtcgccataacaagaattttggtcgcacagttatatggaaacattttcaggtaatcatgtccttaacctgaaattattagcaagatatataattagacattcccgctggatatttttccttatgaatcacatcttttaggcacacatacaaccacctggcagtatgctttgcggacaatatgatgtaccacatgttatcctttgcggataatcttagtttggaccgtgatcgatatccccaggttgtttttatagtctgaattctattttactcaaacctatgcaatatgacgttataaatatttacatggtttatctttttcaagggccgtgttggttttgtaacctgtccattattgcctgatgagatagcaaatgcccgagaacggttgcccgacttcttcatgaatgaggtcatagacattggtggatcatgcagggttgagggtgcttcatataactaaatctagcatggcttcctaggtaagatgttacattcatataacctttgacatcatatgccacactgtgaggtgttcatctgtgtctaactaataattattgtgttctcctatttgttgtacaggaaaagatggaatggccgcac

SEQ ID NO: 1467 - DNA, 3031 bp, Zea Mays
caacattagggtcctaggcttccagcacagggcgtcggttcgagctccaatatcctcgcgtcgctccggtggcgttctagcagacggaccatctccggcgtccggcggcctcggccatctcctgagccctctgacggctagaaataaagggcgcgctcgtcttcgccgcctcttcatctccggtgtctggcaggcttggccatctccgacgtccgcttcgagctcgaagcttgcgtcgcttcggtgctggtggatcgacgcggcgaggggatctatccgggggtttggatcgggttcttctccatctccatgttcatctggtaaggaatcgaatccagatctttcctgctatagtcctacaatttgttgtgtgtttctttactgcgtggatacaaacatagtaaattattgcagaggaattaaaatttgggttcaactggagcccacggcttgattttctattggttacatattgttcttacatataggatagacatgctctatgggggtactgttgttgtgctagtttggtatattgtcaaaattctgaaagaatcagtttgttatattgtcaaaattctgaatgcattaccatttataagaaatactcaattacgttttgtacttcctctcttgactcatttgtgcacagcatatatataggcactttgtattatataattgctcattattaactgtttgattccttcacctttgcagcttgataatgactgaatgatatccaataattttgcatgttacgattattaactcgtacttcagtttggtcgcgatgttgatatccctactgattatgataatatgatcatacctattattataaacttctctacactctctttgtcagtaggaacaaatgagttctgagtcatcttctaatacatctaggtcatcaacttcaaaaacctctgggtccataagtagctcatcttccactagcttgcattcagaggacattgtggaaaaaggttcttgtacttctgccaggcatagaacgaaacgaggtcacgccaaatgcaagaagctagaaaaaggaggtccccgtcgtcttacgtttgataaaaatgggattgcccagtcaccggtaaaacatgtcaatgaattctcaagctattatggttatatagcacacatgcgtgttgatattaggataaaggattggcgaaaagtgcctaaagtggtaaaagcaaacctatgggaggatgtgtcaaagaaatttgtcatgccaagggaggaaacccataccctcaatgtgaagaaggtcgctttgaaatctatgagccatgcatggaaggatttcaagtggaaactaaatataaattatgtcaagaaggacaaaactccatttgaggactatccagaactcaagaaagagtggtggccaaactttgtggagtgggttacctctgatgactatattgctcttggagaaaagggcaagaaaagccaaagcatgaatccgtcaaaaactaggtcgccaaagctatactgtacaaaagagaaaatgggcaaaggaagatgcacaagcattaactgagggtaaatctattccatttcaagacatgccagatggccatcataaggattgggcaagtgcgaggaatccttctggcgacgtgaagataacagagtcgcatccaatcataaagaaaattgtagatctaaatgaaaagtcagtagctggtacctttacaccattggataatatggacatacttgcaacaacaatagggagtaatcatccaggaaggacaacaggggaggcgatgaaatgcaagttggtggcgcagataggtctgcattctgttgtggtcgctagagggcaggcttaccctccaaaggatgttgtaactgtccatgggattgagcggcgagatgaccacacaaaatgcaggaaacaacagttcatgcaaagcctcaacaagtcccacacacatcgcctcagatgcatgaagaagatagacaaatacagaggcatagttggctttttagatccagagatggtcattttaaagagaatcaatgaagaggctgatgaagtcaaagcatacattgtgaaagcattgcttgctcagcaggacaaagagtgcatatttgttgtttgccaggaagggtaaggcctagcactaataacactctatagttttttaatctgtatcttaatgttctatcttcctcatttcagttaccattggccttgttagttatttttctaaaatggaatacagtgtacaatattgactccaaaggttaccaatcccctagctgctatagtattaagaagctattcgatgagtgggtattacctttatcataattctattttcctctatatttcaattgttacttacaccgttagtcaccattattgtagggcttttggtgcttatgtcgacaaaaaaggtcgccataacaagaattttggtcgcacagttatatggaaacattttcaggtaatcatgtccttaacctgaaattattagcaagatatataattagacattcccgctggatatttttccttatgaatcacatcttttaggcacacatacaaccacctggcagtatgctttgcggacaatatgatgtaccacatgttatcctttgcggataatcttagtttggaccgtgatcgatatccccaggttgtttttatagtctgaattctattttactcaaacctatgcaatatgacgttataaatatttacatggtttatctttttcaagggccgtgttggttttgtaacctgtccattattgcctgatgagatagcaaatgcccgagaacggttgcccgacttcttcatgaatgaggtcatagacattggtggatcatgcagggttgagggtgcttcatataactaaatctagcatggcttcctaggtaagatgttacattcatataacctttgacatcatatgccacactgtgaggtgttcatctgtgtctaactaataattattgtgttctcctatttgttgtacaggaaaagatggaatggccgcac

SEQ ID NO: 1468 - DNA, 2480 bp, Zea Mays
caacattagggtcctaggcttccagcacagggcgtcggttcgagctccaatatcctcgcgtcgctccggtggcgttctagcagacggaccatctccggcgtccggcggcctcggccatctcctgagccctctgacggctagaaataaagggcgcgctcgtcttcgccgcctcttcatctccggtgtctggcaggcttggccatctccgacgtccgcttcgagctcgaagcttgcgtcgcttcggtgctggtggatcgacgcggcgaggggatctatccgggggtttggatcgggttcttctccatctccatgttcatctggaacaaatgagttctgagtcatcttctaatacatctaggtcatcaacttcaaaaacctctgggtccataagtagctcatcttccactagcttgcattcagaggacattgtggaaaaaggttcttgtacttctgccaggcatagaacgaaacgaggtcacgccaaatgcaagaagctagaaaaaggaggtccccgtcgtcttacgtttgataaaaatgggattgcccagtcaccggtaaaacatgtcaatgaattctcaagctattatggttatatagcacacatgcgtgttgatattaggataaaggattggcgaaaagtgcctaaagtggtaaaagcaaacctatgggaggatgtgtcaaagaaatttgtcatgccaagggaggaaacccataccctcaatgtgaagaaggtcgctttgaaatctatgagccatgcatggaaggatttcaagtggaaactaaatataaattatgtcaagaaggacaaaactccatttgaggactatccagaactcaagaaagagtggtggccaaactttgtggagtgggttacctctgatgactatattgctcttggagaaaagggcaagaaaagccaaagcatgaatccgtcaaaaactaggtcgccaaagctatactgtacaaaagagaaaatgggcaaaggaagatgcacaagcattaactgagggtaaatctattccatttcaagacatgccagatggccatcataaggattgggcaagtgcgaggaatccttctggcgacgtgaagataacagagtcgcatccaatcataaagaaaattgtagatctaaatgaaaagtcagtagctggtacctttacaccattggataatatggacatacttgcaacaacaatagggagtaatcatccaggaaggacaacaggggaggcgatgaaatgcaagttggtggcgcagataggtctgcattctgttgtggtcgctagagggcaggcttaccctccaaaggatgttgtaactgtccatgggattgagcggcgagatgaccacacaaaatgcaggaaacaacagttcatgcaaagcctcaacaagtcccacacacatcgcctcagatgcatgaagaagatagacaaatacagaggcatagttggctttttagatccagagatggtcattttaaagagaatcaatgaagaggctgatgaagtcaaagcatacattgtgaaagcattgcttgctcagcaggacaaagagtgcatatttgttgtttgccaggaagggtaaggcctagcactaataacactctatagttttttaatctgtatcttaatgttctatcttcctcatttcagttaccattggccttgttagttatttttctaaaatggaatacagtgtacaatattgactccaaaggttaccaatcccctagctgctatagtattaagaagctattcgatgagtgggtattacctttatcataattctattttcctctatatttcaattgttacttacaccgttagtcaccattattgtagggcttttggtgcttatgtcgacaaaaaaggtcgccataacaagaattttggtcgcacagttatatggaaacattttcaggtaatcatgtccttaacctgaaattattagcaagatatataattagacattcccgctggatatttttccttatgaatcacatcttttaggcacacatacaaccacctggcagtatgctttgcggacaatatgatgtaccacatgttatcctttgcggataatcttagtttggaccgtgatcgatatccccaggttgtttttatagtctgaattctattttactcaaacctatgcaatatgacgttataaatatttacatggtttatctttttcaagggccgtgttggttttgtaacctgtccattattgcctgatgagatagcaaatgcccgagaacggttgcccgacttcttcatgaatgaggtcatagacattggtggatcatgcagggttgagggtgcttcatataactaaatctagcatggcttcctaggtaagatgttacattcatataacctttgacatcatatgccacactgtgaggtgttcatctgtgtctaactaataattattgtgttctcctatttgttgtacaggaaaagatggaatggccgcac

SEQ ID NO: 1469 - DNA, 2593 bp, Zea Mays
caacattagggtcctaggcttccagcacagggcgtcggttcgagctccaatatcctcgcgtcgctccggtggcgttctagcagacggaccatctccggcgtccggcggcctcggccatctcctgagccctctgacggctagaaataaagggcgcgctcgtcttcgccgcctcttcatctccggtgtctggcaggcttggccatctccgacgtccgcttcgagctcgaagcttgcgtcgcttcggtgctggtggatcgacgcggcgaggggatctatccgggggtttggatcgggttcttctccatctccatgttcatctggtcatcaacttcaaaaacctctgggtccataagtagctcatcttccactagcttgcattcagaggacattgtggaaaaaggttcttgtacttctgccaggcatagaacgaaacgaggtcacgccaaatgcaagaagctagaaaaaggaggtccccgtcgtcttacgtttgataaaaatgggattgcccagtcaccggtaaaacatgtcaatgaattctcaagctattatggttatatagcacacatgcgtgttgatattaggataaaggattggcgaaaagtgcctaaagtggtaaaagcaaacctatgggaggatgtgtcaaagaaatttgtcatgccaagggaggaaacccataccctcaatgtgaagaaggtcgctttgaaatctatgagccatgcatggaaggatttcaagtggaaactaaatataaattatgtcaagaaggacaaaactccatttgaggactatccagaactcaagaaagagtggtggccaaactttgtggagtgggttacctctgatgactatattgctcttggagaaaagggcaagaaaagccaaagcatgaatccgtcaaaaactaggtcgccaaagctatactacatgccagatggccatcataaggattgggcaagtgcgaggaatccttctggcgacgtgaagataacagagtcgcatccaatcataaagaaaattgtagatctaaatgaaaagtcagtagctggtacctttacaccattggataatatggacatacttgcaacaacaatagggagtaatcatccaggaaggacaacaggggaggcgatgaaatgcaagttggtggcgcagataggtctgcattctgttgtggtcgctagagggcaggcttaccctccaaaggatgttgtaactgtccatgggattgagcggcgagatgaccacacaaaatgcaggttgattttgtgtttgaaaacttcttggattttccgctccctaaaccaatcgctggtggtgatatgttcactcttggggaagccaaaaattcatttgtgttatggcctaagtcaggcatacaactagcagaggtacactttgctaacttcaacctgatgaactttttatatttattcgcaacttggttaatgtcatgtacttgtttctgaattttacataggaaacaacagttcatgcaaagcctcaacaagtcccacacacatcgcctcagatgcatgaagaagatagacaaatacagaggcatagttggctttttagatccagagatggtcattttaaagagaatcaatgaagaggctgatgaagtcaaagcatacattgtgaaagcattgcttgctcagcaggacaaagagtgcatatttgttgtttgccaggaagggtaaggcctagcactaataacactctatagttttttaatctgtatcttaatgttctatcttcctcatttcagttaccattggccttgttagttatttttctaaaatggaatacagtgtacaatattgactccaaaggttaccaatcccctagctgctatagtattaagaagctattcgatgagtgggtattacctttatcataattctattttcctctatatttcaattgttacttacaccgttagtcaccattattgtagggcttttggtgcttatgtcgacaaaaaaggtcgccataacaagaattttggtcgcacagttatatggaaacattttcaggtaatcatgtccttaacctgaaattattagcaagatatataattagacattcccgctggatatttttccttatgaatcacatcttttaggcacacatacaaccacctggcagtatgctttgcggacaatatgatgtaccacatgttatcctttgcggataatcttagtttggaccgtgatcgatatccccaggttgtttttatagtctgaattctattttactcaaacctatgcaatatgacgttataaatatttacatggtttatctttttcaagggccgtgttggttttgtaacctgtccattattgcctgatgagatagcaaatgcccgagaacggttgcccgacttcttcatgaatgaggtcatagacattggtggatcatgcagggttgagggtgcttcatataactaaatctagcatggcttcctaggtaagatgttacattcatataacctttgacatcatatgccacactgtgaggtgttcatctgtgtctaactaataattattgtgttctcctatttgttgtacaggaaaagatggaatggccgcac

SEQ ID NO: 1470 - DNA, 2426 bp, Zea Mays
cctaggcttccagcacagggcgtcggttcgagctccaatatcctcgcgtcgctccggtggcgttctagcagacggaccatctccggcgtccggcggcctcggccatctcctgagccctctgacggctagaaataaagggcgcgctcgtcttcgccgcctcttcatctccggtgtctggcaggcttggccatctccgacgtccgcttcgagctcgaagcttgcgtcgcttcggtgctggtggatcgacgcggcgaggggatctatccgggggtttggatcgggttcttctccatctccatgttcatctggtcatcaacttcaaaaacctctgggtccataagtagctcatcttccactagcttgcattcagaggacattgtggaaaaaggttcttgtacttctgccaggcatagaacgaaacgaggtcacgccaaatgcaagaagctagaaaaaggaggtccccgtcgtcttacgtttgataaaaatgggattgcccagtcaccggtaaaacatgtcaatgaattctcaagctattatggttatatagcacacatgcgtgttgatattaggataaaggattggcgaaaagtgcctaaagtggtaaaagcaaacctatgggaggatgtgtcaaagaaatttgtcatgccaagggaggaaacccataccctcaatgtgaagaaggtcgctttgaaatctatgagccatgcatggaaggatttcaagtggaaactaaatataaattatgtcaagaaggacaaaactccatttgaggactatccagaactcaagaaagagtggtggccaaactttgtggagtgggttacctctgatgactatattgctcttggagaaaagggcaagaaaagccaaagcatgaatccgtcaaaaactaggtcgccaaagctatactgtacaaaagagaaaatgggcaaaggaagatgcacaagcattaactgagggtaaatctattccatttcaagacatgccagatggccatcataaggattgggcaagtgcgaggaatccttctggcgacgtgaagataacagagtcgcatccaatcataaagaaaattatctaaatgaaaagtcagtagctggtacctttacaccattggataatatggacatacttgcaacaacaatagggagtaatcatccaggaaggacaacaggggaggcgatgaaatgcaagttggtggcgcagataggtctgcattctgttgtggtcgctagagggcaggcttaccctccaaaggatgttgtaactgtccatgggattgagcggcgagatgaccacacaaaatgcaggaaacaacagttcatgcaaagcctcaacaagtcccacacacatcgcctcagatgcatgaagaagatagacaaatacagaggcatagttggctttttagatccagagatggtcattttaaagagaatcaatgaagaggctgatgaagtcaaagcatacattgtgaaagcattgcttgctcagcaggacaaagagtgcatatttgttgtttgccaggaagggtaaggcctagcactaataacactctatagttttttaatctgtatcttaatgttctatcttcctcatttcagttaccattggccttgttagttatttttctaaaatggaatacagtgtacaatattgactccaaaggttaccaatcccctagctgctatagtattaagaagctattcgatgagtgggtattacctttatcataattctattttcctctatatttcaattgttacttacaccgttagtcaccattattgtagggcttttggtgcttatgtcgacaaaaaaggtcgccataacaagaattttggtcgcacagttatatggaaacattttcaggtaatcatgtccttaacctgaaattattagcaagatatataattagacattcccgctggatatttttccttatgaatcacatcttttaggcacacatacaaccacctggcagtatgctttgcggacaatatgatgtaccacatgttatcctttgcggataatcttagtttggaccgtgatcgatatccccaggttgtttttatagtctgaattctattttactcaaacctatgcaatatgacgttataaatatttacatggtttatctttttcaagggccgtgttggttttgtaacctgtccattattgcctgatgagatagcaaatgcccgagaacggttgcccgacttcttcatgaatgaggtcatagacattggtggatcatgcagggttgagggtgcttcatataactaaatctagcatggcttcctaggtaagatgttacattcatataacctttgacatcatatgccacactgtgaggtgttcatctgtgtctaactaataattattgtgttctcctatttgttgtacaggaaaagatggaatggccgcac

SEQ ID NO: 1471 - DNA, 2692 bp, Zea Mays
cctaggcttccagcacagggcgtcggttcgagctccaatatcctcgcgtcgctccggtggcgttctagcagacggaccatctccggcgtccggcggcctcggccatctcctgagccctctgacggctagaaataaagggcgcgctcgtcttcgccgcctcttcatctccggtgtctggcaggcttggccatctccgacgtccgcttcgagctcgaagcttgcgtcgcttcggtgctggtggatcgacgcggcgaggggatctatccgggggtttggatcgggttcttctccatctccatgttcatctgtaggaacaaatgagttctgagtcatcttctaatacatctaggtcatcaacttcaaaaacctctgggtccataagtagctcatcttccactagcttgcattcagaggacattgtggaaaaaggttcttgtacttctgccaggcatagaacgaaacgaggtcacgccaaatgcaagaagctagaaaaaggaggtccccgtcgtcttacgtttgataaaaatgggattgcccagtcaccggtaaaacatgtcaatgaattctcaagctattatggttatatagcacacatgcgtgttgatattaggataaaggattggcgaaaagtgcctaaagtggtaaaagcaaacctatgggaggatgtgtcaaagaaatttgtcatgccaagggaggaaacccataccctcaatgtgaagaaggtcgctttgaaatctatgagccatgcatggaaggatttcaagtggaaactaaatataaattatgtcaagaaggacaaaactccatttgaggactatccagaactcaagaaagagtggtggccaaactttgtggagtgggttacctctgatgactatattgctcttggagaaaagggcaagaaaagccaaagcatgaatccgtcaaaaactaggtcgccaaagctatactgtacaaaagagaaaatgggcaaaggaagatgcacaagcattaactgagggtaaatctattccatttcaagacatgccagatggccatcataaggattgggcaagtgcgaggaatccttctggcgacgtgaagataacagagtcgcatccaatcataaagaaaattgtagatctaaatgaaaagtcagtagctggtacctttacaccattggataatatggacatacttgcaacaacaatagggagtaatcatccaggaaggacaacaggggaggcgatgaaatgcaagttggtggcgcagataggtctgcattctgttgtggtcgctagagggcaggcttaccctccaaaggatgttgtaactgtccatgggattgagcggcgagatgaccacacaaaatgcaggttgattttgtgtttgaaaacttcttggattttccgctccctaaaccaatcgctggtggtgatatgttcactcttggggaagccaaaaattcatttgtgttatggcctaagtcaggcatacaactagcagaggtacactttgctaacttcaacctgatgaactttttatatttattcgcaacttggttaatgtcatgtacttgtttctgaattttacataggaaacaacagttcatgcaaagcctcaacaagtcccacacacatcgcctcagatgcatgaagaagatagacaaatacagaggcatagttggctttttagatccagagatggtcattttaaagagaatcaatgaagaggctgatgaagtcaaagcatacattgtgaaagcattgcttgctcagcaggacaaagagtgcatatttgttgtttgccaggaagggtaaggcctagcactaataacactctatagttttttaatctgtatcttaatgttctatcttcctcatttcagttaccattggccttgttagttatttttctaaaatggaatacagtgtacaatattgactccaaaggttaccaatcccctagctgctatagtattaagaagctattcgatgagtgggtattacctttatcataattctattttcctctatatttcaattgttacttacaccgttagtcaccattattgtagggcttttggtgcttatgtcgacaaaaaaggtcgccataacaagaattttggtcgcacagttatatggaaacattttcaggtaatcatgtccttaacctgaaattattagcaagatatataattagacattcccgctggatatttttccttatgaatcacatcttttaggcacacatacaaccacctggcagtatgctttgcggacaatatgatgtaccacatgttatcctttgcggataatcttagtttggaccgtgatcgatatccccaggttgtttttatagtctgaattctattttactcaaacctatgcaatatgacgttataaatatttacatggtttatctttttcaagggccgtgttggttttgtaacctgtccattattgcctgatgagatagcaaatgcccgagaacggttgcccgacttcttcatgaatgaggtcatagacattggtggatcatgcagggttgagggtgcttcatataactaaatctagcatggcttcctaggtaagatgttacattcatataacctttgacatcatatgccacactgtgaggtgttcatctgtgtctaactaataattattgtgttctcctatttgttgtacaggaaaagatggaatggccgcac

SEQ ID NO: 1472 - DNA, 4653 bp, Zea Mays
gtttggagttcgtcgtcgtccccagcgtgactgcgcgagtgctatccattccaaacctgaaaccactgcggcccaacccggcaaccccgatccccacttccccagtaccatccctatcccagccacgccatcgtcatcgccttgcgcgcaatatccttggctccacgccccagtaagcgaccagtgacagtgagagcggtgaagcaaaccaaagcaaagctatcggaagaacctcagtcgagggggcgagcgagccgacgagacgactgacgagcgcacaagaccggacggggccgcctaatccagagagagccccaggtctcccccaaccccgccatggcgtcgggcagccgcgccacgcccacgcgctccccctcctccgcgcggcccgaggcgccgcgtcacgcgcaccaccaccaccactcccagtcgtcgggcgggagcacgtcccgcgcgggcgggggagccgcggccacggagtcggtctccaaggccgtcgcccagtacaccctagacgcgcgcctacacgcggtgttcgagcaatcgggcgcgtcgggccgcagcttcgactactcccaatcgctgcgcgcgccgcccacgccgtcctccgagcagcagatcgccgcctacctctcccgcatccagcgcggcggccacatccagcccttcggctgcacgctcgccgtcgccgacgactcctccttccgcctcctcgccttctccgagaactcccccgacctgctcgacctgtcgcctcaccactccgttccctcgctggactcctctgcgccgccccacgtttccctgggtgccgacgcgcgcctcctcttctccccctcgtccgcggtcctcctagagcgcgccttcgccgcgcgcgagatctcgctgctcaacccgatatggatccactccagggtctcctccaagccgttctacgccatcctccaccgcatcgacgtcggcgtcgtcatcgacctcgagcccgcccgcaccgaggaccccgctctctccatcgccggtgcagtccagtcccagaaactggcggtccgcgccatctcccgcctccaggcgctacccggcggggacgtcaagcttctctgcgacacagtcgtggagcatgttcgcgagctcacgggttatgaccgtgtcatggtgtacaggttccatgaagacgagcacggggaagttgtcgccgagagccggcgcgacaaccttgagccttacctcggattgcattatcccgccacagatatcccccaggcgtcgcgcttcctgttccggcagaaccgcgtgcgaatgattgccgattgccatgccaccccggtgagagttattcaagatcctgggctgtcgcagcctctgtgtttggtaggctccacgctacgcgctccacacgggtgtcatgcacagtacatggcgaacatggggtcaattgcgtcgcttgttatggcagtcatcattagcagtggcggtgacgatgagcaaacaggtcggggtggcatctcgtcggcaatgaagttgtgggggttagtggtgtgccaccatacatcaccacggtgtatcccttttccattgaggtatgcttgcgagtttctcatgcaggcatttgggttgcagctcaacatggagttgcagcttgcgcaccagctgtcagagaagcacattctgcgaactcagacgctattgtgtgacatgctactacgagattcaccaactggcatcgtcacgcagagccccagcatcatggaccttgtgaagtgcgacggggctgcactgtattatcatgggaaatactatccattgggtgtcactcccactgagtctcagattaaggatatcatcgagtggttgacggtgtttcatggggactcaacagggctcagcacagatagcctggctgatgcaggctaccttggtgctgctgcactaggggaggctgtgtgtggaatggcggtggcttatattacaccgagtgattacttgttttggtttcggtcacacacagctaaagagatcaaatggggtggcgcaaagcatcaccctgaggataaggatgatggtcagaggatgcacccacggtcgtcattcaaggcatttcttgaagtggttaaaagcagaagcctgccatgggagaatgcagaaatggacgcaatacattccttgcagctcatattgcgtgactccttcagggatgctgcagagggcaccaacaactcaaaagccattgtcaatggacaagttcagcttcgggagctagaattgcgggggataaatgagcttagttccgtagcaagagagatggttcggttgatagagacagcaacagtacccatatttgcagtagatactgatgggtgtataaatggttggaatgcaaagattgctgagttgacagggctttcagttgaggaggcaatgggcaaatctctggtaaatgatcttatcttcaaggaatctgaggcgacagttgaaaaactactctcacgagctttaagaggtgaggaagacaaaaatgtggagataaagttgaagacatttgggtcagagcaatataagggaccaatatttgttgttgtcaatgcttgttctagtagagattacacacaaaatattgtaggtgtctgttttgttggacaagatgtcacaggacaaaaggtggtcatggataaatttgttaacatacaaggggactacaaagctattgtacacaatcctaatcctctgataccaccaatttttgcatcagatgagaacacttcttgttcagaatggaatacagccatggaaaaacttacaggatggtcgagaggtgaagttgttggtaagtttcttattggagaggtgtttggaaattgttgtcgactcaagggcccagatgcattgacaaaattcatggttattattcacaacgctataggaggacaggattatgagaagttccctttttcattttttgacaagaatggaaagtatgtgcaggccttattgaccgccaatacaaggagcaaaatggatggtaaatccattggagccttttgtttcctgcagattgcaagcactgaaatacagcaagcctttgagattcagagacaacaagaaaagaagtgttacgcaaggatgaaagaattggcctatatttgccaggagataaagaatcctcttagtggcatccgatttaccaactctctgttgcagatgactgatttaaatgatgaccagaggcagttccttgaaactagctctgcttgtgagaaacagatgtccaagattgttaaggacgccagtctccaaagtatcgaggacgggtctatctgtcttatacactcgttgtatctttgatggagtggctcctagcctttccttcatcctagtgcagattgatgatgaaagaagatcatgggaattagctggagcgaggggtctctcctacttggcagcacctcttcttgaggccccccccctcctttgatctttactctttggtgcttgagcaaagtgagttttctcttggagacgttatgaatgctgttgtcagccaagcaatgttattgttgagagagagggatttacaacttattcgggacatccctgatgaaatcaaggatgcgtcagcgtatggtgatcaatgtagaattcaacaagttttggctgacttcttgctaagcatggtgcggtctgctccatccgagaatggttgggtagaaatacaagtcagaccaaatgtaaaacagaattctgatggaacaaatacagaacttttcatattcaggtttgcctgccctggtgagggcctccctgctgacgtcgtccaggatatgttcagcaattcccaatggtcaacacaagaaggcgtaggactaagcacatgcaggaagatcctcaaattgatgggtggcgaggtccaatacatcagagagtcagagcggagtttcttcctcatcgtcctcgagcagccccaacctcgtccagcagctggtagagaaatcgtctgatatgttaagatccgtgctgaccccacctaactttctcggccgattacataacttagccccctgataagagggtgcctaatttacgagaagcctggaaacaaatcaaagctgccatggcaattcaatgactgaagtgttgttgatgaggctgttttcagtgcaccgctatccatggccatgctgtggtttcaagaccagagttggcggatagttacgtacacaggcggcaaatgtgtctcttagccgctgtttaagtgcaccgctgtaagtttgggtgtccatgtccatgctgtggtttcaagatcagagtccatggcggatagttatgtacacaagcgacaaacgtggttcttagcttaggttcatgaccagttccacgtagtacatatagcttatatgtatatatacaatctattttttactatgcataaggagttgtttcagcttacacggttgtatgttatagtcctttctaggtctactacatcctaatctagatctggttcctctggaatgttggcaccaccgctctgtattttgcggcgaaggtttgagtttggcctacctcggtttatttcattctcagaccttaatgtaaaagctttgacagttgacactgggtgtgtcctttgtagagaaagaaaaccttttcttttaaaaa

SEQ ID NO: 1473 - DNA, 1104 bp, Zea Mays
ctcccgagcagcagcgttacttactcactagtcactactgcttggctctagcctctagctagtcaactcctgcttggcccggcatggggagggcgccgagcggtgcgtggaacatggcgcttctggggctggccgtcgcggtggttcttgcggtggccgccgaggcgcggtccttggagaagcagaacctatgcggtggttgcgggcttggtggcgggggagggtatggcagtggcggtggccttggacacggtgtagggtttggaggagggaagggtggcggtttcggtgggggtgcaggcggtggagctggaggtggcttaggcggaggcggggggcttggtggtggtgaaggaggtggttatggtggtggtgccggcaggggtgctggtggaggcggagggcttggtggtggtgaaggaggtggttatggtggtggtgccggcggaggtgctggtggaggcggcggccttgggggtggttctggtggaggtctcggcggtggtgagggcggaggcggtggtcttggtggcggaggaggagctggggctggtggtggttacggtggaggagcaggtgcaggaagtggctctggaggcggctatggtggaggcgctggtggaggctacggtggtggtgctggcgctggtagtggcagtggccttggctctggcggcggtggaggttatggtggtggtgccggaggcggaggcggaggtggaggtggaggtggcatcggcggcggtgtgtgattcaacctcttacatccatgcatggcgtgtgcatgcaagtgctcgacgcactcctcttgcagtttcaggcatgcgtggagtcaagctaatagcatgtgtgcgatataccgatcgatcctgatcgtactctgtgcgtaacgatcatagtaaacagaataaagagttaatgttgcaataaattgagtcggtcataattgtatatgatgatatatagtttatactttatacggtatataaactgcgtcagtagcaagctaagctgaggaagagctactttgtaagtttgtattgtactattttagttgtattttgtcaaaataaaggaaatattatgagctacatggagttcgta

SEQ ID NO: 1474 - DNA, 2793 bp, Zea Mays
ttgagtttcttaaactccacaccacctaagtcaacacatcaccaatctcaaagcaacgggcacgctgaggagggcgtcagggcgagacaacccgctcgccgtggaccgtggtgccgccgcgcgcccgctgccctgctcccctccaccttccgcgcccttgcactgctgcctccagtatactgcgtcggcgaagcttccagaattccttgcctagggtttctccgggcagccttcgatggggcctcccttcttccttctcttcctcgtcctcacggccgctgcggtcgtgtcctcggccccccggcgggaggcgttccgccgggacccagggcacccgcactggcaccatggcgctttccacgatgtcgaggacagtgtccgcgccgacgtccgccgcatgctccacacccgagcagaggttccatttcaagtgcctcttgaggttaatgttgttcttattggtttcaatggtgatggagggtatagatactctttggatgggcacaagctcgaagaattcctaaaaatgggtttcccacttcacaggccctcttgctttgagacaggggagccaattgatatcgagcatcatattatgtacaatgttatatcggctggacaaccggagctgatatctctcgagaagtcactgaaggaggccatgcaacctgcaggaattgcaagagatagtgaatatggcagggaattgcctctatttgaagtagaagcgactgcagtggaatcgatatttcagaggctatactcattcatttttgacatggagcctggttatcctgcaaatgacatggataggcctgttcctgttgcgatatttattgttaattttgataaggttagaatggatcctcgaaacaaagaagttaatctcgatagtttaatgtatggtacaattggtggactaacagaacaagaactaaaaaaacaagaagcagaatacatttaccgttaccgttacaatggtggtggggcaactcaagtttggctaagttctggaagatttgttgtaatagatctttcagcgggcccttgtacatatgggaaaatagaaactgaagaaggcagtgtcagctataggtcaatgccacggctgtcacaaataatcttcccaagaggacttgctgccccaagtgctagttcaacgcaagatattttcattgggcagctcggaggtgcaattgcaactaccattgagcatgtgatagctcctgatataagatttgaaactgttgacatggcagtgaggttgcttgtacctattattgtgctacagaaccacaataggtacaacattcttcaagaaggccataactatagtatagatgttcaagctatagaaagggaggaaatggagcggtctgctgatgtgctgtctgctggtctattagaagttgcaaatccttctctctcaagtagattcttcctaaagcagcattggactgatggagaagatgatgtaaaagactctattaagcacaggcccttgtgggaatcttacatgcccaaaaataataaaggaaggagaggaactggaaagaagaaacatggaagtctgtacagaacttatgggaccagagtgatcccagtttttgtattatcactggccggtgtcgatgctgaacttctcatggaagaggagagtcttgtttggacaagtaaagatgttgttattgtgcttgagcataacaatgaaaagattcctctaagctatgtgtcagaaacgactaggcagtttgctcttccatctatcgcacagcgccacatcttggctggtctggcatcagcagttggcggtctgagtgcaccatatgaaagagcatcacgtattcatgaaagacatgtagtgaactggctgtgggctgcaggctgtcatccgtttggaccattctcgaactcctcacagatcagtcaaattcttcaggatgtagcactgagaactacaatttatgctcaagtcgatgctgctcttcgcaaaataagagacacatcagagtttgtccaatcttttgcatcagagcatcttaagacgccattaggagaacttgtgaaaggtaataaaaacaagtccaccactgagttatgggtagagaaattctataagaaggtaaccaatctaccggagccttttccccatgatcttgttgagaagttagaagaatacctggataaacttgaagggcaactcgtggacttgtcttccttattgtatgaccaccggctggtcgatgcatatcaaaacagtaccgatatcctgcaaagcactatttttacacaacagtatgtggaacgtgttctagctaacgagagagacaagatgaaatgctgtagcattgaatatagtcatccaaagcagtcatcccaggcttttgtctatggagggatccttctggctggatttcttgtgtattcactggttattttcttctcttcacctgttcgctaattttatgtccagatgcagaaagtcttggatgctttatggtaggctaggtttgtctggggctgtcaatcttcatgagggaatggcctgaactgtcttggatacagaagggctttggcacagttttagtgctctatttctcgacacacaagcaatcagacggctgatatatatgtaactgattcttgtctgcgataaactatagtcgatttcacagaagagctggtgcatgctatgaaaatatgaaatactttcatcccattttgcaacttgttactgcagaactgcacataacaccactgacagaaacccccgtttgttaataagccccccag

SEQ ID NO: 1475 - DNA, 2855 bp, Zea Mays
ttgagtttcttaaactccacaccacctaagtcaacacatcaccaatctcaaagcaacgggcacgctgaggagggcgtcagggcgagacaacccgctcgccgtggaccgtggtgccgccgcgcgcccgctgccctgctcccctccaccttccgcgcccttgcactgctgcctccagtatactgcgtcggcgaagcttccagaattccttgcctagggtttctccgggcagccttcgatggggcctcccttcttccttctcttcctcgtcctcacggccgctgcggtcgtgtcctcggccccccggcgggaggcgttccgccgggacccagggcacccgcactggcaccatggcgctttccacgatgtcgaggacagtgtccgcgccgacgtccgccgcatgctccacacccgagcagaggttccatttcaagtgcctcttgaggttaatgttgttcttattggtttcaatggtgatggagggtatagatactctttggatgggcacaagctcgaagaattcctaaaaatgggtttcccacttcacaggccctcttgctttgagacaggggagccaattgatatcgagcatcatattatgtacaatgttatatcggctggacaaccggagctgatatctctcgagaagtcactgaaggaggccatgcaacctgcaggaattgcaagagatagtgaatatggcagggaattgcctctatttgaagtagaagcgactgcagtggaatcgatatttcagaggctatactcattcatttttgacatggagcctggttatcctgcaaatgacatggataggcctgttcctgttgcgatatttattgttaattttgataaggttagaatggatcctcgaaacaaagaagttaatctcgatagtttaatgtatggtacaattggtggactaacagaacaagaactaaaaaaacaagaagcagaatacatttaccgttaccgttacaatggtggtggggcaactcaagtttggctaagttctggaagatttgttgtaatagatctttcagcgggcccttgtacatatgggaaaatagaaactgaagaaggcagtgtcagctataggtcaatgccacggctgtcacaaataatcttcccaagaggacttgctgccccaagtgctagttcaacgcaagatattttcattgggcagctcggaggtgcaattgcaactaccattgagcatgtgatagctcctgatataaggttaaaaagatggtccaccctggtcaggaggtaataataatttctggttcgcatgcgctgcaccagcatgaaaagttagctgttgcagtttccaaagcaacacgtagccattctcttcatgaaacaaagagtgatggccggtttcatgtccgtaccaaaacttacttggatggagcaatacttaaagaggaaatggagcggtctgctgatgtgctgtctgctggtctattagaagttgcaaatccttctctctcaagtagattcttcctaaagcagcattggactgatggagaagatgatgtaaaagactctattaagcacaggcccttgtgggaatcttacatgcccaaaaataataaaggaaggagaggaactggaaagaagaaacatggaagtctgtacagaacttatgggaccagagtgatcccagtttttgtattatcactggccggtgtcgatgctgaacttctcatggaagaggagagtcttgtttggacaagtaaagatgttgttattgtgcttgagcataacaatgaaaagattcctctaagctatgtgtcagaaacgactaggcagtttgctcttccatctatcgcacagcgccacatcttggctggtctggcatcagcagttggcggtctgagtgcaccatatgaaagagcatcacgtattcatgaaagacatgtagtgaactggctgtgggctgcaggctgtcatccgtttggaccattctcgaactcctcacagatcagtcaaattcttcaggatgtagcactgagaactacaatttatgctcaagtcgatgctgctcttcgcaaaataagagacacatcagagtttgtccaatcttttgcatcagagcatcttaagacgccattaggagaacttgtgaaaggtaataaaaacaagtccaccactgagttatgggtagagaaattctataagaaggtaaccaatctaccggagccttttccccatgatcttgttgagaagttagaagaatacctggataaacttgaagggcaactcgtggacttgtcttccttattgtatgaccaccggctggtcgatgcatatcaaaacagtaccgatatcctgcaaagcactatttttacacaacagtatgtggaacgtgttctagctaacgagagagacaagatgaaatgctgtagcattgaatatagtcatccaaagcagtcatcccaggcttttgtctatggagggatccttctggctggatttcttgtgtattcactggttattttcttctcttcacctgttcgctaattttatgtccagatgcagaaagtcttggatgctttatggtaggctaggtttgtctggggctgtcaatcttcatgagggaatggcctgaactgtcttggatacagaagggctttggcacagttttagtgctctatttctcgacacacaagcaatcagacggctgatatatatgtaactgattcttgtctgcgataaactatagtcgatttcacagaagagctggtgcatgctatgaaaatatgaaatactttcatcccattttgcaacttgttactgcagaactgcacataacaccactgacagaaacccccgtttgttaataagccccccag

SEQ ID NO: 1476 - DNA, 3098 bp, Zea Mays
ttgagtttcttaaactccacaccacctaagtcaacacatcaccaatctcaaagcaacgggcacgctgaggagggcgtcagggcgagacaacccgctcgccgtggaccgtggtgccgccgcgcgcccgctgccctgctcccctccaccttccgcgcccttgcactgctgcctccagtatactgcgtcggcgaagcttccagaattccttgcctagggtttctccgggcagccttcgatggggcctcccttcttccttctcttcctcgtcctcacggccgctgcggtcgtgtcctcggccccccggcgggaggcgttccgccgggacccagggcacccgcactggcaccatggcgctttccacgatgtcgaggacagtgtccgcgccgacgtccgccgcatgctccacacccgagcagaggttccatttcaagtgcctcttgaggttaatgttgttcttattggtttcaatggtgatggagggtatagatactctttggatgggcacaagctcgaagaattcctaaaaatgggtttcccacttcacaggccctcttgctttgagacaggggagccaattgatatcgagcatcatattatgtacaatgttatatcggctggacaaccggagctgatatctctcgagaagtcactgaaggaggccatgcaacctgcaggaattgcaagagatagtgaatatggcagggaattgcctctatttgaagtagaagcgactgcagtggaatcgatatttcagaggctatactcattcatttttgacatggagcctggttatcctgcaaatgacatggataggcctgttcctgttgcgatatttattgttaattttgataagaatggatcctcgaaacaaagaagttaatctcgatagtttaatgtatggtacaattggtggactaacagaacaagaactaaaaaaacaagaagcagaatacatttaccgttaccgttacaatggtggtggggcaactcaagtttggctaagttctggaagatttgttgtaatagatctttcagcgggcccttgtacatatgggaaaatagaaactgaagaaggcagtgtcagctataggtcaatgccacggctgtcacaaataatcttcccaagaggacttgctgccccaagtgctagttcaacgcaagatattttcattgggcagctcggaggtgcaattgcaactaccattgagcatgtgatagctcctgatataagatttgaaactgttgacatggcagtgaggttgcttgtacctattattgtgctacagaaccacaataggtacaacattcttcaagaaggccataactatagtatagatgttcaagctatagaaagggaggttaaaaagatggtccaccctggtcaggaggtaataataatttctggttcgcatgcgctgcaccagcatgaaaagttagctgttgcagtttccaaagcaacacgtagccattctcttcatgaaacaaagagtgatggccggtttcatgtccgtaccaaaacttacttggatggagcaatacttaaagaggaaatggagcggtctgctgatgtgctgtctgctggtctattagaagttgcaaatccttctctctcaagtagattcttcctaaagcagcattggactgatggagaagatgatgtaaaagactctattaagcacaggcccttgtgggaatcttacatgcccaaaaataataaaggaaggagaggaactggaaagaagaaacatggaagtctgtacagaacttatgggaccagagtgatcccagtttttgtattatcactggccggtgtcgatgctgaacttctcatggaagaggagagtcttgtttggacaagtaaagatgttgttattgtgcttgagcataacaatgaaaagattcctctaagctatgtgtcagaaacgactaggcagtttgctcttccatctatcgcacagcgccacatcttggctggtctggcatcagcagttggcggtctgagtgcaccatatgaaagagcatcacgtattcatgaaagacatgtagtgaactggctgtgggctgcaggctgtcatccgtttggaccattctcgaactcctcacagatcagtcaaattcttcaggatgtagcactgagaactacaatttatgctcaagtcgatgctgctcttcgcaaaataagagacacatcagagtttgtccaatcttttgcatcagagcatcttaagacgccattaggagaacttgtgaaaggtaataaaaacaagtccaccactgagttatgggtagagaaattctataagaaggtaaccaatctaccggagccttttccccatgatcttgttgagaagttagaagaatacctggataaacttgaagggcaactcgtggacttgtcttccttattgtatgaccaccggctggtcgatgcatatcaaaacagtaccgatatcctgcaaagcactatttttacacaacagtatgtttatacagagatgctatattcgcacctggctactcttgtgctatctttttgaaactcattattttcattttgtttcattcgaaacatttttaccctttaccccttctcttgacaggtatgtggaacgtgttctagctaacgagagagacaagatgaaatgctgtagcattgaatatagtcatccaaagcagtcatcccaggcttttgtctatggagggatccttctggctggatttcttgtgtattcactggttattttcttctcttcacctgttcgctaattttatgtccagatgcagaaagtcttggatgctttatggtaggctaggtttgtctggggctgtcaatcttcatgagggaatggcctgaactgtcttggatacagaagggctttggcacagttttagtgctctatttctcgacacacaagcaatcagacggctgatatatatgtaactgattcttgtctgcgataaactatagtcgatttcacagaagagctggtgcatgctatgaaaatatgaaatactttcatcccattttgcaacttgttactgcagaactgcacataacaccactgacagaaacccccgtttgttaataagccccccag

SEQ ID NO: 1477 - DNA, 2921 bp, Zea Mays
ttgagtttcttaaactccacaccacctaagtcaacacatcaccaatctcaaagcaacgggcacgctgaggagggcgtcagggcgagacaacccgctcgccgtggaccgtggtgccgccgcgcgcccgctgccctgctcccctccaccttccgcgcccttgcactgctgcctccagtatactgcgtcggcgaagcttccagaattccttgcctagggtttctccgggcagccttcgatggggcctcccttcttccttctcttcctcgtcctcacggccgctgcggtcgtgtcctcggccccccggcgggaggcgttccgccgggacccagggcacccgcactggcaccatggcgctttccacgatgtcgaggacagtgtccgcgccgacgtccgccgcatgctccacacccgagcagaggttccatttcaagtgcctcttgaggttaatgttgttcttattggtttcaatggtgatggagggtatagatactctttggatgggcacaagctcgaagaattcctaaaaatgggtttcccacttcacaggccctcttgctttgagacaggggagccaattgatatcgagcatcatattatgtacaatgttatatcggctggacaaccggagctgatatctctcgagaagtcactgaaggaggccatgcaacctgcaggaattgcaagagatagtgaatatggcagggaattgcctctatttgaagtagaagcgactgcagtggaatcgatatttcagaggctatactcattcatttttgacatggagcctggttatcctgcaaatgacatggataggcctgttcctgttgcgatatttattgttaattttgataaggttagaatggatcctcgaaacaaagaagttaatctcgatagtttaatgtatggtacaattggtggactaacagaacaagaactaaaaaaacaagaagcagaatacatttaccgttaccgttacaatggtggtggggcaactcaagtttggctaagttctggaagatttgttgtaatagatctttcagcgggcccttgtacatatgggaaaatagaaactgaagaaggcagtgtcagctataggtcaatgccacggctgtcacaaataatcttcccaagaggacttgctgccccaagtgctagttcaacgcaagatattttcattgggcagctcggaggtgcaattgcaactaccattgagcatgtgatagctcctgatataagatttgaaactgttgacatggcagtgaggttgcttgtacctattattgtgctacagaaccacaataggttaaaaagatggtccaccctggtcaggaggtaataataatttctggttcgcatgcgctgcaccagcatgaaaagttagctgttgcagtttccaaagcaacacgtagccattctcttcatgaaacaaagagtgatggccggtttcatgtccgtaccaaaacttacttggatggagcaatacttaaagaggaaatggagcggtctgctgatgtgctgtctgctggtctattagaagttgcaaatccttctctctcaagtagattcttcctaaagcagcattggactgatggagaagatgatgtaaaagactctattaagcacaggcccttgtgggaatcttacatgcccaaaaataataaaggaaggagaggaactggaaagaagaaacatggaagtctgtacagaacttatgggaccagagtgatcccagtttttgtattatcactggccggtgtcgatgctgaacttctcatggaagaggagagtcttgtttggacaagtaaagatgttgttattgtgcttgagcataacaatgaaaagattcctctaagctatgtgtcagaaacgactaggcagtttgctcttccatctatcgcacagcgccacatcttggctggtctggcatcagcagttggcggtctgagtgcaccatatgaaagagcatcacgtattcatgaaagacatgtagtgaactggctgtgggctgcaggctgtcatccgtttggaccattctcgaactcctcacagatcagtcaaattcttcaggatgtagcactgagaactacaatttatgctcaagtcgatgctgctcttcgcaaaataagagacacatcagagtttgtccaatcttttgcatcagagcatcttaagacgccattaggagaacttgtgaaaggtaataaaaacaagtccaccactgagttatgggtagagaaattctataagaaggtaaccaatctaccggagccttttccccatgatcttgttgagaagttagaagaatacctggataaacttgaagggcaactcgtggacttgtcttccttattgtatgaccaccggctggtcgatgcatatcaaaacagtaccgatatcctgcaaagcactatttttacacaacagtatgtggaacgtgttctagctaacgagagagacaagatgaaatgctgtagcattgaatatagtcatccaaagcagtcatcccaggcttttgtctatggagggatccttctggctggatttcttgtgtattcactggttattttcttctcttcacctgttcgctaattttatgtccagatgcagaaagtcttggatgctttatggtaggctaggtttgtctggggctgtcaatcttcatgagggaatggcctgaactgtcttggatacagaagggctttggcacagttttagtgctctatttctcgacacacaagcaatcagacggctgatatatatgtaactgattcttgtctgcgataaactatagtcgatttcacagaagagctggtgcatgctatgaaaatatgaaatactttcatcccattttgcaacttgttactgcagaactgcacataacaccactgacagaaacccccgtttgttaataagccccccag

SEQ ID NO: 1478 - DNA, 2866 bp, Zea Mays
ttgagtttcttaaactccacaccacctaagtcaacacatcaccaatctcaaagcaacgggcacgctgaggagggcgtcagggcgagacaacccgctcgccgtggaccgtggtgccgccgcgcgcccgctgccctgctcccctccaccttccgcgcccttgcactgctgcctccagtatactgcgtcggcgaagcttccagaattccttgcctagggtttctccgggcagccttcgatggggcctcccttcttccttctcttcctcgtcctcacggccgctgcggtcgtgtcctcggccccccggcgggaggcgttccgccgggacccagggcacccgcactggcaccatggcgctttccacgatgtcgaggacagtgtccgcgccgacgtccgccgcatgctccacacccgagcagaggttccatttcaagtgcctcttgaggttaatgttgttcttattggtttcaatggtgatggagggtatagatactctttggatgggcacaagctcgaagaattcctaaaaatgggtttcccacttcacaggccctcttgctttgagacaggggagccaattgatatcgagcatcatattatgtacaatgttatatcggctggacaaccggagctgatatctctcgagaagtcactgaaggaggccatgcaacctgcaggaattgcaagagatagtgaatatggcagggaattgcctctatttgaagtagaagcgactgcagtggaatcgatatttcagaggctatactcattcatttttgacatggagcctggttatcctgcaaatgacatggataggcctgttcctgttgcgatatttattgttaattttgataaggttagaatggatcctcgaaacaaagaagttaatctcgatagtttaatgtatggtacaattggtggactaacagaacaagaactaaaaaaacaagaagcagaatacatttaccgttaccgttacaatggtggtggggcaactcaagtttggctaagttctggaagatttgttgtaatagatctttcagcgggcccttgtacatatgggaaaatagaaactgaagaaggcagtgtcagctataggtcaatgccacggctgtcacaaataatcttcccaagaggacttgctgccccaagtgctagttcaacgcaagatattttcattgggcagctcggaggtgcaattgcaactaccattgagcatgtgatagctcctgatataagatttgaaactgttgacatggcagtgaggttgcttgtacctattattgtgctacagaaccacaataggtacaacattcttcaagaaggccataactatagtatagatgttcaagctatagaaagggaggttaaaaagatggtccaccctggtcaggaggtaataataatttctggttcgcatgcgctgcaccagcatgaaaagttagctgttgcagtttccaaagcaacacgtagccattctcttcatgaaacaaagagtgatggccggtttcatgtccgtaccaaaacttacttggatggagcaatacttaaagaggaaatggagcggtctgctgatgtgctgtctgctggtctattagaagttgcaaatccttctctctcaagtagattcttcctaaagcagcattggactgatggagaagatgatgtaaaagactctattaagcacaggcccttgtgggaatcttacatgcccaaaaataataaaggaaggagaggaactggaaagaagaaacatggaagtctgtacagaacttatgggaccagagtgatcccagtttttgtattatcactggccggtgtcgatgctgaacttctcatggaagaggagagtcttgtttggacaagtaaagatgttgttattgtgcttgagcataacaatgaaaagattcctctaagctatgtgtcagaaacgactaggcagtttgctcttccatctatcgcacagcgccacatcttggctggtctggcatcagcagttggcggtctgagtgcaccatatgaaagagcatcacgtattcatgaaagacatgtagtgaactggctgtgggctgcaggctgtcatccgtttggaccattctcgaactcctcacagatcagtcaaattcttcaggatgtagcactgagaactacaatttatgctcaagtcgatgctgctcttcgcaaaataagagacacatcagagtttgtccaatcttttgcatcagagcatcttaagacgccattaggagaacttgtgaaagaaacttgaagggcaactcgtggacttgtcttccttattgtatgaccaccggctggtcgatgcatatcaaaacagtaccgatatcctgcaaagcactatttttacacaacagtatgtggaacgtgttctagctaacgagagagacaagatgaaatgctgtagcattgaatatagtcatccaaagcagtcatcccaggcttttgtctatggagggatccttctggctggatttcttgtgtattcactggttattttcttctcttcacctgttcgctaattttatgtccagatgcagaaagtcttggatgctttatggtaggctaggtttgtctggggctgtcaatcttcatgagggaatggcctgaactgtcttggatacagaagggctttggcacagttttagtgctctatttctcgacacacaagcaatcagacggctgatatatatgtaactgattcttgtctgcgataaactatagtcgatttcacagaagagctggtgcatgctatgaaaatatgaaatactttcatcccattttgcaacttgttactgcagaactgcacataacaccactgacagaaacccccgtttgttaataagccccccag

SEQ ID NO: 1479 - DNA, 2854 bp, Zea Mays
ttgagtttcttaaactccacaccacctaagtcaacacatcaccaatctcaaagcaacgggcacgctgaggagggcgtcagggcgagacaacccgctcgccgtggaccgtggtgccgccgcgcgcccgctgccctgctcccctccaccttccgcgcccttgcactgctgcctccagtatactgcgtcggcgaagcttccagaattccttgcctagggtttctccgggcagccttcgatggggcctcccttcttccttctcttcctcgtcctcacggccgctgcggtcgtgtcctcggccccccggcgggaggcgttccgccgggacccagggcacccgcactggcaccatggcgctttccacgatgtcgaggacagtgtccgcgccgacgtccgccgcatgctccacacccgagcagaggccctcttgctttgagacaggggagccaattgatatcgagcatcatattatgtacaatgttatatcggctggacaaccggagctgatatctctcgagaagtcactgaaggaggccatgcaacctgcaggaattgcaagagatagtgaatatggcagggaattgcctctatttgaagtagaagcgactgcagtggaatcgatatttcagaggctatactcattcatttttgacatggagcctggttatcctgcaaatgacatggataggcctgttcctgttgcgatatttattgttaattttgataaggttagaatggatcctcgaaacaaagaagttaatctcgatagtttaatgtatggtacaattggtggactaacagaacaagaactaaaaaaacaagaagcagaatacatttaccgttaccgttacaatggtggtggggcaactcaagtttggctaagttctggaagatttgttgtaatagatctttcagcgggcccttgtacatatgggaaaatagaaactgaagaaggcagtgtcagctataggtcaatgccacggctgtcacaaataatcttcccaagaggacttgctgccccaagtgctagttcaacgcaagatattttcattgggcagctcggaggtgcaattgcaactaccattgagcatgtgatagctcctgatataagatttgaaactgttgacatggcagtgaggttgcttgtacctattattgtgctacagaaccacaataggtacaacattcttcaagaaggccataactatagtatagatgttcaagctatagaaagggaggttaaaaagatggtccaccctggtcaggaggtaataataatttctggttcgcatgcgctgcaccagcatgaaaagttagctgttgcagtttccaaagcaacacgtagccattctcttcatgaaacaaagagtgatggccggtttcatgtccgtaccaaaacttacttggatggagcaatacttaaagaggaaatggagcggtctgctgatgtgctgtctgctggtctattagaagttgcaaatccttctctctcaagtagattcttcctaaagcagcattggactgatggagaagatgatgtaaaagactctattaagcacaggcccttgtgggaatcttacatgcccaaaaataataaaggaaggagaggaactggaaagaagaaacatggaagtctgtacagaacttatgggaccagagtgatcccagtttttgtattatcactggccggtgtcgatgctgaacttctcatggaagaggagagtcttgtttggacaagtaaagatgttgttattgtgcttgagcataacaatgaaaagattcctctaagctatgtgtcagaaacgactaggcagtttgctcttccatctatcgcacagcgccacatcttggctggtctggcatcagcagttggcggtctgagtgcaccatatgaaagagcatcacgtattcatgaaagacatgtagtgaactggctgtgggctgcaggctgtcatccgtttggaccattctcgaactcctcacagatcagtcaaattcttcaggatgtagcactgagaactacaatttatgctcaagtcgatgctgctcttcgcaaaataagagacacatcagagtttgtccaatcttttgcatcagagcatcttaagacgccattaggagaacttgtgaaaggtaataaaaacaagtccaccactgagttatgggtagagaaattctataagaaggtaaccaatctaccggagccttttccccatgatcttgttgagaagttagaagaatacctggataaacttgaagggcaactcgtggacttgtcttccttattgtatgaccaccggctggtcgatgcatatcaaaacagtaccgatatcctgcaaagcactatttttacacaacagtatgtggaacgtgttctagctaacgagagagacaagatgaaatgctgtagcattgaatatagtcatccaaagcagtcatcccaggcttttgtctatggagggatccttctggctggatttcttgtgtattcactggttattttcttctcttcacctgttcgctaattttatgtccagatgcagaaagtcttggatgctttatggtaggctaggtttgtctggggctgtcaatcttcatgagggaatggcctgaactgtcttggatacagaagggctttggcacagttttagtgctctatttctcgacacacaagcaatcagacggctgatatatatgtaactgattcttgtctgcgataaactatagtcgatttcacagaagagctggtgcatgctatgaaaatatgaaatactttcatcccattttgcaacttgttactgcagaactgcacataacaccactgacagaaacccccgtttgttaataagccccccag

SEQ ID NO: 1480 - DNA, 1946 bp, Zea Mays
caggttcaggcagcagcacgtgtcctaggaggcagcagacgcagcaaacaggcagcatgccgccagtgccagggacatgctgtggaataccgtgatgtgtgccatctgatttgttgtaatagatctttcagcgggcccttgtacatatgggaaaatagaaactgaagaaggcagtgtcagctataggtcaatgccacggctgtcacaaataatcttcccaagaggacttgctgccccaagtgctagttcaacgcaagatattttcattgggcagctcggaggtgcaattgcaactaccattgagcatgtgatagctcctgatataaggttaaaaagatggtccaccctggtcaggaggtaataataatttctggttcgcatgcgctgcaccagcatgaaaagttagctgttgcagtttccaaagcaacacgtagccattctcttcatgaaacaaagagtgatggccggtttcatgtccgtaccaaaacttacttggatggagcaatacttaaagaggaaatggagcggtctgctgatgtgctgtctgctggtctattagaagttgcaaatccttctctctcaagtagattcttcctaaagcagcattggactgatggagaagatgatgtaaaagactctattaagcacaggcccttgtgggaatcttacatgcccaaaaataataaaggaaggagaggaactggaaagaagaaacatggaagtctgtacagaacttatgggaccagagtgatcccagtttttgtattatcactggccggtgtcgatgctgaacttctcatggaagaggagagtcttgtttggacaagtaaagatgttgttattgtgcttgagcataacaatgaaaagattcctctaagctatgtgtcagaaacgactaggcagtttgctcttccatctatcgcacagcgccacatcttggctggtctggcatcagcagttggcggtctgagtgcaccatatgaaagagcatcacgtattcatgaaagacatgtagtgaactggctgtgggctgcaggctgtcatccgtttggaccattctcgaactcctcacagatcagtcaaattcttcaggatgtagcactgagaactacaatttatgctcaagtcgatgctgctcttcgcaaaataagagacacatcagagtttgtccaatcttttgcatcagagcatcttaagacgccattaggagaacttgtgaaaggtaataaaaacaagtccaccactgagttatgggtagagaaattctataagaaggtaaccaatctaccggagccttttccccatgatcttgttgagaagttagaagaatacctggataaacttgaagggcaactcgtggacttgtcttccttattgtatgaccaccggctggtcgatgcatatcaaaacagtaccgatatcctgcaaagcactatttttacacaacagtatgtggaacgtgttctagctaacgagagagacaagatgaaatgctgtagcattgaatatagtcatccaaagcagtcatcccaggcttttgtctatggagggatccttctggctggatttcttgtgtattcactggttattttcttctcttcacctgttcgctaattttatgtccagatgcagaaagtcttggatgctttatggtaggctaggtttgtctggggctgtcaatcttcatgagggaatggcctgaactgtcttggatacagaagggctttggcacagttttagtgctctatttctcgacacacaagcaatcagacggctgatatatatgtaactgattcttgtctgcgataaactatagtcgatttcacagaagagctggtgcatgctatgaaaatatgaaatactttcatcccattttgcaacttgttactgcagaactgcacataacaccactgacagaaacccccgtttgttaataagccccccag

SEQ ID NO: 1481 - DNA, 2062 bp, Zea Mays
agcagcacgtgtcctaggaggcagcagacgcagcaaacaggcagcatgccgccagtgccagggacatgctgtggaataccgtgatgtgtgccatctgatttgttgtaatagatctttcagcgggcccttgtacatatgggaaaatagaaactgaagaaggcagtgtcagctataggtcaatgccacggctgtcacaaataatcttcccaagaggacttgctgccccaagtgctagttcaacgcaagatattttcattgggcagctcggaggtgcaattgcaactaccattgagcatgtgatagctcctgatataagatttgaaactgttgacatggcagtgaggttgcttgtacctattattgtgctacagaaccacaataggtacaacattcttcaagaaggccataactatagtatagatgttcaagctatagaaagggaggttaaaaagatggtccaccctggtcaggaggtaataataatttctggttcgcatgcgctgcaccagcatgaaaagttagctgttgcagtttccaaagcaacacgtagccattctcttcatgaaacaaagagtgatggccggtttcatgtccgtaccaaaacttacttggatggagcaatacttaaagaggaaatggagcggtctgctgatgtgctgtctgctggtctattagaagttgcaaatccttctctctcaagtagattcttcctaaagcagcattggactgatggagaagatgatgtaaaagactctattaagcacaggcccttgtgggaatcttacatgcccaaaaataataaaggaaggagaggaactggaaagaagaaacatggaagtctgtacagaacttatgggaccagagtgatcccagtttttgtattatcactggccggtgtcgatgctgaacttctcatggaagaggagagtcttgtttggacaagtaaagatgttgttattgtgcttgagcataacaatgaaaagattcctctaagctatgtgtcagaaacgactaggcagtttgctcttccatctatcgcacagcgccacatcttggctggtctggcatcagcagttggcggtctgagtgcaccatatgaaagagcatcacgtattcatgaaagacatgtagtgaactggctgtgggctgcaggctgtcatccgtttggaccattctcgaactcctcacagatcagtcaaattcttcaggatgtagcactgagaactacaatttatgctcaagtcgatgctgctcttcgcaaaataagagacacatcagagtttgtccaatcttttgcatcagagcatcttaagacgccattaggagaacttgtgaaaggtaataaaaacaagtccaccactgagttatgggtagagaaattctataagaaggtaaccaatctaccggagccttttccccatgatcttgttgagaagttagaagaatacctggataaacttgaagggcaactcgtggacttgtcttccttattgtatgaccaccggctggtcgatgcatatcaaaacagtaccgatatcctgcaaagcactatttttacacaacagtatgtggaacgtgttctagctaacgagagagacaagatgaaatgctgtagcattgaatatagtcatccaaagcagtcatcccaggcttttgtctatggagggatccttctggctggatttcttgtgtattcactggttattttcttctcttcacctgttcgctaattttatgtccagatgcagaaagtcttggatgctttatggtaggctaggtttgtctggggctgtcaatcttcatgagggaatggcctgaactgtcttggatacagaagggctttggcacagttttagtgctctatttctcgacacacaagcaatcagacggctgatatatatgtaactgattcttgtctgcgataaactatagtcgatttcacagaagagctggtgcatgctatgaaaatatgaaatactttcatcccattttgcaacttgttactgcagaactgcacataacaccactgacagaaacccccgtttgttaataagccccccag

SEQ ID NO: 1482 - DNA, 1983 bp, Zea Mays
aggcagcagacgcagcaaacaggcagcatgccgccagtgccagggacatgctgtggaataccgtgatgtgtgccatctgatttgttgtaatagatctttcagcgggcccttgtacatatgggaaaatagaaactgaagaaggcagtgtcagctataggtcaatgccacggctgtcacaaataatcttcccaagaggacttgctgccccaagtgctagttcaacgcaagatattttcattgggcagctcggaggtgcaattgcaactaccattgagcatgtgatagctcctgatataagatttgaaactgttgacatggcagtgaggttgcttgtacctattattgtgctacagaaccacaataggttaaaaagatggtccaccctggtcaggaggtaataataatttctggttcgcatgcgctgcaccagcatgaaaagttagctgttgcagtttccaaagcaacacgtagccattctcttcatgaaacaaagagtgatggccggtttcatgtccgtaccaaaacttacttggatggagcaatacttaaagaggaaatggagcggtctgctgatgtgctgtctgctggtctattagaagttgcaaatccttctctctcaagtagattcttcctaaagcagcattggactgatggagaagatgatgtaaaagactctattaagcacaggcccttgtgggaatcttacatgcccaaaaataataaaggaaggagaggaactggaaagaagaaacatggaagtctgtacagaacttatgggaccagagtgatcccagtttttgtattatcactggccggtgtcgatgctgaacttctcatggaagaggagagtcttgtttggacaagtaaagatgttgttattgtgcttgagcataacaatgaaaagattcctctaagctatgtgtcagaaacgactaggcagtttgctcttccatctatcgcacagcgccacatcttggctggtctggcatcagcagttggcggtctgagtgcaccatatgaaagagcatcacgtattcatgaaagacatgtagtgaactggctgtgggctgcaggctgtcatccgtttggaccattctcgaactcctcacagatcagtcaaattcttcaggatgtagcactgagaactacaatttatgctcaagtcgatgctgctcttcgcaaaataagagacacatcagagtttgtccaatcttttgcatcagagcatcttaagacgccattaggagaacttgtgaaaggtaataaaaacaagtccaccactgagttatgggtagagaaattctataagaaggtaaccaatctaccggagccttttccccatgatcttgttgagaagttagaagaatacctggataaacttgaagggcaactcgtggacttgtcttccttattgtatgaccaccggctggtcgatgcatatcaaaacagtaccgatatcctgcaaagcactatttttacacaacagtatgtggaacgtgttctagctaacgagagagacaagatgaaatgctgtagcattgaatatagtcatccaaagcagtcatcccaggcttttgtctatggagggatccttctggctggatttcttgtgtattcactggttattttcttctcttcacctgttcgctaattttatgtccagatgcagaaagtcttggatgctttatggtaggctaggtttgtctggggctgtcaatcttcatgagggaatggcctgaactgtcttggatacagaagggctttggcacagttttagtgctctatttctcgacacacaagcaatcagacggctgatatatatgtaactgattcttgtctgcgataaactatagtcgatttcacagaagagctggtgcatgctatgaaaatatgaaatactttcatcccattttgcaacttgttactgcagaactgcacataacaccactgacagaaacccccgtttgttaataagccccccag

SEQ ID NO: 1483 - DNA, 1988 bp, Zea Mays
tcctctcttaaaataagcatcggatttgttgtaatagatctttcagcgggcccttgtacatatgggaaaatagaaactgaagaaggcagtgtcagctataggtcaatgccacggctgtcacaaataatcttcccaagaggacttgctgccccaagtgctagttcaacgcaagatattttcattgggcagctcggaggtgcaattgcaactaccattgagcatgtgatagctcctgatataagatttgaaactgttgacatggcagtgaggttgcttgtacctattattgtgctacagaaccacaataggtacaacattcttcaagaaggccataactatagtatagatgttcaagctatagaaagggaggttaaaaagatggtccaccctggtcaggaggtaataataatttctggttcgcatgcgctgcaccagcatgaaaagttagctgttgcagtttccaaagcaacacgtagccattctcttcatgaaacaaagagtgatggccggtttcatgtccgtaccaaaacttacttggatggagcaatacttaaagaggaaatggagcggtctgctgatgtgctgtctgctggtctattagaagttgcaaatccttctctctcaagtagattcttcctaaagcagcattggactgatggagaagatgatgtaaaagactctattaagcacaggcccttgtgggaatcttacatgcccaaaaataataaaggaaggagaggaactggaaagaagaaacatggaagtctgtacagaacttatgggaccagagtgatcccagtttttgtattatcactggccggtgtcgatgctgaacttctcatggaagaggagagtcttgtttggacaagtaaagatgttgttattgtgcttgagcataacaatgaaaagattcctctaagctatgtgtcagaaacgactaggcagtttgctcttccatctatcgcacagcgccacatcttggctggtctggcatcagcagttggcggtctgagtgcaccatatgaaagagcatcacgtattcatgaaagacatgtagtgaactggctgtgggctgcaggctgtcatccgtttggaccattctcgaactcctcacagatcagtcaaattcttcaggatgtagcactgagaactacaatttatgctcaagtcgatgctgctcttcgcaaaataagagacacatcagagtttgtccaatcttttgcatcagagcatcttaagacgccattaggagaacttgtgaaaggtaataaaaacaagtccaccactgagttatgggtagagaaattctataagaaggtaaccaatctaccggagccttttccccatgatcttgttgagaagttagaagaatacctggataaacttgaagggcaactcgtggacttgtcttccttattgtatgaccaccggctggtcgatgcatatcaaaacagtaccgatatcctgcaaagcactatttttacacaacagtatgtggaacgtgttctagctaacgagagagacaagatgaaatgctgtagcattgaatatagtcatccaaagcagtcatcccaggcttttgtctatggagggatccttctggctggatttcttgtgtattcactggttattttcttctcttcacctgttcgctaattttatgtccagatgcagaaagtcttggatgctttatggtaggctaggtttgtctggggctgtcaatcttcatgagggaatggcctgaactgtcttggatacagaagggctttggcacagttttagtgctctatttctcgacacacaagcaatcagacggctgatatatatgtaactgattcttgtctgcgataaactatagtcgatttcacagaagagctggtgcatgctatgaaaatatgaaatactttcatcccattttgcaacttgttactgcagaactgcacataacaccactgacagaaacccccgtttgttaataagccccccag

SEQ ID NO: 1484 - DNA, 1781 bp, Zea Mays
cgcgagccactgcacccatccactcgtacgccgcggtgcgccgcagcccgcagcccgcagcccgcagcccgcagcccgcgactccaggcatccacaaaaaaccatctcccccgcggccccggcaccgcacgctcccgacccggcgagtcccactcccacctaagctgagcggccatggcgcggcacctcgcgccttcgtctggaagcctccaccgtctcctcgcgtcctgccactacccgcccacctcccaggcgccgcctccccgtccgctcctcctcccgaagacccgatcggcggctatgcagctcccgcgacgcgggcggcgcgacgtcgtcgccgctgcagctgcctccgcaccgtccccctcttctccgggtaccgaggtggcagtctggggtaaggtctccgccgtgctcttcgatatggatggcgttctctgcaacagcgaggagccctcgcgacaggccggcgtcgacgtcttcgctgagatgggagtcgaggtcgccgtggatgactttgtccccttcatgggcactggtgaggccaatttccttggaggtgtcgcaagagctaaaggagtgaaagatttcaatcctgaaagtgccaagaagagattttttgagatatatcttgacaagtacgcaaagccaaattctggcatcggattccctggggctctggagctcatcttggagtgcaaaaattctggtcttaaggttgccgttgcatccagtgccgacaggattaaggtggatgccaatctggctgctgctggtttgtccgtgtttctatttgatgctattgtttctgctgatgcgtttgaaaaattgaagcccgctccggatatattcctggcagcatcaaagagcttaggtgtcgacacaaatgagtgcattgtgatagaagacgcgcttgctggtgttcaagctgctaatgctgcagaaatgagatgtatcgctgtgacaactactctagaggaaatagcgttacgacaaggcagtccctcgttcatacgaaagaatattggagacatttcaattaacgacattttgtatggtggttctaatgctcgccacaatgaaggggcaggaagtactgagaatagtagttcggtagggaatgctttgtctgagagtctaaacggagcaactgctgctggacattctgacacaaaaggttttccaatctcaaaaaataaagggctgttgggttctcgacgcgaaatattgagatatggaagtctgggaatagccttgtcctgcctttttgttgcagtcagaaattggaaggcaatgcagttcgcatctcccaaaggcctactgaattttctcatgggtggaaatagttcagtttttgccagaaatgaaggggttctgccacatatgttcctgagtttccaagaaagcttgactggttgaatacagccccacttcagtttggaagagtaatttagaactcatcttaggttattatcgtagctgcaactttgctacagtattaattgcatgccctttgttctggatttaaactagaagatcttgcatgcatctctatcaccctattctatggggcagccagattgtaattaacatgatccaaaagtttcagtcttctagcatctgcaaagaaatttcagttactgttggtgcttttgtggtccggaagctccattcttgatgttaaacttctgatgcatatacatttttcatgaatatatacatgtaaatctactgatgatcccttctaaaacatcatattccctactgttcctgcatgcaaa

SEQ ID NO: 1485 - DNA, 2291 bp, Zea Mays
cgcgagccactgcacccatccactcgtacgccgcggtgcgccgcagcccgcagcccgcagcccgcagcccgcagcccgcgactccaggcatccacaaaaaaccatctcccccgcggccccggcaccgcacgctcccgacccggcgagtcccactcccacctaagctgagcggccatggcgcggcacctcgcgccttcgtctggaagcctccaccgtctcctcgcgtcctgccactacccgcccacctcccaggcgccgcctccccgtccgctcctcctcccgaagacccgatcggcggctatgcagctcccgcgacgcgggcggcgcgacgtcgtcgccgctgcagctgcctccgcaccgtccccctcttctccgggtaccgaggtggcagtctggggtaaggtctccgccgtgctcttcgatatggatggcgttctctgcaacagcgaggagccctcgcgacaggccggcgtcgacgtcttcgctgagatgggagtcgaggtcgccgtggatgactttgtccccttcatgggcactggtgaggccaatttccttggaggtgtcgcaagagctaaaggagtgaaagatttcaatcctgaaagtgccaagaagagattttttgagatatatcttgacaagtacgcaaagccaaattctggcatcggattccctggggctctggagctcatcttggagtgcaaaaattctggtcttaaggttgccgttgcatccagtgccgacaggattaaggtggatgccaatctggctgctgctggtttgtccgtgtttctatttgatgctattgtttctgctgatgcgtttgaaaaattgaagcccgctccggatatattcctggcagcatcaaagagcttaggtgtcgacacaaatgagtgcattgtgatagaagacgcgcttgctggtgttcaagctgctaatgctgcagaaatgagatgtatcgctgtgacaactactctagaggaaatagcgttacgacaaggcagtccctcgttcatacgaaagaatattggagacatttcaattaacgacattttgtatggtggttctaatgctcgccacaatgaaggggcaggaagtactgagaatagtagttcggtagggaatgctttgtctgagagtctaaacggagcaactgctgctggacattctgacacaaaaggttttccaatctcaaaaaataaaggaaatcctgcaggctgttgggttctcgacgcgaaatattgagatatggaagtctgggaatagccttgtcctgcctttttgttgcagtcagaaattggaaggcaatgcagttcgcatctcccaaaggcctactgaattttctcatgggtggaaatagttcagtttttgccagaaatgaaggagaatctctgtcatcaagagttcaacaaataaagaagtatctagctgagtttgaatctgggggttctgccacatatgttcctgagtttccaagaaagcttgactggttgaatacagccccacttcagtttggaagagtaatttagaactcatcttaggatttgaaaggaagagtggtgctgctggatttttggacatattgctgcattaactgcatgcatgttttgccagacctggattttgtagagaagaagtataaagaaaaacctggtgacgtggggaggaaatcctatagggaggctctgttttctcccaagcctgctgagtccagggacgttggtggttgggtgacgatggttcgtcggcgctcgagcaccttgaagtccctccccagacctgtcccggtggatttgcgcggcagatgcttcaattgtttcttgactgagcaccgtgcggcggtgtgccgtaatcgcgtgcggtgttttttctgccggttgtcggggcaccgtgtgggcgtgtgcccgcgccggcggacggaccctcccatccctggacgcactctggtgtggcggcctgtggctatgaaaccttcggagaaggctgtctgcgataaagttatggctgtggctggcgggtctggacctgctacaacgtctggtgaaggcgcgaagaagagaactcgccgtggacagaggaagaggaagtcaggcgctggggggcagttgcctcctccgcctgccttcgacatggataagccggtgtgctttgtcgggcgttgtggaagaattgatcgggctgaggaggaactccgtcgtgcactgatcgtctctgttgtaggcagggaggattctggctgcgccgaggaggtgcttgacttcatcccctatgggttctgccttgacgaccgatga

SEQ ID NO: 1486 - DNA, 3382 bp, Zea Mays
cgcgagccactgcacccatccactcgtacgccgcggtgcgccgcagcccgcagcccgcagcccgcagcccgcagcccgcgactccaggcatccacaaaaaaccatctcccccgcggccccggcaccgcacgctcccgacccggcgagtcccactcccacctaagctgagcggccatggcgcggcacctcgcgccttcgtctggaagcctccaccgtctcctcgcgtcctgccactacccgcccacctcccaggcgccgcctccccgtccgctcctcctcccgaagacccgatcggcggctatgcagctcccgcgacgcgggcggcgcgacgtcgtcgccgctgcagctgcctccgcaccgtccccctcttctccgggtaccgaggtggcagtctggggtaaggtctccgccgtgctcttcgatatggatggcgttctctgcaacagcgaggagccctcgcgacaggccggcgtcgacgtcttcgctgagatgggagtcgaggtcgccgtggatgactttgtccccttcatgggcactggtgaggccaatttccttggaggtgtcgcaagagctaaaggagtgaaagatttcaatcctgaaagtgccaagaagagattttttgagatatatcttgacaagtacgcaaagccaaattctggcatcggattccctggggctctggagctcatcttggagtgcaaaaattctggtcttaaggttgccgttgcatccagtgccgacaggattaaggtggatgccaatctggctgctgctggtttgtccgtgtttctatttgatgctattgtttctgctgatgcgtttgaaaaattgaagcccgctccggatatattcctggcagcatcaaagagcttaggtgtcgacacaaatgagtgcattgtgatagaagacgcgcttgctggtgttcaagctgctaatgctgcagaaatgagatgtatcgctgtgacaactactctagaggaaatagcgttacgacaaggcagtccctcgttcatacgaaagaatattggagacatttcaattaacgacattttgtatggtggttctaatgctcgccacaatgaaggggcaggaagtactgagaatagtagttcggtagggaatgctttgtctgagagtctaaacggagcaactgctgctggacattctgacacaaaaggttttccaatctcaaaaaataaagggctgttgggttctcgacgcgaaatattgagatatggaagtctgggaatagccttgtcctgcctttttgttgcagtcagaaattggaaggcaatgcagttcgcatctcccaaaggcctactgaattttctcatgggtggaaatagttcagtttttgccagaaatgaaggtaagaaatccagatgcaggaggatttttacaggtttcattgttgcaatccaatcgagtgtcagttaattctaaaggatccgttcagatggaattttgatgttatttctaacaataaaatcacgatcctaaaacaatgtcgctcttcaatatatcaggtacacagtgcacctaggcatcaccatcctgtcttgcacctcttgcaccaatggtacctggccacccacttcgggctgccactttttaaacacagcacaatgctgttgggtaattggaaattccatcaggcataatgcatgttgatggtgccattgttggctttaggctgggcctgcaaagtaaccgtagtgacaaattctttttagcatgcctagagagattgaaacctagctaggaaacatttggatctgaagctattttgaagattggtctccagttgttatgtgtgtcttgcaggagaatctctgtcatcaagagttcaacaaataaagaagtatctagctgagtttgaatctgggggttctgccacatatgttcctgagtttccaagaaagcttgactggttgaatacagccccacttcagtttggaagagtaatttagaactcatcttaggatttgaaaggaagagtggtgctgctggatttttggacatattgctgcattaactgcatgcatgttttgccagacctggattttgtagagaagaagtataaagaaaaacctttcactgttgttggtgtgcactctgccaaattcgataatgaaaaggaccttgaagctatacgtaatgctgttctgcgctacaacattactcacccggttgtaaatgatggtgacatgtacttgtggagagaactgggggtgaactcttggcctacatttgttcttattggacccaacggaaaggttctagcacagatatcaggtgaaggtcatagaaaggatctggatgaagtaattggtgcagcactggaattttatgaagagaagaaactattacaaaatgacccccttcccttggcattggaaaaagacaaggatagtcgtttactaacttcgcctctcaaatttcctgggaaacttgctgttgatgtgcaaaacaatcgattattcatatcagacagtaatcataatcgaattgtggtgaccaacttggaagggcagttcatataccaagttgggagttctgaggaaggattgcttgatggcccatttgatgctgccctatttaaccgccctcaaggtattgcttacaattcaaaaaggaatatcttatacgttgcagacactgagaaccacgctctgcgagaaattaattttgtggacgagactgtgagaacactagctggaaatgggacgaaaggatctgattacagaggaggaggacaaggaacaaaccaggtcctaaattcaccatgggatgtatgctacgatcccgcagaggaggccgtgtatattgcaatggctgggcaacaccagatctggaagcacaatttacatgatggaataaccaaagttattagcggtgatggctatgagaggaatctgaatggctcaaggtaacagattctggcattatctgtcaggaaagttctaaatgtgctgttttaattggtcttacagcgcagtaatatgtttatgaagatggttaatgacggtttctatctgatgagtggctaatgatatttttggcgatatttccttgtgataaatacatatgtttaaaccgctttattttatccgacaagtagcaaatcctgtatggatcttggagctggagctgttccaaacagtgtaacaggccctattttacagcttgaagccatgtttatttttttcctttttatgctaatttctgtgaaagttgaagtagaataaccattccagatcttggcgtacaggcttgcttcttatatgatcagcctaagacttttcttcctttaatgtgttcatttgtctcctgcacatccttgcacttgatttggttaatactttgaagttttgaatttatt

SEQ ID NO: 1487 - DNA, 2607 bp, Zea Mays
cgcgagccactgcacccatccactcgtacgccgcggtgcgccgcagcccgcagcccgcagcccgcagcccgcagcccgcgactccaggcatccacaaaaaaccatctcccccgcggccccggcaccgcacgctcccgacccggcgagtcccactcccacctaagctgagcggccatggcgcggcacctcgcgccttcgtctggaagcctccaccgtctcctcgcgtcctgccactacccgcccacctcccaggcgccgcctccccgtccgctcctcctcccgaagacccgatcggcggctatgcagctcccgcgacgcgggcggcgcgacgtcgtcgccgctgcagctgcctccgcaccgtccccctcttctccgggtaccgaggtggcagtctggggtaaggtctccgccgtgctcttcgatatggatggcgttctctgcaacagcgaggagccctcgcgacaggccggcgtcgacgtcttcgctgagatgggagtcgaggtcgccgtggatgactttgtccccttcatgggcactggtgaggccaatttccttggaggtgtcgcaagagctaaaggagtgaaagatttcaatcctgaaagtgccaagaagagattttttgagatatatcttgacaagtacgcaaagccaaattctggcatcggattccctggggctctggagctcatcttggagtgcaaaaattctggtcttaaggttgccgttgcatccagtgccgacaggattaaggtggatgccaatctggctgctgctggtttgtccgtgtttctatttgatgctattgtttctgctgatgcgtttgaaaaattgaagcccgctccggatatattcctggcagcatcaaagagcttaggtgtcgacacaaatgagtgcattgtgatagaagacgcgcttgctggtgttcaagctgctaatgctgcagaaatgagatgtatcgctgtgacaactactctagaggaaatagcgttacgacaaggcagtccctcgttcatacgaaagaatattggagacatttcaattaacgacattttgtatggtggttctaatgctcgccacaatgaaggggcaggaagtactgagaatagtagttcggtagggaatgctttgtctgagagtctaaacggagcaactgctgctggacattctgacacaaaaggttttccaatctcaaaaaataaagggctgttgggttctcgacgcgaaatattgagatatggaagtctgggaatagccttgtcctgcctttttgttgcagtcagaaattggaaggcaatgcagttcgcatctcccaaaggcctactgaattttctcatgggtggaaatagttcagtttttgccagaaatgaaggagaatctctgtcatcaagagttcaacaaataaagaagtatctagctgagtttgaatctgggggttctgccacatatgttcctgagtttccaagaaagcttgactggttgaatacagccccacttcagtttggaagagtaatttagaactcatcttaggatttgaaaggaagagtggtgctgctggatttttggacatattgctgcattaactgcatgcatgttttgccagacctggattttgtagagaagaagtataaagaaaaacctttcactgttgttggtgtgcactctgccaaattcgataatgaaaaggaccttgaagctatacgtaatgctgttctgcgctacaacattactcacccggttgtaaatgatggtgacatgtacttgtggagagaactgggggtgaactcttggcctacatttgttcttattggacccaacggaaaggttctagcacagatatcaggtgaaggtcatagaaaggatctggatgaagtaattggtgcagcactggaattttatgaagagaagaaactattacaaaatgacccccttcccttggcattggaaaaagacaaggatagtcgtttactaacttcgcctctcaaatttcctgggaaacttgctgttgatgtgcaaaacaatcgattattcatatcagacagtaatcataatcgaattgtggtgaccaacttggaagggcagttcatataccaagttgggagttctgaggaaggattgcttgatggcccatttgatgctgccctatttaaccgccctcaaggtattgcttacaattcaaaaaggaatatcttatacgttgcagacactgagaaccacgctctgcgagaaattaattttgtggacgagactgtgagaacactagctggaaatgggacgaaaggatctgattacagaggaggaggacaaggaacaaaccaggtcctaaattcaccatgggatgtatgctacgatcccgcagaggaggccgtgtatattgcaatggctgggcaacaccagatctggaagcacaatttacatgatggaataaccaaagttattagcggtgatggctatgagaggaatctgaatggctcaagcgccaccagcacatcgtttgcacagccttctgggatttcattagcttttgaaatgcatgagttacttgttgctgatagtgaaagtagttccattcgagttgttaatctgaagacaggaggctcaagattgctg

SEQ ID NO: 1488 - DNA, 2834 bp, Zea Mays
cgcgagccactgcacccatccactcgtacgccgcggtgcgccgcagcccgcagcccgcagcccgcagcccgcagcccgcgactccaggcatccacaaaaaaccatctcccccgcggccccggcaccgcacgctcccgacccggcgagtcccactcccacctaagctgagcggccatggcgcggcacctcgcgccttcgtctggaagcctccaccgtctcctcgcgtcctgccactacccgcccacctcccaggcgccgcctccccgtccgctcctcctcccgaagacccgatcggcggctatgcagctcccgcgacgcgggcggcgcgacgtcgtcgccgctgcagctgcctccgcaccgtccccctcttctccgggtaccgaggtggcagtctggggtaaggtctccgccgtgctcttcgatatggatggcgttctctgcaacagcgaggagccctcgcgacaggccggcgtcgacgtcttcgctgagatgggagtcgaggtcgccgtggatgactttgtccccttcatgggcactggtgaggccaatttccttggaggtgtcgcaagagctaaaggagtgaaagatttcaatcctgaaagtgccaagaagagattttttgagatatatcttgacaagtacgcaaagccaaattctggcatcggattccctggggctctggagctcatcttggagtgcaaaaattctggtcttaaggttgccgttgcatccagtgccgacaggattaaggtggatgccaatctggctgctgctggtttgtccgtgtttctatttgatgctattgtttctgctgatgcgtttgaaaaattgaagcccgctccggatatattcctggcagcatcaaagagcttaggtgtcgacacaaatgagtgcattgtgatagaagacgcgcttgctggtgttcaagctgctaatgctgcagaaatgagatgtatcgctgtgacaactactctagaggaaatagcgttacgacaaggcagtccctcgttcatacgaaagaatattggagacatttcaattaacgacattttgtatggtggttctaatgctcgccacaatgaaggggcaggaagtactgagaatagtagttcggtagggaatgctttgtctgagagtctaaacggagcaactgctgctggacattctgacacaaaaggttttccaatctcaaaaaataaagggctgttgggttctcgacgcgaaatattgagatatggaagtctgggaatagccttgtcctgcctttttgttgcagtcagaaattggaaggcaatgcagttcgcatctcccaaaggcctactgaattttctcatgggtggaaatagttcagtttttgccagaaatgaaggtacacagtgcacctaggcatcaccatcctgtcttgcacctcttgcaccaatggtacctggccacccacttcgggctgccactttttaaacacagcacaatgctgttgggtaattggaaattccatcaggcataatgcatgttgatggtgccattgttggctttaggctgggcctgcaaagtaaccgtagtgacaaattctttttagcatgcctagagagattgaaacctagctaggaaacatttggatctgaagctattttgaagattggtctccagttgttatgtgtgtcttgcaggagaatctctgtcatcaagagttcaacaaataaagaagtatctagctgagtttgaatctgggggttctgccacatatgttcctgagtttccaagaaagcttgactggttgaatacagccccacttcagtttggaagagatttgaaaggaagagtggtgctgctggatttttggacatattgctgcattaactgcatgcatgttttgccagacctggattttgtagagaagaagtataaagaaaaacctttcactgttgttggtgtgcactctgccaaattcgataatgaaaaggaccttgaagctatacgtaatgctgttctgcgctacaacattactcacccggttgtaaatgatggtgacatgtacttgtggagagaactgggggtgaactcttggcctacatttgttcttattggacccaacggaaaggttctagcacagatatcaggtgaaggtcatagaaaggatctggatgaagtaattggtgcagcactggaattttatgaagagaagaaactattacaaaatgacccccttcccttggcattggaaaaagacaaggatagtcgtttactaacttcgcctctcaaatttcctgggaaacttgctgttgatgtgcaaaacaatcgattattcatatcagacagtaatcataatcgaattgtggtgaccaacttggaagggcagttcatataccaagttgggagttctgaggaaggattgcttgatggcccatttgatgctgccctatttaaccgccctcaaggtattgcttacaattcaaaaaggaatatcttatacgttgcagacactgagaaccacgctctgcgagaaattaattttgtggacgagactgtgagaacactagctggaaatgggacgaaaggatctgattacagaggaggaggacaaggaacaaaccaggtcctaaattcaccatgggatgtatgctacgatcccgcagaggaggccgtgtatattgcaatggctgggcaacaccagatctggaagcacaatttacatgatggaataaccaaagttattagcggtgatggctatgagaggaatctgaatggctcaagaaatgcatgagttacttgttgctgatagtgaaagtagttccattcgagttgttaatctgaagacaggaggctcaagattgctg

SEQ ID NO: 1489 - DNA, 2568 bp, Zea Mays
cgcgagccactgcacccatccactcgtacgccgcggtgcgccgcagcccgcagcccgcagcccgcagcccgcagcccgcgactccaggcatccacaaaaaaccatctcccccgcggccccggcaccgcacgctcccgacccggcgagtcccactcccacctaagctgagcggccatggcgcggcacctcgcgccttcgtctggaagcctccaccgtctcctcgcgtcctgccactacccgcccacctcccaggcgccgcctccccgtccgctcctcctcccgaagacccgatcggcggctatgcagctcccgcgacgcgggcggcgcgacgtcgtcgccgctgcagctgcctccgcaccgtccccctcttctccgggtaccgaggtggcagtctggggtaaggtctccgccgtgctcttcgatatggatggcgttctctgcaacagcgaggagccctcgcgacaggccggcgtcgacgtcttcgctgagatgggagtcgaggtcgccgtggatgactttgtccccttcatgggcactggtgaggccaatttccttggaggtgtcgcaagagctaaaggagtgaaagatttcaatcctgaaagtgccaagaagagattttttgagatatatcttgacaagtacgcaaagccaaattctggcatcggattccctggggctctggagctcatcttggagtgcaaaaattctggtcttaaggttgccgttgcatccagtgccgacaggattaaggtggatgccaatctggctgctgctggtttgtccgtgtttctatttgatgctattgtttctgctgatgcgtttgaaaaattgaagcccgctccggatatattcctggcagcatcaaagagcttaggtgtcgacacaaatgagtgcattgtgatagaagacgcgcttgctggtgttcaagctgctaatgctgcagaaatgagatgtatcgctgtgacaactactctagaggaaatagcgttacgacaaggcagtccctcgttcatacgaaagaatattggagacatttcaattaacgacattttgtatggtggttctaatgctcgccacaatgaaggggcaggaagtactgagaatagtagttcggtagggaatgctttgtctgagagtctaaacggagcaactgctgctggacattctgacacaaaaggttttccaatctcaaaaaataaaggaaatcctgcaggctgttgggttctcgacgcgaaatattgagatatggaagtctgggaatagccttgtcctgcctttttgttgcagtcagaaattggaaggcaatgcagttcgcatctcccaaaggcctactgaattttctcatgggtggaaatagttcagtttttgccagaaatgaaggagaatctctgtcatcaagagttcaacaaataaagaagtatctagctgagtttgaatctgggggttctgccacatatgttcctgagtttccaagaaagcttgactggttgaatacagccccacttcagtttggaagagtaatttagaactcatcttaggatttgaaaggaagagtggtgctgctggatttttggacatattgctgcattaactgcatgcatgttttgccagacctggattttgtagagaagaagtataaagaaaaacctttcactgttgttggtgtgcactctgccaaattcgataatgaaaaggaccttgaagctatacgtaatgctgttctgcgctacaacattactcacccggttgtaaatgatggtgacatgtacttgtggagagaactgggggtgaactcttggcctacatttgttcttattggacccaacggaaaggttctagcacagatatcaggtgaaggtcatagaaaggatctggatgaagtaattggtgcagcactggaattttatgaagagaagaaactattacaaaatgacccccttcccttggcattggaaaaagacaaggatagtcgtttactaacttcgcctctcaaatttcctgggaaacttgctgttgatgtgcaaaacaatcgattattcatatcagacagtaatcataatcgaattgtggtgaccaacttggaagggcagttcatataccaagttgggagttctgaggaaggattgcttgatggcccatttgatgctgccctatttaaccgccctcaaggtattgcttacaattcaaaaaggaatatcttatacgttgcagacactgagaaccacgctctgcgagaaattaattttgtggacgagactgtgagaacactagctggaaatgggacgaaaggatctgattacagaggaggaggacaaggaacaaaccaggtcctaaattcaccatgggatgtatgctacgatcccgcagaggaggccgtgtatattgcaatggctgggcaacaccagatctggaagcacaatttacatgatggaataaccaaagttattagcggtgatggctatgagaggaatctgaatggctcaagaaatgcatgagttacttgttgctgatagtgaaagtagttccattcgagttgttaatctgaagacaggaggctcaagattgctg

SEQ ID NO: 1490 - DNA, 2586 bp, Zea Mays
cgcgagccactgcacccatccactcgtacgccgcggtgcgccgcagcccgcagcccgcagcccgcagcccgcagcccgcgactccaggcatccacaaaaaaccatctcccccgcggccccggcaccgcacgctcccgacccggcgagtcccactcccacctaagctgagcggccatggcgcggcacctcgcgccttcgtctggaagcctccaccgtctcctcgcgtcctgccactacccgcccacctcccaggcgccgcctccccgtccgctcctcctcccgaagacccgatcggcggctatgcagctcccgcgacgcgggcggcgcgacgtcgtcgccgctgcagctgcctccgcaccgtccccctcttctccgggtaccgaggtggcagtctggggtaaggtctccgccgtgctcttcgatatggatggcgttctctgcaacagcgaggagccctcgcgacaggccggcgtcgacgtcttcgctgagatgggagtcgaggtcgccgtggatgactttgtccccttcatgggcactggtgaggccaatttccttggaggtgtcgcaagagctaaaggagtgaaagatttcaatcctgaaagtgccaagaagagattttttgagatatatcttgacaagtacgcaaagccaaattctggcatcggattccctggggctctggagctcatcttggagtgcaaaaattctggtcttaaggttgccgttgcatccagtgccgacaggattaaggtggatgccaatctggctgctgctggtttgtccgtgtttctatttgatgctattgtttctgctgatgcgtttgaaaaattgaagcccgctccggatatattcctggcagcatcaaagagcttaggtgtcgacacaaatgagtgcattgtgatagaagacgcgcttgctggtgttcaagctgctaatgctgcagaaatgagatgtatcgctgtgacaactactctagaggaaatagcgttacgacaaggcagtccctcgttcatacgaaagaatattggagacatttcaattaacgacattttgtatggtggttctaatgctcgccacaatgaaggggcaggaagtactgagaatagtagttcggtagggaatgctttgtctgagagtctaaacggagcaactgctgctggacattctgacacaaaaggttttccaatctcaaaaaataaagggctgttgggttctcgacgcgaaatattgagatatggaagtctgggaatagccttgtcctgcctttttgttgcagtcagaaattggaaggcaatgcagttcgcatctcccaaaggcctactgaattttctcatgggtggaaatagttcagtttttgccagaaatgaaggagaatctctgtcatcaagagttcaacaaataaagaagtatctagctgagtttgaatctgggggttctgccacatatgttcctgagtttccaagaaagcttgactggttgaatacagccccacttcagtttggaagagatttgaaaggaagagtggtgctgctggatttttggacatattgctgcattaactgcatgcatgttttgccagacctggattttgtagagaagaagtataaagaaaaacctttcactgttgttggtgtgcactctgccaaattcgataatgaaaaggaccttgaagctatacgtaatgctgttctgcgctacaacattactcacccggttgtaaatgatggtgacatgtacttgtggagagaactgggggtgaactcttggcctacatttgttcttattggacccaacggaaaggttctagcacagatatcaggtgaaggtcatagaaaggatctggatgaagtaattggtgcagcactggaattttatgaagagaagaaactattacaaaatgacccccttcccttggcattggaaaaagacaaggatagtcgtttactaacttcgcctctcaaatttcctgggaaacttgctgttgatgtgcaaaacaatcgattattcatatcagacagtaatcataatcgaattgtggtgaccaacttggaagggcagttcatataccaagttgggagttctgaggaaggattgcttgatggcccatttgatgctgccctatttaaccgccctcaaggtattgcttacaattcaaaaaggaatatcttatacgttgcagacactgagaaccacgctctgcgagaaattaattttgtggacgagactgtgagaacactagctggaaatgggacgaaaggatctgattacagaggaggaggacaaggaacaaaccaggtcctaaattcaccatgggatgtatgctacgatcccgcagaggaggccgtgtatattgcaatggctgggcaacaccagatctggaagcacaatttacatgatggaataaccaaagttattagcggtgatggctatgagaggaatctgaatggctcaagcgccaccagcacatcgtttgcacagccttctgggatttcattagcttttgaaatgcatgagttacttgttgctgatagtgaaagtagttccattcgagttgttaatctgaagacaggaggctcaagattgctg

SEQ ID NO: 1491 - DNA, 2449 bp, Zea Mays
cgcgagccactgcacccatccactcgtacgccgcggtgcgccgcagcccgcagcccgcagcccgcagcccgcagcccgcgactccaggcatccacaaaaaaccatctcccccgcggccccggcaccgcacgctcccgacccggcgagtcccactcccacctaagctgagcggccatggcgcggcacctcgcgccttcgtctggaagcctccaccgtctcctcgcgtcctgccactacccgcccacctcccaggcgccgcctccccgtccgctcctcctcccgaagacccgatcggcggctatgcagctcccgcgacgcgggcggcgcgacgtcgtcgccgctgcagctgcctccgcaccgtccccctcttctccgggtaccgaggtggcagtctggggtaaggtctccgccgtgctcttcgatatggatggcgttctctgcaacagcgaggagccctcgcgacaggccggcgtcgacgtcttcgctgagatgggagtcgaggtcgccgtggatgactttgtccccttcatgggcactggtgaggccaatttccttggaggtgtcgcaagagctaaaggagtgaaagatttcaatcctgaaagtgccaagaagagattttttgagatatatcttgacaagtacgcaaagccaaattctggcatcggattccctggggctctggagctcatcttggagtgcaaaaattctggtcttaaggttgccgttgcatccagtgccgacaggattaaggtggatgccaatctggctgctgctggtttgtccgtgtttctatttgatgctattgtttctgctgatgcgtttgaaaaattgaagcccgctccggatatattcctggcagcatcaaagagcttaggtgtcgacacaaatgagtgcattgtgatagaagacgcgcttgctggtgttcaagctgctaatgctgcagaaatgagatgtatcgctgtgacaactactctagaggaaatagcgttacgacaaggcagtccctcgttcatacgaaagaatattggagacatttcaattaacgacattttgtatggtggttctaatgctcgccacaatgaaggggcaggaagtactgagaatagtagttcggtagggaatgctttgtctgagagtctaaacggagcaactgctgctggacattctgacacaaaaggttttccaatctcaaaaaataaagggctgttgggttctcgacgcgaaatattgagatatggaagtctgggaatagccttgtcctgcctttttgttgcagtcagaaattggaaggcaatgcagttcgcatctcccaaaggcctactgaattttctcatgggtggaaatagttcagtttttgccagaaatgaaggatttgaaaggaagagtggtgctgctggatttttggacatattgctgcattaactgcatgcatgttttgccagacctggattttgtagagaagaagtataaagaaaaacctttcactgttgttggtgtgcactctgccaaattcgataatgaaaaggaccttgaagctatacgtaatgctgttctgcgctacaacattactcacccggttgtaaatgatggtgacatgtacttgtggagagaactgggggtgaactcttggcctacatttgttcttattggacccaacggaaaggttctagcacagatatcaggtgaaggtcatagaaaggatctggatgaagtaattggtgcagcactggaattttatgaagagaagaaactattacaaaatgacccccttcccttggcattggaaaaagacaaggatagtcgtttactaacttcgcctctcaaatttcctgggaaacttgctgttgatgtgcaaaacaatcgattattcatatcagacagtaatcataatcgaattgtggtgaccaacttggaagggcagttcatataccaagttgggagttctgaggaaggattgcttgatggcccatttgatgctgccctatttaaccgccctcaaggtattgcttacaattcaaaaaggaatatcttatacgttgcagacactgagaaccacgctctgcgagaaattaattttgtggacgagactgtgagaacactagctggaaatgggacgaaaggatctgattacagaggaggaggacaaggaacaaaccaggtcctaaattcaccatgggatgtatgctacgatcccgcagaggaggccgtgtatattgcaatggctgggcaacaccagatctggaagcacaatttacatgatggaataaccaaagttattagcggtgatggctatgagaggaatctgaatggctcaagcgccaccagcacatcgtttgcacagccttctgggatttcattagcttttgaaatgcatgagttacttgttgctgatagtgaaagtagttccattcgagttgttaatctgaagacaggaggctcaagattgctg

SEQ ID NO: 1492 - DNA, 2557 bp, Zea Mays
cgcgagccactgcacccatccactcgtacgccgcggtgcgccgcagcccgcagcccgcagcccgcagcccgcagcccgcgactccaggcatccacaaaaaaccatctcccccgcggccccggcaccgcacgctcccgacccggcgagtcccactcccacctaagctgagcggccatggcgcggcacctcgcgccttcgtctggaagcctccaccgtctcctcgcgtcctgccactacccgcccacctcccaggcgccgcctccccgtccgctcctcctcccgaagacccgatcggcggctatgcagctcccgcgacgcgggcggcgcgacgtcgtcgccgctgcagctgcctccgcaccgtccccctcttctccgggtaccgaggtggcagtctggggtaaggtctccgccgtgctcttcgatatggatggcgttctctgcaacagcgaggagccctcgcgacaggccggcgtcgacgtcttcgctgagatgggagtcgaggtcgccgtggatgactttgtccccttcatgggcactggtgaggccaatttccttggaggtgtcgcaagagctaaaggagtgaaagatttcaatcctgaaagtgccaagaagagattttttgagatatatcttgacaagtacgcaaagccaaattctggcatcggattccctggggctctggagctcatcttggagtgcaaaaattctggtcttaaggttgccgttgcatccagtgccgacaggattaaggtggatgccaatctggctgctgctggtttgtccgtgtttctatttgatgctattgtttctgctgatgcgtttgaaaaattgaagcccgctccggatatattcctggcagcatcaaagagcttaggtgtcgacacaaatgagtgcattgtgatagaagacgcgcttgctggtgttcaagctgctaatgctgcagaaatgagatgtatcgctgtgacaactactctagaggaaatagcgttacgacaaggcagtccctcgttcatacgaaagaatattggagacatttcaattaacgacattttgtatggtggttctaatgctcgccacaatgaaggggcaggaagtactgagaatagtagttcggtagggaatgctttgtctgagagtctaaacggagcaactgctgctggacattctgacacaaaaggttttccaatctcaaaaaataaaggaaatcctgcaggctgttgggttctcgacgcgaaatattgagatatggaagtctgggaatagccttgtcctgcctttttgttgcagtcagaaattggaaggcaatgcagttcgcatctcccaaaggcctactgaattttctcatgggtggaaatagttcagtttttgccagaaatgaaggggttctgccacatatgttcctgagtttccaagaaagcttgactggttgaatacagccccacttcagtttggaagagtaatttagaactcatcttaggatttgaaaggaagagtggtgctgctggatttttggacatattgctgcattaactgcatgcatgttttgccagacctggattttgtagagaagaagtataaagaaaaacctttcactgttgttggtgtgcactctgccaaattcgataatgaaaaggaccttgaagctatacgtaatgctgttctgcgctacaacattactcacccggttgtaaatgatggtgacatgtacttgtggagagaactgggggtgaactcttggcctacatttgttcttattggacccaacggaaaggttctagcacagatatcaggtgaaggtcatagaaaggatctggatgaagtaattggtgcagcactggaattttatgaagagaagaaactattacaaaatgacccccttcccttggcattggaaaaagacaaggatagtcgtttactaacttcgcctctcaaatttcctgggaaacttgctgttgatgtgcaaaacaatcgattattcatatcagacagtaatcataatcgaattgtggtgaccaacttggaagggcagttcatataccaagttgggagttctgaggaaggattgcttgatggcccatttgatgctgccctatttaaccgccctcaaggtattgcttacaattcaaaaaggaatatcttatacgttgcagacactgagaaccacgctctgcgagaaattaattttgtggacgagactgtgagaacactagctggaaatgggacgaaaggatctgattacagaggaggaggacaaggaacaaaccaggtcctaaattcaccatgggatgtatgctacgatcccgcagaggaggccgtgtatattgcaatggctgggcaacaccagatctggaagcacaatttacatgatggaataaccaaagttattagcggtgatggctatgagaggaatctgaatggctcaagcgccaccagcacatcgtttgcacagccttctgggatttcattagcttttgaaatgcatgagttacttgttgctgatagtgaaagtagttccattcgagttgttaatctgaagacaggaggctcaagattgctg

SEQ ID NO: 1493 - DNA, 1780 bp, Zea Mays
aaactcctcaagcaggaagacaacgcggggtgcacgagtggagcggggttcacaatacatggcagtgcattgtgatagaagacgcgcttgctggtgttcaagctgctaatgctgcagaaatgagatgtatcgctgtgacaactactctagaggaaatagcgttacgacaaggcagtccctcgttcatacgaaagaatattggagacatttcaattaacgacattttgtatggtggttctaatgctcgccacaatgaaggggcaggaagtactgagaatagtagttcggtagggaatgctttgtctgagagtctaaacggagcaactgctgctggacattctgacacaaaaggttttccaatctcaaaaaataaagggctgttgggttctcgacgcgaaatattgagatatggaagtctgggaatagccttgtcctgcctttttgttgcagtcagaaattggaaggcaatgcagttcgcatctcccaaaggcctactgaattttctcatgggtggaaatagttcagtttttgccagaaatgaagttgttatgtgtgtcttgcaggagaatctctgtcatcaagagttcaacaaataaagaagtatctagctgagtttgaatctgggggttctgccacatatgttcctgagtttccaagaaagcttgactggttgaatacagccccacttcagtttggaagagatttgaaaggaagagtggtgctgctggatttttggacatattgctgcattaactgcatgcatgttttgccagacctggattttgtagagaagaagtataaagaaaaacctttcactgttgttggtgtgcactctgccaaattcgataatgaaaaggaccttgaagctatacgtaatgctgttctgcgctacaacattactcacccggttgtaaatgatggtgacatgtacttgtggagagaactgggggtgaactcttggcctacatttgttcttattggacccaacggaaaggttctagcacagatatcaggtgaaggtcatagaaaggatctggatgaagtaattggtgcagcactggaattttatgaagagaagaaactattacaaaatgacccccttcccttggcattggaaaaagacaaggatagtcgtttactaacttcgcctctcaaatttcctgggaaacttgctgttgatgtgcaaaacaatcgattattcatatcagacagtaatcataatcgaattgtggtgaccaacttggaagggcagttcatataccaagttgggagttctgaggaaggattgcttgatggcccatttgatgctgccctatttaaccgccctcaaggtattgcttacaattcaaaaaggaatatcttatacgttgcagacactgagaaccacgctctgcgagaaattaattttgtggacgagactgtgagaacactagctggaaatgggacgaaaggatctgattacagaggaggaggacaaggaacaaaccaggtcctaaattcaccatgggatgtatgctacgatcccgcagaggaggccgtgtatattgcaatggctgggcaacaccagatctggaagcacaatttacatgatggaataaccaaagttattagcggtgatggctatgagaggaatctgaatggctcaagcgccaccagcacatcgtttgcacagccttctgggatttcattagcttttgaaatgcatgagttacttgttgctgatagtgaaagtagttccattcgagttgttaatctgaagacaggaggctcaagattgctg

SEQ ID NO: 1494 - DNA, 2431 bp, Zea Mays
agtagattgagctggttatcaactcctagtagtcagttctatttattagcagataaggttgttatcttgagtcggtcaggagtattaggagaagttgttagcctaagggcggcaccacaatataaggtgccttagtttgtattagggaatctatacaggaacacaactctgtctccccttggcgggactcacctcagtcatcctggccgacggtgaaattcctcaacctcactgcccatacgctctccgttcccttccacacgccttgctatagctacacaaccctttgcgcacatctaggagaaaacagagatcaacccacccacatcaattggtatcatattcatttggagcatcgccttctatggtcggctccgacaacaatcctgcgaccatgacggcggccgagaagttggatttcttggtaaaccaggtcacatccttgactgatctggggacgaaattgtcagcccaaatggagactctcaacaggcgcatggattcccatgacatgcgtctggcacgcctggaaacgtcagcagggaaacaactgctcattccccctgcgagctcgggtctgggtggattgacacaagaggacagggatgccgacgaggaggatgaggccacaggcgacttggagccctgttggagcggcgcagccccatcatgggcgggcgccgttcacggcaaggtcgccgagacgattttggcaggaaggactgccacaaccgcttccacaacagggactatcgacacgaggtttttgatggtggactacctcaccacgaccgtcacgatcatgcgccgcgtgatggagggggcacaactgacgctcgagcagagggccgctggagcacagcagggcagcaggagaggagggcggcgacgctggagaaggctttgccaccgcgcttgcctttcttgccacgctgtccagagtggccgccatgactgtaaccgccctcggaatgctgggagggagggcggttgtgctgctggtgtggaggacgagcagaggtgccagaggagaccgacgacttgggaccgttggcctcgctgggtgcagaggcaacaacaagagctgctgcccgaggtgcgacgaagcgcgggagagggccgccgcgcgttcttgggcggcacgggcaagggccgcgcggacccgatcgttggcagcgccccgttcgcgctgagcagcggcggcttcccaatcggcggcttccgcgcgagtcagggcggcgtcgcgagcagcaagggctgtgcgctcccgatctgcggctgtgtgatcagaagggtggtggacgtcggtgtcatgggagatgacaggatcgacgggctgaatcgtgagagggatttgaaaggaagagtggtgctgctggatttttggacatattgctgcattaactgcatgcatgttttgccagacctggattttgtagagaagaagtataaagaaaaacctttcactgttgttggtgtgcactctgccaaattcgataatgaaaaggaccttgaagctatacgtaatgctgttctgcgctacaacattactcacccggttgtaaatgatggtgacatgtacttgtggagagaactgggggtgaactcttggcctacatttgttcttattggacccaacggaaaggttctagcacagatatcaggtgaaggtcatagaaaggatctggatgaagtaattggtgcagcactggaattttatgaagagaagaaactattacaaaatgacccccttcccttggcattggaaaaagacaaggatagtcgtttactaacttcgcctctcaaatttcctgggaaacttgctgttgatgtgcaaaacaatcgattattcatatcagacagtaatcataatcgaattgtggtgaccaacttggaagggcagttcatataccaagttgggagttctgaggaaggattgcttgatggcccatttgatgctgccctatttaaccgccctcaaggtattgcttacaattcaaaaaggaatatcttatacgttgcagacactgagaaccacgctctgcgagaaattaattttgtggacgagactgtgagaacactagctggaaatgggacgaaaggatctgattacagaggaggaggacaaggaacaaaccaggtcctaaattcaccatgggatgtatgctacgatcccgcagaggaggccgtgtatattgcaatggctgggcaacaccagatctggaagcacaatttacatgatggaataaccaaagttattagcggtgatggctatgagaggaatctgaatggctcaagcgccaccagcacatcgtttgcacagccttctgggatttcattagcttttgaaatgcatgagttacttgttgctgatagtgaaagtagttccattcgagttgttaatctgaagacaggaggctcaagattgctg

SEQ ID NO: 1495 - DNA, 1987 bp, Zea Mays
atgacggcggccgagaagttggatttcttggtaaaccaggtcacatccttgactgatctggggacgaaattgtcagcccaaatggagactctcaacaggcgcatggattcccatgacatgcgtctggcacgcctggaaacgtcagcagggaaacaactgctcattccccctgcgagctcgggtctgggtggattgacacaagaggacagggatgccgacgaggaggatgaggccacaggcgacttggagccctgttggagcggcgcagccccatcatgggcgggcgccgttcacggcaaggtcgccgagacgattttggcaggaaggactgccacaaccgcttccacaacagggactatcgacacgaggtttttgatggtggactacctcaccacgaccgtcacgatcatgcgccgcgtgatggagggggcacaactgacgctcgagcagagggccgctggagcacagcagggcagcaggagaggagggcggcgacgctggagaaggctttgccaccgcgcttgcctttcttgccacgctgtccagagtggccgccatgactgtaaccgccctcggaatgctgggagggagggcggttgtgctgctggtgtggaggacgagcagaggtgccagaggagaccgacgacttgggaccgttggcctcgctgggtgcagaggcaacaacaagagctgctgcccgaggtgcgacgaagcgcgggagagggccgccgcgcgttcttgggcggcacgggcaagggccgcgcggacccgatcgttggcagcgccccgttcgcgctgagcagcggcggcttcccaatcggcggcttccgcgcgagtcagggcggcgtcgcgagcagcaagggctgtgcgctcccgatctgcggctgtgtgatcagaagggtggtggacgtcggtgtcatgggagatgacaggatcgacgggctgaatcgtgagagggatttgaaaggaagagtggtgctgctggatttttggacatattgctgcattaactgcatgcatgttttgccagacctggattttgtagagaagaagtataaagaaaaacctttcactgttgttggtgtgcactctgccaaattcgataatgaaaaggaccttgaagctatacgtaatgctgttctgcgctacaacattactcacccggttgtaaatgatggtgacatgtacttgtggagagaactgggggtgaactcttggcctacatttgttcttattggacccaacggaaaggttctagcacagatatcaggtgaaggtcatagaaaggatctggatgaagtaattggtgcagcactggaattttatgaagagaagaaactattacaaaatgacccccttcccttggcattggaaaaagacaaggatagtcgtttactaacttcgcctctcaaatttcctgggaaacttgctgttgatgtgcaaaacaatcgattattcatatcagacagtaatcataatcgaattgtggtgaccaacttggaagggcagttcatataccaagttgggagttctgaggaaggattgcttgatggcccatttgatgctgccctatttaaccgccctcaaggtattgcttacaattcaaaaaggaatatcttatacgttgcagacactgagaaccacgctctgcgagaaattaattttgtggacgagactgtgagaacactagctggaaatgggacgaaaggatctgattacagaggaggaggacaaggaacaaaccaggtcctaaattcaccatgggatgtatgctacgatcccgcagaggaggccgtgtatattgcaatggctgggcaacaccagatctggaagcacaatttacatgatggaataaccaaagttattagcggtgatggctatgagaggaatctgaatggctcaagaaatgcatgagttacttgttgctgatagtgaaagtagttccattcgagttgttaatctgaagacaggaggctcaagattgctg

SEQ ID NO: 1496 - DNA, 3583 bp, Zea Mays
atgaccaggcgtccttgtgggctgtggctgtacaccttgtccatggtggacgagagttccgccaggatcctgtcgacggcagccttgaagcggagagcggacgcgagcggcgctcacactcagagtcacagtcaccaacaaactgccagcgcaccaccaacaaaccctaattattccattccccaccggcgaccgcatctagcggtccagtgtagcccaagcggcagccggcaggcgcccagcagcagcattgcaggttgcagcaaagcgagcgagagtgagacagagctcacaagcctaacaccctctctccttcacctcccacatgcgctgatgcgccgcaagaagcacttggaccggggtggcggcggacgcggcggtggcacggagctcttcatctgcttcacctcccggccctccgccgcctccgccgctcctgtcgccggcggcagcgcgcagtcttccctccgcccctccagctcctccaagctcctcagccccggccgcggtagtgccagcgcaagcggagctgagacagtgccggccccccctctgcacccctcactcagccgccgcctccgcaacagcggcagcctcaagggcggccagtccccaatgttcccgtccgggtccaccggcggtggccgccgcagccggggtggattcgaacctgccgagccgtcctctcccaaggtcacctgcatcggccaagtccgcgtcaagggcggtaagcgcaagcccaagcacacctcagccgccactctgcactcctgctccagacgcggcggagtcgggagcgcagaggtcagctttcgccgcgccggcgacgaccgggacggaccccagagcaagaaccagggctgggtgtaccagatcccggtcaacatctgcgaggcactcaagacatttggctcctgcggtggccgctcgctctgctcgccgtctcggcatggcggagccggcgagcggggcgcactccccaccgatgcaaactgtggcaagaagcggcggcagggcgctcctgctgggggtagctggctgtgcggtgctgccgtggcgaggtgccttctggcgatccaggaggaggacgacgacgaggtcggcaacggcaagggagctgcagttgtgccggcagaagagatgaggacatcggaagtggggctcgtcatggaagggtgggatgtcgaggaggagaaggctgtgatgatgggggatgtggaggtggagaagaaagatgagatcttggtagtggggaaggaagaagaggggagagtaagtgtctgcatccccccgaggaatgcactgctgctaatgcgctgccggtcagacccagttcgcatggctgctcttgccacccgcttctgggggtctccagctgcagctaccgtggagcaggtggacaatgaggtggctgggtgcctcaacgacaatgaggaagaagaagaaaaggaagaggaggctgaggctgagccactggagtgcaaagatggagctcgctgttcagctgtttctgtcaaagacttgaaatgtgaagagtgtggttctgatgaaaatgatggcgctgaagcaggggagataaatcaagaaaaggcagaagctgaagagagttctaaatgtggagatctagtggaagaaaaggagggtgcatcatgcagagtaggggtggaggaagcacaaattgttcggaaagatgccgagttggaggttcctttgggagaagttacagagatggaaaaccaagggccggacatggtggagttggtggtcagtgaggaagaagttccaggacatgagaaagttgacgaagagatgatggggaggagatcaatcaacagctattctccctcggcaactctgaaagaggaccgcaccaaattgcgacggttgagtagcaggatgtgtgttagcactagtagcagggcctcatcatccagtgatagggttggcaggcgacacagcttctcagctgagatggaggcacggcggtctagcttctcgagcttgaaggattcaaggagagctagtttctccattgatagagatggccggaggtggagcttctcaattgaacaggagcatcttgttgcgcagcctaaggtgctgatggcatccagaaaggggaagaagacgtcttctgaggcagagtcagaaaaggattgtgatgttgttgctccaaacagtgcagaggaaggtcaagaatcctatgacgatggaaaggaagaagacactactgagaatgtagcggaagaaggaaaaacaaagtctgcggaagcgaaccaggaagtagagaaagtagaaactagagcagaagagtgtgaaggtgggacagtaccagtgatacataggaggaagaagagtggtgagttaccagattgcctcctgttgatgatgtatgagccgaagctctccatggaggtctccaaggagacatgggtctgcagcaccgatttcgtccattggaagtcttaccagggcaagaataaccgcaatcactggcaacagaaggcttctgctgctggaacagtggagactaaggaaaaggagaatgctgaaggcaccaccattgcgaatgatgtacaagagagcaaagatccatcaacggtgaactcagctgtgcccatgccatgtccagttgtccagaagacaccaccactcaaaccagctaccacagaacagaagctgaagctggagttgccgccagttaccaatgcggcagcctatgctccatttgttctgaaaaggtgcaagtcagagccgatgcgatcatcggcgcgtttggcacccgatgcttgcttctggaaggaccgccatcggccgctgaatgcggctggagttgggttctgatccgtgccagacagctgctggaatgtgacatttagttaggatctggatgaagtaattggtgcagcactggaattttatgaagagaagaaactattacaaaatgacccccttcccttggcattggaaaaagacaaggatagtcgtttactaacttcgcctctcaaatttcctgggaaacttgctgttgatgtgcaaaacaatcgattattcatatcagacagtaatcataatcgaattgtggtgaccaacttggaagggcagttcatataccaagttgggagttctgaggaaggattgcttgatggcccatttgatgctgccctatttaaccgccctcaaggtattgcttacaattcaaaaaggaatatcttatacgttgcagacactgagaaccacgctctgcgagaaattaattttgtggacgagactgtgagaacactagctggaaatgggacgaaaggatctgattacagaggaggaggacaaggaacaaaccaggtcctaaattcaccatgggatgtatgctacgatcccgcagaggaggccgtgtatattgcaatggctgggcaacaccagatctggaagcacaatttacatgatggaataaccaaagttattagcggtgatggctatgagaggaatctgaatggctcaagaaatgcatgagttacttgttgctgatagtgaaagtagttccattcgagttgttaatctgaagacaggaggctcaagattgctg

SEQ ID NO: 1497 - DNA, 3986 bp, Zea Mays
atgaccaggcgtccttgtgggctgtggctgtacaccttgtccatggtggacgagagttccgccaggatcctgtcgacggcagccttgaagcggagagcggacgcgagcggcgctcacactcagagtcacagtcaccaacaaactgccagcgcaccaccaacaaaccctaattattccattccccaccggcgaccgcatctagcggtccagtgtagcccaagcggcagccggcaggcgcccagcagcagcattgcaggttgcagcaaagcgagcgagagtgagacagagctcacaagcctaacaccctctctccttcacctcccacatgcgctgatgcgccgcaagaagcacttggaccggggtggcggcggacgcggcggtggcacggagctcttcatctgcttcacctcccggccctccgccgcctccgccgctcctgtcgccggcggcagcgcgcagtcttccctccgcccctccagctcctccaagctcctcagccccggccgcggtagtgccagcgcaagcggagctgagacagtgccggccccccctctgcacccctcactcagccgccgcctccgcaacagcggcagcctcaagggcggccagtccccaatgttcccgtccgggtccaccggcggtggccgccgcagccggggtggattcgaacctgccgagccgtcctctcccaaggtcacctgcatcggccaagtccgcgtcaagggcggtaagcgcaagcccaagcacacctcagccgccactctgcactcctgctccagacgcggcggagtcgggagcgcagaggtcagctttcgccgcgccggcgacgaccgggacggaccccagagcaagaaccagggctgggtgtaccagatcccggtcaacatctgcgaggcactcaagacatttggctcctgcggtggccgctcgctctgctcgccgtctcggcatggcggagccggcgagcggggcgcactccccaccgatgcaaactgtggcaagaagcggcggcagggcgctcctgctgggggtagctggctgtgcggtgctgccgtggcgaggtgccttctggcgatccaggaggaggacgacgacgaggtcggcaacggcaagggagctgcagttgtgccggcagaagagatgaggacatcggaagtggggctcgtcatggaagggtgggatgtcgaggaggagaaggctgtgatgatgggggatgtggaggtggagaagaaagatgagatcttggtagtggggaaggaagaagaggggagagtaagtgtctgcatccccccgaggaatgcactgctgctaatgcgctgccggtcagacccagttcgcatggctgctcttgccacccgcttctgggggtctccagctgcagctaccgtggagcaggtggacaatgaggtggctgggtgcctcaacgacaatgaggaagaagaagaaaaggaagaggaggctgaggctgagccactggagtgcaaagatggagctcgctgttcagctgtttctgtcaaagacttgaaatgtgaagagtgtggttctgatgaaaatgatggcgctgaagcaggggagataaatcaagaaaaggcagaagctgaagagagttctaaatgtggagatctagtggaagaaaaggagggtgcatcatgcagagtaggggtggaggaagcacaaattgttcggaaagatgccgagttggaggttcctttgggagaagttacagagatggaaaaccaagggccggacatggtggagttggtggtcagtgaggaagaagttccaggacatgagaaagttgacgaagagatgatggggaggagatcaatcaacagctattctccctcggcaactctgaaagaggaccgcaccaaattgcgacggttgagtagcaggatgtgtgttagcactagtagcagggcctcatcatccagtgatagggttggcaggcgacacagcttctcagctgagatggaggcacggcggtctagcttctcgagcttgaaggattcaaggagagctagtttctccattgatagagatggccggaggtggagcttctcaattgaacaggagcatcttgttgcgcagcctaaggtgctgatggcatccagaaaggggaagaagacgtcttctgaggcagagtcagaaaaggattgtgatgttgttgctccaaacagtgcagaggaaggtcaagaatcctatgacgatggaaaggaagaagacactactgagaatgtagcggaagaaggaaaaacaaagtctgcggaagcgaaccaggaagtagagaaagtagaaactagagcagaagagtgtgaaggtgggacagtaccagtgatacataggaggaagaagagtggtgagttaccagattgcctcctgttgatgatgtatgagccgaagctctccatggaggtctccaaggagacatgggtctgcagcaccgatttcgtccattggaagtcttaccagggcaagaataaccgcaatcactggcaacagaaggcttctgctgctggaacagtggagactaaggaaaaggagaatgctgaaggcaccaccattgcgaatgatgtacaagagagcaaagatccatcaacggtgaactcagctgtgcccatgccatgtccagttgtccagaagacaccaccactcaaaccagctaccacagaacagaagctgaagctggagttgccgccagttaccaatgcggcagcctatgctccatttgttctgaaaaggtgcaagtcagagccgatgcgatcatcggcgcgtttggcacccgatgcttgcttctggaaggaccgccatcggccgctgaatgcggctggagttgggttctgatccgtgccagacagctgctggaatgtgacatttagttaggtagtgagtgagtttgcgagcctgttgtgtaatagtagcgagtggttctttgactgtgctttgtgctgttatgtgatgtgtggacaccaccaaataatggcatgctgttaagttactatatgggagaggttctttgatcctgctttgtgctgttatgtgatgcttaccatctagacacatgcatccacatgacggagccccagaatcttgtccaatatctggctctggataacatctgtttaaatatgcttaaattggtaaattattgctggtggttgctaatgccacagcttacccgatccacttcccttcacagtgtttgtccaactatgttatatgcatagctgaaggaggatctggatgaagtaattggtgcagcactggaattttatgaagagaagaaactattacaaaatgacccccttcccttggcattggaaaaagacaaggatagtcgtttactaacttcgcctctcaaatttcctgggaaacttgctgttgatgtgcaaaacaatcgattattcatatcagacagtaatcataatcgaattgtggtgaccaacttggaagggcagttcatataccaagttgggagttctgaggaaggattgcttgatggcccatttgatgctgccctatttaaccgccctcaaggtattgcttacaattcaaaaaggaatatcttatacgttgcagacactgagaaccacgctctgcgagaaattaattttgtggacgagactgtgagaacactagctggaaatgggacgaaaggatctgattacagaggaggaggacaaggaacaaaccaggtcctaaattcaccatgggatgtatgctacgatcccgcagaggaggccgtgtatattgcaatggctgggcaacaccagatctggaagcacaatttacatgatggaataaccaaagttattagcggtgatggctatgagaggaatctgaatggctcaagcgccaccagcacatcgtttgcacagccttctgggatttcattagcttttgaaatgcatgagttacttgttgctgatagtgaaagtagttccattcgagttgttaatctgaagacaggaggctcaagattgctg

SEQ ID NO: 1498 - DNA, 1199 bp, Zea Mays
gagcatttttaagtcagatacttttgtctcttcagtttggagattatgacgggactggctcagatgtgctacttcaacatcccttgggtgttgtttatgccaatgacaatcaagtatatatagctgattcctacaaccataagataaaaaagttagatcccgtcacaagaaaagttacaactattgctggaacggggagtgcaggatacagggatggtccaggcttgacagctcaactttctgaaccagcaggacttgttgaagttggagatggaaggcttcttgtagcagatacaaacaacaacacaatcagatatataactcttagtgacaaaggtgctgaggtgaagacactagagttgatcggagtacaaccgccatcaccaaaaccgaaggtgttgaaacgcctaagacggcgattatcggcagatacagatgttattaatgtcgatggtggttcttcaaaggaaggattcttgtctcttgcagttacagtacctgatggttaccatttctccaaggaagcccgcagtaaatttgatgtggaaacagagccgcctaatgcagttgagattgaaccagcgaacggttttctaaactcggaagggctggcatcactgaagttcagaaggatatcatcatccttgtcaatgggaaggataaactgcaaggtttactactgtaaagaagatgaagtttgtctctaccaatcgattgcttttgatgtcaaattccgtgaagaggcggaaccgaacccagcacaaattacgctatcctatactgtttcgccaagagataattcaggtagcacacaactactggctgctagaaagaatgccaaggtgtagtcagactcacggtgatttttttacttgcatcattgtattgattgtcaatttggccccaggcccacaatggcaagtgtttcaagattgacttctcctgtatgttgtatagcgacatgttgcttgtaacccagcttcattgtctcccctcagcacaacagtattaatggagtagtttattgtcagttcattggttgcttggaacaccgtatggagtccatttgttggaaccctgttaaccctaatgattgatgaatcgaacaattttattccaaacaaagagttgtggtgctttgcaaaacactgcctgcttgcctatctgcagcacaaaatctcttgacagtataacctttt

SEQ ID NO: 1499 - DNA, 1141 bp, Zea Mays
ctggctcagatgtgctacttcaacatcccttgggtgttgtttatgccaatgacaatcaagtatatatagctgattcctacaaccataagataaaaaagttagatcccgtcacaagaaaagttacaactattgctggaacggggagtgcaggatacagggatggtccaggcttgacagctcaactttctgaaccagcaggacttgttgaagttggagatggaaggcttcttgtagcagatacaaacaacaacacaatcagatatataactcttagtgacaaaggtgctgaggtgaagacactagagttgatcggagtacaaccgccatcaccaaaaccgaaggtgttgaaacgcctaagacggcgattatcggcagatacagatgttattaatgtcgatggtggttcttcaaaggaaggattcttgtctcttgcagttacagtacctgatggttaccatttctccaagcccgcagtaaatttgatgtggaaacagagccgcctaatgcagttgagattgaaccagcgaacggttttctaaactcggaagggctggcatcactgaagttcagaaggatatcatcatccttgtcaatgggaaggataaactgcaaggtttactactgtaaagaagatgaagtttgtctctaccaatcgattgcttttgatgtcaaattccgtgaagaggcggaaccgaacccagcacaaattacgctatcctatactgtttcgccaagagataattcaggtagcacacaactactggctgctagaaagaatgccaaggtgtagtcagactcacggtgatttttttacttgcatcattgtattgattgtcaatttggccccaggcccacaatggcaagtgtttcaagattgacttctcctgtatgttgtatagcgacatgttgcttgtaacccagcttcattgtctcccctcagcacaacagtattaatggagtagtttattgtcagttcattggttgcttggaacaccgtatggagtccatttgttggaaccctgttaaccctaatgattgatgaatcgaacaattttattccaaacaaagagttgtggtgctttgcaaaacactgcctgcttgcctatctgcagcacaaaatctcttgacagtataacctttt

SEQ ID NO: 1500 - DNA, 1099 bp, Zea Mays
ctggctcagatgtgctacttcaacatcccttgggtgttgtttatgccaatgacaatcaagtatatatagctgattcctacaaccataagataaaaaagttagatcccgtcacaagaaaagttacaactattgctggaacggggagtgcaggatacagggatggtccaggcttgacagctcaactttctgaaccagcaggacttgttgaagttggagatggaaggcttcttgtagcagatacaaacaacaacacaatcagatatataactcttagtgacaaaggtgctgaggtgaagacactagagttgatcggagtacaaccgccatcaccaaaaccgaaggtgttgaaacgcctaagacggcgattatcggcagatacagatgttattaatgtcgatggtggttcttcaaaggaaggattcttgtctcttgcagttacagtacctgatggttaccatttctccaagttgagattgaaccagcgaacggttttctaaactcggaagggctggcatcactgaagttcagaaggatatcatcatccttgtcaatgggaaggataaactgcaaggtttactactgtaaagaagatgaagtttgtctctaccaatcgattgcttttgatgtcaaattccgtgaagaggcggaaccgaacccagcacaaattacgctatcctatactgtttcgccaagagataattcaggtagcacacaactactggctgctagaaagaatgccaaggtgtagtcagactcacggtgatttttttacttgcatcattgtattgattgtcaatttggccccaggcccacaatggcaagtgtttcaagattgacttctcctgtatgttgtatagcgacatgttgcttgtaacccagcttcattgtctcccctcagcacaacagtattaatggagtagtttattgtcagttcattggttgcttggaacaccgtatggagtccatttgttggaaccctgttaaccctaatgattgatgaatcgaacaattttattccaaacaaagagttgtggtgctttgcaaaacactgcctgcttgcctatctgcagcacaaaatctcttgacagtataacctttt

SEQ ID NO: 1501 - DNA, 1137 bp, Zea Mays
ctcagatgtgctacttcaacatcccttgggtgttgtttatgccaatgacaatcaagtatatatagctgattcctacaaccataagataaaaaagttagatcccgtcacaagaaaagttacaactattgctggaacggggagtgcaggatacagggatggtccaggcttgacagctcaactttctgaaccagcaggacttgttgaagttggagatggcttcttgtagcagatacaaacaacaacacaatcagatatataactcttagtgacaaaggtgctgaggtgaagacactagagttgatcggagtacaaccgccatcaccaaaaccgaaggtgttgaaacgcctaagacggcgattatcggcagatacagatgttattaatgtcgatggtggttcttcaaaggaaggattcttgtctcttgcagttacagtacctgatggttaccatttctccaaggaagcccgcagtaaatttgatgtggaaacagagccgcctaatgcagttgagattgaaccagcgaacggttttctaaactcggaagggctggcatcactgaagttcagaaggatatcatcatccttgtcaatgggaaggataaactgcaaggtttactactgtaaagaagatgaagtttgtctctaccaatcgattgcttttgatgtcaaattccgtgaagaggcggaaccgaacccagcacaaattacgctatcctatactgtttcgccaagagataattcaggtagcacacaactactggctgctagaaagaatgccaaggtgtagtcagactcacggtgatttttttacttgcatcattgtattgattgtcaatttggccccaggcccacaatggcaagtgtttcaagattgacttctcctgtatgttgtatagcgacatgttgcttgtaacccagcttcattgtctcccctcagcacaacagtattaatggagtagtttattgtcagttcattggttgcttggaacaccgtatggagtccatttgttggaaccctgttaaccctaatgattgatgaatcgaacaattttattccaaacaaagagttgtggtgctttgcaaaacactgcctgcttgcctatctgcagcacaaaatctcttgacagtataacctttt

SEQ ID NO: 1502 - DNA, 1184 bp, Zea Mays
ctcagatgtgctacttcaacatcccttgggtgttgtttatgccaatgacaatcaagtatatatagctgattcctacaaccataagataaaaaagttagatcccgtcacaagaaaagttacaactattgctggaacggggagtgcaggatacagggatggtccaggcttgacagctcaactttctgaaccagcaggacttgttgaagttggagatggaaggcttcttgtagcagatacaaacaacaacacaatcagatatataactcttagtgacaaaggtgctgaggtgaagacactagagttgatcggagtacaaccgccatcaccaaaaccgaaggtgttgaaacgcctaagacggcgattatcggcagatacagatgttattaatgtcgatggtggttcttcaaaggaaggattcttgtctcttgcagttacagtacctgatggttaccatttctccaagcattcaacagtgcttgtattaaagttttttcgctgaggtgtaggaagcccgcagtaaatttgatgtggaaacagagccgcctaatgcagttgagattgaaccagcgaacggttttctaaactcggaagggctggcatcactgaagttcagaaggatatcatcatccttgtcaatgggaaggataaactgcaaggtttactactgtaaagaagatgaagtttgtctctaccaatcgattgcttttgatgtcaaattccgtgaagaggcggaaccgaacccagcacaaattacgctatcctatactgtttcgccaagagataattcaggtagcacacaactactggctgctagaaagaatgccaaggtgtagtcagactcacggtgatttttttacttgcatcattgtattgattgtcaatttggccccaggcccacaatggcaagtgtttcaagattgacttctcctgtatgttgtatagcgacatgttgcttgtaacccagcttcattgtctcccctcagcacaacagtattaatggagtagtttattgtcagttcattggttgcttggaacaccgtatggagtccatttgttggaaccctgttaaccctaatgattgatgaatcgaacaattttattccaaacaaagagttgtggtgctttgcaaaacactgcctgcttgcctatctgcagcacaaaatctcttgacagtataacctttt

SEQ ID NO: 1503 - DNA, 1211 bp, Zea Mays
cttgtactgattacagccattatataaaaaagttagatcccgtcacaagaaaagttacaactattgctggaacggggagtgcaggatacagggatggtccaggcttgacagctcaactttctgaaccagcaggacttgttgaagttggagatggaaggcttcttgtagcagatacaaacaacaacacaatcagatatataactcttagtgacaaaggtgctgaggtgaagacactagagttgatcggagtacaaccgccatcaccaaaaccgaaggtgttgaaacgcctaagacggcgattatcggcagatacagatgttattaatgtcgatggtggttcttcaaaggaaggattcttgtctcttgcagttacagtacctgatggttaccatttctccaaggtcatcaataaccataagacattgttttttcttatcttacttgcaagtttgcattattcatggtagtcactagtgactgtgtggtacagcattcaacagtgcttgtattaaagttttttcgctgaggtgtaggaagcccgcagtaaatttgatgtggaaacagagccgcctaatgcagttgagattgaaccagcgaacggttttctaaactcggaagggctggcatcactgaagttcagaaggatatcatcatccttgtcaatgggaaggataaactgcaaggtttactactgtaaagaagatgaagtttgtctctaccaatcgattgcttttgatgtcaaattccgtgaagaggcggaaccgaacccagcacaaattacgctatcctatactgtttcgccaagagataattcaggtagcacacaactactggctgctagaaagaatgccaaggtgtagtcagactcacggtgatttttttacttgcatcattgtattgattgtcaatttggccccaggcccacaatggcaagtgtttcaagattgacttctcctgtatgttgtatagcgacatgttgcttgtaacccagcttcattgtctcccctcagcacaacagtattaatggagtagtttattgtcagttcattggttgcttggaacaccgtatggagtccatttgttggaaccctgttaaccctaatgattgatgaatcgaacaattttattccaaacaaagagttgtggtgctttgcaaaacactgcctgcttgcctatctgcagcacaaaatctcttgacagtataacctttt

SEQ ID NO: 1504 - DNA, 1061 bp, Zea Mays
atgttgcaaataaaaaagttagatcccgtcacaagaaaagttacaactattgctggaacggggagtgcaggatacagggatggtccaggcttgacagctcaactttctgaaccagcaggacttgttgaagttggagatggcttcttgtagcagatacaaacaacaacacaatcagatatataactcttagtgacaaaggtgctgaggtgaagacactagagttgatcggagtacaaccgccatcaccaaaaccgaaggtgttgaaacgcctaagacggcgattatcggcagatacagatgttattaatgtcgatggtggttcttcaaaggaaggattcttgtctcttgcagttacagtacctgatggttaccatttctccaaggaagcccgcagtaaatttgatgtggaaacagagccgcctaatgcagttgagattgaaccagcgaacggttttctaaactcggaagggctggcatcactgaagttcagaaggatatcatcatccttgtcaatgggaaggataaactgcaaggtttactactgtaaagaagatgaagtttgtctctaccaatcgattgcttttgatgtcaaattccgtgaagaggcggaaccgaacccagcacaaattacgctatcctatactgtttcgccaagagataattcaggtagcacacaactactggctgctagaaagaatgccaaggtgtagtcagactcacggtgatttttttacttgcatcattgtattgattgtcaatttggccccaggcccacaatggcaagtgtttcaagattgacttctcctgtatgttgtatagcgacatgttgcttgtaacccagcttcattgtctcccctcagcacaacagtattaatggagtagtttattgtcagttcattggttgcttggaacaccgtatggagtccatttgttggaaccctgttaaccctaatgattgatgaatcgaacaattttattccaaacaaagagttgtggtgctttgcaaaacactgcctgcttgcctatctgcagcacaaaatctcttgacagtataacctttt

SEQ ID NO: 1505 - DNA, 1108 bp, Zea Mays
atgttgcaaataaaaaagttagatcccgtcacaagaaaagttacaactattgctggaacggggagtgcaggatacagggatggtccaggcttgacagctcaactttctgaaccagcaggacttgttgaagttggagatggaaggcttcttgtagcagatacaaacaacaacacaatcagatatataactcttagtgacaaaggtgctgaggtgaagacactagagttgatcggagtacaaccgccatcaccaaaaccgaaggtgttgaaacgcctaagacggcgattatcggcagatacagatgttattaatgtcgatggtggttcttcaaaggaaggattcttgtctcttgcagttacagtacctgatggttaccatttctccaagcattcaacagtgcttgtattaaagttttttcgctgaggtgtaggaagcccgcagtaaatttgatgtggaaacagagccgcctaatgcagttgagattgaaccagcgaacggttttctaaactcggaagggctggcatcactgaagttcagaaggatatcatcatccttgtcaatgggaaggataaactgcaaggtttactactgtaaagaagatgaagtttgtctctaccaatcgattgcttttgatgtcaaattccgtgaagaggcggaaccgaacccagcacaaattacgctatcctatactgtttcgccaagagataattcaggtagcacacaactactggctgctagaaagaatgccaaggtgtagtcagactcacggtgatttttttacttgcatcattgtattgattgtcaatttggccccaggcccacaatggcaagtgtttcaagattgacttctcctgtatgttgtatagcgacatgttgcttgtaacccagcttcattgtctcccctcagcacaacagtattaatggagtagtttattgtcagttcattggttgcttggaacaccgtatggagtccatttgttggaaccctgttaaccctaatgattgatgaatcgaacaattttattccaaacaaagagttgtggtgctttgcaaaacactgcctgcttgcctatctgcagcacaaaatctcttgacagtataacctttt

SEQ ID NO: 1506 - DNA, 817 bp, Zea Mays
agtccagcccacataaccacaccaactctccccaatccagcagccctcgagtctggtcccccacccctcagcgcgacgaaggtaagatgttcctgcggaggatcctgaccggcgggggcggcctggcggccctgagggcggcgcgcgccgtgaaggagacgacggggatcgtgggccttgaggtggtgcctaacgcgcgagaggttctgatctgccaggaggaggaggactggaagcgcatcgaggaccgaatcggatgcgggcaggtcgaggagctcatcgaggaggccgaggacgagctcaagctcatcgctaaaatgattgaatgggatccatggggtgttcccgatgactacgaatgtgaggtgattgaagacgacaccccaattcctaagcatgttcctcagcaccggcctgttgctcttcctgaggagttcttcaaggcactagatgctgtcaaatctgatcctgctcttcaaggcgatgctcctcctcaagtgaaggcgtaaggatggctgttcctggctaacgtcatttcacattttgccgcggtgggtagggactggtttcttgtgtcatttgccagcaatgcgcttgctctgagcagaataaatttctggtgagtaccatcaaagtgtgaatttgaacttagtgattcggcacagtaaacttgttgcccatgaaatactcgatgccctgaacatcgtttgttttgacgttataatcgatgttgacgaaatatttgatgctagctggagttcattgtctggtgctggcttgtgaatcaggccgtggtgcaacggccgtgagagccgtg

SEQ ID NO: 1507 - DNA, 2029 bp, Zea Mays
tcttaaacccctagactgctgacatttttatcccttgctatttcgtcatcaagcacgcccgcccgcagctcgcatcgtctaccctgcgcggctgcgcctagggtttaaccactcacagcagccgccgtgactctcgaaccatgtcagcgccgccgtcgctcaagcccccagcaacctccgcagcggcctatccgcgggcgtccgccgccccgagagccaccgggattcgcggcgcctgtgctcttccaactcggcgcctccaatgctcagcctccgccgccgtcgccggagcttccactgagatggctgatgccccgctggactgggctggaaggtcgctggaggagttgcgcagcttgccggaccacgacacgttctgcctgatggcgctctcgccgctggacgggcggtacgaccgcttcgttaaagagctgatgcctttcttcagcgagttcggcctaatcagataccgcgttctcatcgagatcaagtggttattgaaactttctcaaattcctgagatcactgaggtgcctcagttcagcaaggaagcccaagccttcttgattgctattattgagaatttttgcattgatgatgcaaaagaaataaagaaaatcgagaaagtaaccaaccatgatgtgaaagccgtcgagtactttctgaagcaaaggtgtcggagttcttccattttggctgtacctctgaagatatcaacaatttgtcacatgcattggctctgaaagagggggtaaatagagttatgttccctgccatgattgacatatgcacagcattatgttccttggcgacacaaaattcaggctaccctatgttggctcgaactcatgggcagccagcatcaccaacaactgtgggaaaggagatggcaaacttcgcggccagattatctgatataggaaagagtttctcagaggtgaagatactagggaaatttgctggcgctgttggcaattacaatgctgatgtggttgcatatcctgaagttgactggcctaaggtggcagaagagtttgttaggtccttgggtttgcagcttaatccctatgttactcagatcgagcctcatgattacatatcaaagctcttcaatctattcacccagttcaacaatgtgttgactgattttgatagagacatgtggtcctatatatcattaggctacttcaagcagataccaaaggctggtgaagttggttcttccaccatgcctcataaaatcaaccccattgattttgaaaatagtgatggtaatttatgtctggcgaattctgtattatctggtataagcatgaaactgccaatatcccggatgcagcgtgacctgacagactcaactgttttgagaaacttgggtatgggattgggtcattctctattggcttacaaggccaccatacgtggaatcagcaaggttcaggtgaatgaagcgcgtttagctgaagacttggagcaaacttgggaggtccttgctgagccaatacagacagtgatgcgaagatatggaatacctgaaccttatgagaagctgaaggaacttacgagaggccaagctgtcaccaaggacagcatgcagcaattcattgatggtctagacataccgggggaggttcgagcaaaactttcgaagctaacccctcattcttatactgggctagcggaggatttggcaagatacatcgagaagtgggttgatcttgaatctggatttcaaatcaagtgaccttcctttttaaaaggataatcttctccacatttttttctttttgacaacgacggagaaaaaaaataacagacgggtgcgtcgtggcctctaattgtcgaccaagatgatttacgtggttctcattaatgatatttttggcacatgtaaaatgcgcctcaaggaattatgctaactgtatgttggaggtaatttaacgagctaaaaaagttgcttgctgggtttcttatgagtacggagttgttttgcaacgcctagtgcgagaagctaaaaaaatgctttgtg

SEQ ID NO: 1508 - DNA, 2010 bp, Zea Mays
cgtcatcaagcacgcccgcccgcagctcgcatcgtctaccctgcgcggctgcgcctagggtttaaccactcacagcagccgccgtgactctcgaaccatgtcagcgccgccgtcgctcaagcccccagcaacctccgcagcggcctatccgcgggcgtccgccgccccgagagccaccgggattcgcggcgcctgtgctcttccaactcggcgcctccaatgctcagcctccgccgccgtcgccggagcttccactgagatggctgatgccccgctggactgggctggaaggtcgctggaggagttgcgcagcttgccggaccacgacacgttctgcctgatggcgctctcgccgctggacgggcggtacgaccgcttcgttaaagagctgatgcctttcttcagcgagttcggcctaatcagataccgcgttctcatcgagatcaagtggttattgaaactttctcaaattcctgagatcactgaggtgcctcagttcagcaaggaagcccaagccttcttgattgctattattgagaatttttgcattgatgatgcaaaagaaataaagaaaatcgagaaagtaaccaaccatgatgtgaaagccgtcgagtactttctgaagcaaaggtgcagctccaatccagagattgctaaggtgtcggagttcttccattttggctgtacctctgaagatatcaacaatttgtcacatgcattggctctgaaagagggggtaaatagagttatgttccctgccatgattgacatatgcacagcattatgttccttggcgacacaaaattcaggctaccctatgttggctcgaactcatgggcagcatcaccaacaactgtgggaaaggagatggcaaacttcgcggccagattatctgatataggaaagagtttctcagaggtgaagatactagggaaatttgctggcgctgttggcaattacaatgctgatgtggttgcatatcctgaagttgactggcctaaggtggcagaagagtttgttaggtccttgggtttgcagcttaatccctatgttactcagatcgagcctcatgattacatatcaaagctcttcaatctattcacccagttcaacaatgtgttgactgattttgatagagacatgtggtcctatatatcattaggctacttcaagcagataccaaaggctggtgaagttggttcttccaccatgcctcataaaatcaaccccattgattttgaaaatagtgatggtaatttatgtctggcgaattctgtattatctggtataagcatgaaactgccaatatcccggatgcagcgtgacctgacagactcaactgttttgagaaacttgggtatgggattgggtcattctctattggcttacaaggccaccatacgtggaatcagcaaggttcaggtgaatgaagcgcgtttagctgaagacttggagcaaacttgggaggtccttgctgagccaatacagacagtgatgcgaagatatggaatacctgaaccttatgagaagctgaaggaacttacgagaggccaagctgtcaccaaggacagcatgcagcaattcattgatggtctagacataccgggggaggttcgagcaaaactttcgaagctaacccctcattcttatactgggctagcggaggatttggcaagatacatcgagaagtgggttgatcttgaatctggatttcaaatcaagtgaccttcctttttaaaaggataatcttctccacatttttttctttttgacaacgacggagaaaaaaaataacagacgggtgcgtcgtggcctctaattgtcgaccaagatgatttacgtggttctcattaatgatatttttggcacatgtaaaatgcgcctcaaggaattatgctaactgtatgttggaggtaatttaacgagctaaaaaagttgcttgctgggtttcttatgagtacggagttgttttgcaacgcctagtgcgagaagctaaaaaaatgctttgtg

SEQ ID NO: 1509 - DNA, 2838 bp, Zea Mays
agccattaggcgcctcggcctcacgctctcgttctcgtggacctgcacctgctatacaaaattcccaaatatagatcgaacgacccccgcggccctgccccagaaacaaagctagggtttgcctcccaaccctcctcccgttctcccgcctcctcctgtgaaccgcgcgagccaaggaccgcccgtcgtctctcgccgccatggggacggagcggaagcggaaggtgagcctgttcgacgtggtcgacgagacgtccgtctccgccaagctgcgcgccgcctccaacggtgccgccgccaccgcgactgggggcaacccgtctgtcaaccggtggaacgggcggccctacacggcacggtacttcgatatcctcgagaagcgccgtacgctccccgtgtggcagcagaaggaggagttcctccgctccctccgcgacaaccagaccctcatcctcgtcggcgaaactggaagcgggaagacaactcagatcccccaatttgttcttgagacggaaggcttgggtaaccgttccatggttgcctgcactcagcctcggagggtcgcagcaatgtcagtctccaggcgtgtggcggaggagatggatgttactattggggaagaagtgggttatagcattcgatttgaggattgcagcagccacaaaactgttctcaaatatttgacagatggtatgcttctgagagaagcaatggcagacccacttttagagaagtacaaggtgattgttcttgatgaggctcatgagaggactttagcaacagatgttctgtttgggcttctgaaggaagttctaaaaaatagaccagatttgaagcttgttgttatgagtgctaccctcgaagcagagaaattccagggttacttcaatggtgcacccttgatgaaggtgcctgggagacttcatccagttgagatattttacacccaagaaccagagagggactacctagaggctgctatcaggacggttatgcaaatacatatgtgtgaacctgctggtgatatccttgtattccttacaggagaagaggagattgaggatgcatgccggaaaatcaacaaggaaactaataatatgggagatcaggttggcccagttaaagtcgtgcctttgtactccacactgcccccagccatgcagcagaagatttttgaacctgctcctgccccattgaaggaaggaggtcctcctggaaggaaaattgttgtgtccaccaacattgctgaaacatccttaactatagatggcatagtttatgtgatagacccggggttttccaaacagaaagtttacaacccaagaataagggtggaatcccttctggtgtcacccatttctaaggcaagtgctcatcagagagctggtcgtgctggacgaacacaacccgggaagtgttttaggctatacacggagaagagttttaatgaggatttgcaaccacagacatacccagaaattcttcggtcgaacctggcaaatacagttcttaccttgaagaaacttggaattgatgatttagtgcattttgactttatggatcctccagcaccagaaactctaatgagggccttagaagttttgaactatttgggtgcactagatgatgaaggtaatctgacacagttaggtgagatgatgagcgagtttcccctggatccacaaatgtcgaagatgctcgtcatcagtccaaaatacaactgttcgaatgaaatcttatcagtatctgccatgctgtcagataattgctgtttgttgaatggtatcgtctcgcctctttgcatctgctgaccaccgtggacctcgtctgttattaccatattctttctctagcacccaattgcttcctccggcctagggatgctcaaaaggctgctgatgaggcgaaggctcgatttggccacattgacggggaccatctgacgcttctgaatgtataccatgcatacaaacaaaacaatgaagatccccagtggtgttacgagaactttgtcaattcaagagcacttaagtctgcagacaatgtcagacaacagcttgttcgcatcatgactagattcaacctcaagatgtgcagcacggatttcaatagccgtgagtactatgtcaatatcaggaaagccatgcttgcggggtatttcatgcaggtcgctcacctggaacgaactggacattacctgactgtaaaagataaccaggtcgtccatcttcatccctccaattgtatggaccataaaccagagtgggtcatctataatgaatatgtcttgaccaccaggaatttcattcgcacagtcaccgatatccgtggggactggctaattgatattgcgccacattactatgatctgagcaatttcccgtcatgtgaggccaagcgtgttcttgagaggctgtataacaagcgagagagggaaagagctgcaaatagaggctgaggttgatacttccacaaacctggtgctctgtaattccaccgcaggtctatccagagcccgtatacgagctttggttatcacagatagctgtcccatttgtcttaggcaaatgcgttagcatgatgtctcctacacaccctaatatctattgtctcatcagcatgatcattatgtacacaacctcgagaaattctttagcatctcaattagttgtgattcagattaattgtgtgacagtctgtttttgtatgcatcagacgtttatgttttgtgtttctatgtggttaattggttaccctttggaatgaaaatccactgaatttggtttattagcttacctggggctaagcctacgtcctgttgcaggaggaagttgttaa

SEQ ID NO: 1510 - DNA, 2829 bp, Zea Mays
aaaattcccaaatatagatcgaacgacccccgcggccctgccccagaaacaaagctagggtttgcctcccaaccctcctcccgttctcccgcctcctcctgtgaaccgcgcgagccaaggaccgcccgtcgtctctcgccgccatggggacggagcggaagcggaaggtgagcctgttcgacgtggtcgacgagacgtccgtctccgccaagctgcgcgccgcctccaacggtgccgccgccaccgcgactgggggcaacccgtctgtcaaccggtggaacgggcggccctacacggcacggtacttcgatatcctcgagaagcgccgtacgctccccgtgtggcagcagaaggaggagttcctccgctccctccgcgacaaccagaccctcatcctcgtcggcgaaactggaagcgggaagacaactcagatcccccaatttgttcttgagacggaaggcttgggtaaccgttccatggttgcctgcactcagcctcggagggtcgcagcaatgtcagtctccaggcgtgtggcggaggagatggatgttactattggggaagaagtgggttatagcattcgatttgaggattgcagcagccacaaaactgttctcaagtattctgatctaatcctgttctgttgaacactattgcttcctatcagatatttgacagatggtatgcttctgagagaagcaatggcagacccacttttagagaagtacaaggtgattgttcttgatgaggctcatgagaggactttagcaacagatgttctgtttgggcttctgaaggaagttctaaaaaatagaccagatttgaagcttgttgttatgagtgctaccctcgaagcagagaaattccagggttacttcaatggtgcacccttgatgaaggtgcctgggagacttcatccagttgagatattttacacccaagaaccagagagggactacctagaggctgctatcaggacggttatgcaaatacatatgtgtgaacctgctggtgatatccttgtattccttacaggagaagaggagattgaggatgcatgccggaaaatcaacaaggaaactaataatatgggagatcaggttggcccagttaaagtcgtgcctttgtactccacactgcccccagccatgcagcagaagatttttgaacctgctcctgccccattgaaggaaggaggtcctcctggaaggaaaattgttgtgtccaccaacattgctgaaacatccttaactatagatggcatagtttatgtgatagacccggggttttccaaacagaaagtttacaacccaagaataagggtggaatcccttctggtgtcacccatttctaaggcaagtgctcatcagagagctggtcgtgctggacgaacacaacccgggaagtgttttaggctatacacggagaagagttttaatgaggatttgcaaccacagacatacccagaaattcttcggtcgaacctggcaaatacagttcttaccttgaagaaacttggaattgatgatttagtgcattttgactttatggatcctccagcaccagaaactctaatgagggccttagaagttttgaactatttgggtgcactagatgatgaaggtaatctgacacagttaggtgagatgatgagcgagtttcccctggatccacaaatgtcgaagatgctcgtcatcagtccaaaatacaactgttcgaatgaaatcttatcagtatctgccatgctgtcagataattgctgtttgttgaatggtatcgtctcgcctctttgcatctgctgaccaccgtggacctcgtctgttattaccatattctttctctagcacccaattgcttcctccggcctagggatgctcaaaaggctgctgatgaggcgaaggctcgatttggccacattgacggggaccatctgacgcttctgaatgtataccatgcatacaaacaaaacaatgaagatccccagtggtgttacgagaactttgtcaattcaagagcacttaagtctgcagacaatgtcagacaacagcttgttcgcatcatgactagattcaacctcaagatgtgcagcacggatttcaatagccgtgagtactatgtcaatatcaggaaagccatgcttgcggggtatttcatgcaggtcgctcacctggaacgaactggacattacctgactgtaaaagataaccaggtcgtccatcttcatccctccaattgtatggaccataaaccagagtgggtcatctataatgaatatgtcttgaccaccaggaatttcattcgcacagtcaccgatatccgtggggactggctaattgatattgcgccacattactatgatctgagcaatttcccgtcatgtgaggccaagcgtgttcttgagaggctgtataacaagcgagagagggaaagagctgcaaatagaggctgaggttgatacttccacaaacctggtgctctgtaattccaccgcaggtctatccagagcccgtatacgagctttggttatcacagatagctgtcccatttgtcttaggcaaatgcgttagcatgatgtctcctacacaccctaatatctattgtctcatcagcatgatcattatgtacacaacctcgagaaattctttagcatctcaattagttgtgattcagattaattgtgtgacagtctgtttttgtatgcatcagacgtttatgttttgtgtttctatgtggttaattggttaccctttggaatgaaaatccactgaatttggtttattagcttacctggggctaagcctacgtcctgttgcaggaggaagttgttaa

SEQ ID NO: 1511 - DNA, 3124 bp, Zea Mays
cccaaatatagatcgaacgacccccgcggccctgccccagaaacaaagctagggtttgcctcccaaccctcctcccgttctcccgcctcctcctgtgaaccgcgcgagccaaggaccgcccgtcgtctctcgccgccatggggacggagcggaagcggaaggtgagcctgttcgacgtggtcgacgagacgtccgtctccgccaagctgcgcgccgcctccaacggtgccgccgccaccgcgactgggggcaacccgtctgtcaaccggtggaacgggcggccctacacggcacggtacttcgatatcctcgagaagcgccgtacgctccccgtgtggcagcagaaggaggagttcctccgctccctccgcgacaaccagaccctcatcctcgtcggcgaaactggaagcgggaagacaactcagatcccccaatttgttcttgagacggaaggcttgggtaaccgttccatggttgcctgcactcagcctcggagggtcgcagcaatgtcagtctccaggcgtgtggcggaggagatggatgttactattggggaagaagtgggttatagcattcgatttgaggattgcagcagccacaaaactgttctcaaatatttgacagatggtatgcttctgagagaagcaatggcagacccacttttagagaagtacaaggtgattgttcttgatgaggctcatgagaggactttagcaacagatgttctgtttgggcttctgaaggaagttctaaaaaatagaccagatttgaagcttgttgttatgagtgctaccctcgaagcagagaaattccagggttacttcaatggtgcacccttgatgaaggtgcctgggagacttcatccagttgagatattttacacccaagaaccagagagggactacctagaggctgctatcaggacggttatgcaaatacatatgtgtgaacctgctggtgatatccttgtattccttacaggagaagaggagattgaggatgcatgccggaaaatcaacaaggaaactaataatatgggagatcaggttggcccagttaaagtcgtgcctttgtactccacactgcccccagccatgcagcagaagatttttgaacctgctcctgccccattgaaggaaggaggtcctcctggaaggaaaattgttgtgtccaccaacattgctgaaacatccttaactatagatggcatagtttatgtgatagacccggggttttccaaacagaaagtttacaacccaagaataagggtggaatcccttctggtgtcacccatttctaaggcaagtgctcatcagagagctggtcgtgctggacgaacacaacccgggaagtgttttaggctatacacggagaagagttttaatgaggatttgcaaccacagacatacccagaaattcttcggtcgaacctggcaaatacagttcttaccttgaagaaacttggaattgatgatttagtgcattttgactttatggatcctccagcaccagaaactctaatgagggccttagaagttttgaactatttgggtgcactagatgatgaaggtaatctgacacagttaggtgagatgatgagcgagtttcccctggatccacaaatgtcgaagatgctcgtcatcagtccaaaatacaactgttcgaatgaaatcttatcagtatctgccatgctgtcaggtatgttagttgtcacagaaggttaactgattgcatttctacaaattatcttatctatatgtttatctggactactttgcttgtcagttctgttcaagtgaagtgccaggtttctattatactccctccgttcttttttatttgtcgcggtttagttcaaaaactaactagcgtgcgacaaattttcgagaacggaggtagtagcatgtgagcttgcatgcatgctactgcatgtgcacgtagcatcattttcttgtgcatttctttaatgtgctgtcatcagcaactgtcattcacctggcttcatgagctattggtcgaaatgatcatacagtttaggctgatgcagataattgctgtttgttgaatggtatcgtctcgcctctttgcatctgctgaccaccgtggacctcgtctgttattaccatattctttctctagcacccaattgcttcctccggcctagggatgctcaaaaggctgctgatgaggcgaaggctcgatttggccacattgacggggaccatctgacgcttctgaatgtataccatgcatacaaacaaaacaatgaagatccccagtggtgttacgagaactttgtcaattcaagagcacttaagtctgcagacaatgtcagacaacagcttgttcgcatcatgactagattcaacctcaagatgtgcagcacggatttcaatagccgtgagtactatgtcaatatcaggaaagccatgcttgcggggtatttcatgcaggtcgctcacctggaacgaactggacattacctgactgtaaaagataaccaggtcgtccatcttcatccctccaattgtatggaccataaaccagagtgggtcatctataatgaatatgtcttgaccaccaggaatttcattcgcacagtcaccgatatccgtggggactggctaattgatattgcgccacattactatgatctgagcaatttcccgtcatgtgaggccaagcgtgttcttgagaggctgtataacaagcgagagagggaaagagctgcaaatagaggctgaggttgatacttccacaaacctggtgctctgtaattccaccgcaggtctatccagagcccgtatacgagctttggttatcacagatagctgtcccatttgtcttaggcaaatgcgttagcatgatgtctcctacacaccctaatatctattgtctcatcagcatgatcattatgtacacaacctcgagaaattctttagcatctcaattagttgtgattcagattaattgtgtgacagtctgtttttgtatgcatcagacgtttatgttttgtgtttctatgtggttaattggttaccctttggaatgaaaatccactgaatttggtttattagcttacctggggctaagcctacgtcctgttgcaggaggaagttgttaa

SEQ ID NO: 1512 - DNA, 1634 bp, Zea Mays
gatcccacccccctcccttcccccgtcgccaccgcgcgcacctccgggcgccgcccccgcacctccctctcccacacgtcgtgatcgcccccgaagcggagacccctgctttgacggcgctgaggccctcctgctcttcctcgccaccgcctcgacgtcgcgcctaagcacctcggcagccaccacacgtgcctcgccctgccacggcgctgcagccagagccaggcgctcctgcacggaattcaggggatggaggccactggtgcacgtgccactcaccaccaccaagatggacgctggggagatggaggatgtgcaggcccccgcggccgtccaggttgtcaaaccagttgattccttcagcagcaagggacattgaagacacccagatcatactaccgacagaaaaaataattacggatgaagcaaggttcttgtgtcaattctctaggcggtgaactctggtgcaaattcgtacatttgctatggctgtgcttcaaattgctaacaatatttgttatttcagtaaaccagaaatacttcaagacgtgcccaaggaaacaaaaaaaaggtgtcgtcaatgctgttgaggcgcttcttaatcaagagaactattcaaaatccacccatatgcctgataacatgcaacaaccagagactcaaaattgtcataagaaataagactacatgtttttgctatgcatttgatgcctatagatctgaagctgccgaaaaaggacttgtaggattgggaaggacagtctttttacttttgccaggcatgtgaagacaacctatgagatggggttaactgatattttgcagaaactcaaaaggctatgaattgcagttctggccatttttttgctatggtgaaaagatttcagtcgttttctcagatgtctttctcaagaatgggccaaggttgcggtgacttggtcttgacacttttagtaaggaagctgcagaatgctcttacttctcttgacaattttccagttataatgagccaccacttcaagctaaggagcagtattgccgatatctacaaggcactcaacaattactccatgtatccgattagacctcgtgttgctattataatgggatctcagtctaatcttcctatgatgaaagttgctgagagggtttcaaaagagttcaacatacattgtgaggtttgatatctgaaatctctgctcacgtgccaagtcaaacttgagaagagggtaacgttgttaatgcctgattttttcagcaaactattgtttctgcacactgtactacagagtggatgatgtagtcttcgaagaaaatttgtgatcgatctcttaagttacaagaacaatttgtaccgatatatcatcctgcaaacatacaacgaagacttatcaatatcgctaaaaataattaaattagtgtacggttgtcgactatcattaaaaaatttatattgacactttagaaataatttgtccgatattgataatgtttgttcgacatcagttcgatctatttggatcgacgtatttataataatattacatatttatatcgtcaatataatattagtgttacattgctattttatcaaaggattttgcatatcataataatatttgttgttctgtatc

SEQ ID NO: 1513 - DNA, 2070 bp, Zea Mays
gatcccacccccctcccttcccccgtcgccaccgcgcgcacctccgggcgccgcccccgcacctccctctcccacacgtcgtgatcgcccccgaagcggagacccctgctttgacggcgctgaggccctcctgctcttcctcgccaccgcctcgacgtcgcgcctaagcacctcggcagccaccacacgtgcctcgccctgccacggcgctgcagccagagccaggcgctcctgcacggaattcaggggatggaggccactggtgcacgtgccactcaccaccaccaagatggacgctggggagatggaggatgtgcaggcccccgcggccgtccaggttgtcaaaccagttgattccttcagcagcaagggacattgaagacacccagatcatactaccgacagaaaaaataattacggatgaagcaaggttcttgtgtcaattctctaggcggtgaactctggtgcaaattcgtacatttgctatggctgtgcttcaaattgctaacaatatttgttatttcagtaaaccagaaatacttcaagacgtgcccaaggaaacaaaaaaaaggtataaaataacctgtgaaaggattgcgttattacattccttgaatacaggcattggcaagttagaccttacatgtaaataataccaaaattgtttattctgaatggacatattgttttttattacccgtggcagcttcttggctgatttattatttacaaaggatcaccatgtgttgatctcactactaaagataatcgagattctcatgcaaaagcttcctaatgtattcctttgcttctttatcaaggaaggtgtcgtcaatgctgttgaggcgcttcttaatcaagagaactattcaaaatccacccatatgcctgataacatgcaacaaccagagactcaaaattgtcataagaaataagactacatgtttttgctatgcatttgatgcctatagatctgaagctgccgaaaaaggacttgtaggattgggaaggacagtctttttacttttgccaggcatgtgaagacaacctatgagatggggttaactgatattttgcagaaactcaaaaggctatgaattgcagttctggccatttttttgctatggtgaaaagatttcagtcgttttctcagatgtctttctcaagaatgggccaaggttgcggtgacttggtcttgacacttttagtaaggaagctgcagaatgctcttacttctcttgacaattttccagttataatgagccaccacttcaagctaaggagcagtattgccgatatctacaaggcactcaacaattactccatgtatccgagtaagattcaagaaatacgaagatgaaactaaattgtcaatatatgatagtgttgtgaatgtggtgtaatgccttctcttaatcatggttcatagccgacaacaattttcgttatattacgaggacttttaattacaattacattttattgtattttatatccttttgtatttaggagctttttataatcgtggcaaagggcagtgacaactctattatctgctatcttgttgcgaaaacaattcataattagacctcgtgttgctattataatgggatctcagtctaatcttcctatgatgaaagttgctgagagggtttcaaaagagttcaacatacattgtgaggtttgatatctgaaatctctgctcacgtgccaagtcaaacttgagaagagggatgtagtcttcgaagaaaatttgtgatcgatctcttaagttacaagaacaatttgtaccgatatatcatcctgcaaacatacaacgaagacttatcaatatcgctaaaaataattaaattagtgtacggttgtcgactatcattaaaaaatttatattgacactttagaaataatttgtccgatattgataatgtttgttcgacatcagttcgatctatttggatcgacgtatttataataatattacatatttatatcgtcaatataatattagtgttacattgctattttatcaaaggattttgcatatcataataatatttgttgttctgtatc

SEQ ID NO: 1514 - DNA, 1817 bp, Zea Mays
gatcccacccccctcccttcccccgtcgccaccgcgcgcacctccgggcgccgcccccgcacctccctctcccacacgtcgtgatcgcccccgaagcggagacccctgctttgacggcgctgaggccctcctgctcttcctcgccaccgcctcgacgtcgcgcctaagcacctcggcagccaccacacgtgcctcgccctgccacggcgctgcagccagagccaggcgctcctgcacggaattcaggggatggaggccactggtgcacgtgccactcaccaccaccaagatggacgctggggagatggaggatgtgcaggcccccgcggccgtccaggttgtcaaaccagttgattccttcagcagcaagggacattgaagacacccagatcatactaccgacagaaaaaataattacggatgaagcaaggttcttgtgtcaattctctaggcggtgaactctggtgcaaattcgtacatttgctatggctgtgcttcaaattgctaacaatatttgttatttcagtaaaccagaaatacttcaagacgtgcccaaggaaacaaaaaaaaggtataaaataacctgtgaaaggattgcgttattacattccttgaatacaggcattggcaagttagaccttacatgtaaataataccaaaattgtttattctgaatggacatattgttttttattacccgtggcagcttcttggctgatttattatttacaaaggatcaccatgtgttgatctcactactaaagataatcgagattctcatgcaaaagcttcctaatgtattcctttgcttctttatcaaggaaggtgtcgtcaatgctgttgaggcgcttcttaatcaagagaactattcaaaatccacccatatgcctgataacatgcaacaaccagagactcaaaattgtcataagaaataagactacatgtttttgctatgcatttgatgcctatagatctgaagctgccgaaaaaggacttgtaggattgggaaggacagtctttttacttttgccaggcatgtgaagacaacctatgagatggggttaactgatattttgcagaaactcaaaaggctatgaattgcagttctggccatttttttgctatggtgaaaagatttcagtcgttttctcagatgtctttctcaagaatgggccaaggttgcggtgacttggtcttgacacttttagtaaggaagctgcagaatgctcttacttctcttgacaattttccagttataatgagccaccacttcaagctaaggagcagtattgccgatatctacaaggcactcaacaattactccatgtatccgaacctcgtgttgctattataatgggatctcagtctaatcttcctatgatgaaagttgctgagagggtttcaaaagagttcaacatacattgtgaggtttgatatctgaaatctctgctcacgtgccaagtcaaacttgagaagagggatgtagtcttcgaagaaaatttgtgatcgatctcttaagttacaagaacaatttgtaccgatatatcatcctgcaaacatacaacgaagacttatcaatatcgctaaaaataattaaattagtgtacggttgtcgactatcattaaaaaatttatattgacactttagaaataatttgtccgatattgataatgtttgttcgacatcagttcgatctatttggatcgacgtatttataataatattacatatttatatcgtcaatataatattagtgttacattgctattttatcaaaggattttgcatatcataataatatttgttgttctgtatc

SEQ ID NO: 1515 - DNA, 2523 bp, Zea Mays
gatcccacccccctcccttcccccgtcgccaccgcgcgcacctccgggcgccgcccccgcacctccctctcccacacgtcgtgatcgcccccgaagcggagacccctgctttgacggcgctgaggccctcctgctcttcctcgccaccgcctcgacgtcgcgcctaagcacctcggcagccaccacacgtgcctcgccctgccacggcgctgcagccagagccaggcgctcctgcacggaattcaggggatggaggccactggtgcacgtgccactcaccaccaccaagatggacgctggggagatggaggatgtgcaggcccccgcggccgtccaggttgtcaaaccagttgattccttcagcagcaagggacattgaagacacccagatcatactaccgacagaaaaaataattacggatgaagcaaggttcttgtgtcaattctctaggcggtgaactctggtgcaaattcgtacatttgctatggctgtgcttcaaattgctaacaatatttgttatttcagtaaaccagaaatacttcaagacgtgcccaaggaaacaaaaaaaaggtataaaataacctgtgaaaggattgcgttattacattccttgaatacaggcattggcaagttagaccttacatgtaaataataccaaaattgtttattctgaatggacatattgttttttattacccgtggcagcttcttggctgatttattatttacaaaggatcaccatgtgttgatctcactactaaagataatcgagattctcatgcaaaagcttcctaatgtattcctttgcttctttatcaaggaaggtgtcgtcaatgctgttgaggcgcttcttaatcaagagaactattcaaaatccacccatatgcctgataacatgcaacaaccagagactcaaaattgtcataagaaataagactacatgtttttgctatgcatttgatgcctatagatctgaagctgccgaaaaaggacttgtaggattgggaaggacagtctttttacttttgccaggcatgtgaagacaacctatgagatggggttaactgatattttgcagaaactcaaaaggctatgaattgcagttctggccatttttttgctatggtgaaaagatttcagtcgttttctcagatgtctttctcaagaatgggccaaggttgcggtgacttggtcttgacacttttagtaaggaagctgcagaatgctcttacttctcttgacaattttccagttataatgagccaccacttcaagctaaggagcagtattgccgatatctacaaggcactcaacaattactccatgtatccgagtaagattcaagaaatacgaagatgaaactaaattgtcaatatatgatagtgttgtgaatgtggtgtaatgccttctcttaatcatggttcatagccgacaacaattttcgttatattacgaggacttttaattacaattacattttattgtattttatatccttttgtatttaggagctttttataatcgtggcaaagggcagtgacaactctattatctgctatcttgttgcgaaaacaattcataagtaagactattttttgttatgataatttgttacttattcttgtttctttttaaattacagttttctctgtacttttaaatttcgaaaatacaaagaatgtttgtgaaccttcagggaaaacatatgccatgttgttgaaactcctgctgaggtatctagcaaaataaagaagttagctactatcgttcatggtctggttcttgtttcactattgttgcttttgttgatggtcatgacggacatgctaatttatttacaatttacacatgtcgctatgtaactattcacgcttttgacctgatttcacatctttatttgaagcagcactttatttttcatttcagctgatttgtggacatgctgaaatgatgtaatctttgctgcagttagacctcgtgttgctattataatgggatctcagtctaatcttcctatgatgaaagttgctgagagggtttcaaaagagttcaacatacattgtgaggtttgatatctgaaatctctgctcacgtgccaagtcaaacttgagaagagggtaacgttgttaatgcctgattttttcagcaaactattgtttctgcacactgtactacagagtggatgatgtagtcttcgaagaaaatttgtgatcgatctcttaagttacaagaacaatttgtaccgatatatcatcctgcaaacatacaacgaagacttatcaatatcgctaaaaataattaaattagtgtacggttgtcgactatcattaaaaaatttatattgacactttagaaataatttgtccgatattgataatgtttgttcgacatcagttcgatctatttggatcgacgtatttataataatattacatatttatatcgtcaatataatattagtgttacattgctattttatcaaaggattttgcatatcataataatatttgttgttctgtatc

SEQ ID NO: 1516 - DNA, 1975 bp, Zea Mays
gatcccacccccctcccttcccccgtcgccaccgcgcgcacctccgggcgccgcccccgcacctccctctcccacacgtcgtgatcgcccccgaagcggagacccctgctttgacggcgctgaggccctcctgctcttcctcgccaccgcctcgacgtcgcgcctaagcacctcggcagccaccacacgtgcctcgccctgccacggcgctgcagccagagccaggcgctcctgcacggaattcaggggatggaggccactggtgcacgtgccactcaccaccaccaagatggacgctggggagatggaggatgtgcaggcccccgcggccgtccaggttgtcaaaccagttgattccttcagcagcaagggacattgaagacacccagatcatactaccgacagaaaaaataattacggatgaagcaaggttcttgtgtcaattctctaggtacattagcagcattacaaactaacaactcataacaatatttgtgttatgaaatatggaagtgagcttactgtacaaattgtgcaggcggtgaactctggtgcaaattcgtacatttgctatggctgtgcttcaaattgctaacaatatttgttatttcagtaaaccagaaatacttcaagacgtgcccaaggaaacaaaaaaaaggtataaaataacctgtgaaaggattgcgttattacattccttgaatacaggcattggcaagttagaccttacatgtaaataataccaaaattgtttattctgaatggacatattgttttttattacccgtggcagcttcttggctgatttattatttacaaaggatcaccatgtgttgatctcactactaaagataatcgagattctcatgcaaaagcttcctaatgtattcctttgcttctttatcaaggaaggtgtcgtcaatgctgttgaggcgcttcttaatcaagagaactattcaaaatccacccatatgcctgataacatgcaacaaccagagactcaaaattgtcataagaaataagactacatgtttttgctatgcatttgatgcctatagatctgaagctgccgaaaaaggacttgtaggattgggaaggacagtctttttacttttgccaggcatgtgaagacaacctatgagatggggttaactgatattttgcagaaactcaaaaggctatgaattgcagttctggccatttttttgctatggtgaaaagatttcagtcgttttctcagatgtctttctcaagaatgggccaaggttgcggtgacttggtcttgacacttttagtaaggaagctgcagaatgctcttacttctcttgacaattttccagttataatgagccaccacttcaagctaaggagcagtattgccgatatctacaaggcactcaacaattactccatgtatccgattagacctcgtgttgctattataatgggatctcagtctaatcttcctatgatgaaagttgctgagagggtttcaaaagagttcaacatacattgtgaggtttgatatctgaaatctctgctcacgtgccaagtcaaacttgagaagagggtaacgttgttaatgcctgattttttcagcaaactattgtttctgcacactgtactacagagtggatgatgtagtcttcgaagaaaatttgtgatcgatctcttaagttacaagaacaatttgtaccgatatatcatcctgcaaacatacaacgaagacttatcaatatcgctaaaaataattaaattagtgtacggttgtcgactatcattaaaaaatttatattgacactttagaaataatttgtccgatattgataatgtttgttcgacatcagttcgatctatttggatcgacgtatttataataatattacatatttatatcgtcaatataatattagtgttacattgctattttatcaaaggattttgcatatcataataatatttgttgttctgtatc

SEQ ID NO: 1517 - DNA, 2456 bp, Zea Mays
gatcccacccccctcccttcccccgtcgccaccgcgcgcacctccgggcgccgcccccgcacctccctctcccacacgtcgtgatcgcccccgaagcggagacccctgctttgacggcgctgaggccctcctgctcttcctcgccaccgcctcgacgtcgcgcctaagcacctcggcagccaccacacgtgcctcgccctgccacggcgctgcagccagagccaggcgctcctgcacggaattcaggggatggaggccactggtgcacgtgccactcaccaccaccaagatggacgctggggagatggaggatgtgcaggcccccgcggccgtccaggttgtcaaaccagttgattccttcagcagcaagggacattgaagacacccagatcatactaccgacagaaaaaataattacggatgaagcaaggttcttgtgtcaattctctaggcggtgaactctggtgcaaattcgtacatttgctatggctgtgcttcaaattgctaacaatatttgttatttcagtaaaccagaaatacttcaagacgtgcccaaggaaacaaaaaaaaggtataaaataacctgtgaaaggattgcgttattacattccttgaatacaggcattggcaagttagaccttacatgtaaataataccaaaattgtttattctgaatggacatattgttttttattacccgtggcagcttcttggctgatttattatttacaaaggatcaccatgtgttgatctcactactaaagataatcgagattctcatgcaaaagcttcctaatgtattcctttgcttctttatcaaggaaggtgtcgtcaatgctgttgaggcgcttcttaatcaagagaactattcaaaatccacccatatgcctgataacatgcaacaaccagagactcaaaattgtcataagaaataagactacatgtttttgctatgcatttgatgcctatagatctgaagctgccgaaaaaggacttgtaggattgggaaggacagtctttttacttttgccaggcatgtgaagacaacctatgagatggggttaactgatattttgcagaaactcaaaaggctatgaattgcagttctggccatttttttgctatggtgaaaagatttcagtcgttttctcagatgtctttctcaagaatgggccaaggttgcggtgacttggtcttgacacttttagtaaggaagctgcagaatgctcttacttctcttgacaattttccagttataatgagccaccacttcaagctaaggagcagtattgccgatatctacaaggcactcaacaattactccatgtatccgagtaagattcaagaaatacgaagatgaaactaaattgtcaatatatgatagtgttgtgaatgtggtgtaatgccttctcttaatcatggttcatagccgacaacaattttcgttatattacgaggacttttaattacaattacattttattgtattttatatccttttgtatttaggagctttttataatcgtggcaaagggcagtgacaactctattatctgctatcttgttgcgaaaacaattcataagtaagactattttttgttatgataatttgttacttattcttgtttctttttaaattacagttttctctgtacttttaaatttcgaaaatacaaagaatgtttgtgaaccttcagggaaaacatatgccatgttgttgaaactcctgctgaggtatctagcaaaataaagaagttagctactatcgttcatggtctggttcttgtttcactattgttgcttttgttgatggtcatgacggacatgctaatttatttacaatttacacatgtcgctatgtaactattcacgcttttgacctgatttcacatctttatttgaagcagcactttatttttcatttcagctgatttgtggacatgctgaaatgatgtaatctttgctgcagttagacctcgtgttgctattataatgggatctcagtctaatcttcctatgatgaaagttgctgagagggtttcaaaagagttcaacatacattgtgaggtttgatatctgaaatctctgctcacgtgccaagtcaaacttgagaagagggatgtagtcttcgaagaaaatttgtgatcgatctcttaagttacaagaacaatttgtaccgatatatcatcctgcaaacatacaacgaagacttatcaatatcgctaaaaataattaaattagtgtacggttgtcgactatcattaaaaaatttatattgacactttagaaataatttgtccgatattgataatgtttgttcgacatcagttcgatctatttggatcgacgtatttataataatattacatatttatatcgtcaatataatattagtgttacattgctattttatcaaaggattttgcatatcataataatatttgttgttctgtatc

SEQ ID NO: 1518 - DNA, 2723 bp, Zea Mays
attttgaacgcatggggtaaatgcattcgagaactgtacagtttcgaaagtacagagaatgttttcggcgactgcaatactgcgaagtggccatccgtcggcaaagggccgacttcctgtgctcgttcctgtcatacctcgccaccatgcgcctcccgcccgtccgcttcctgccgtcgagctcaacgccggcggtagtggacgcgaacgcgcgcatcgctcggctggcacgcacggggaacatggagggcgcccgcgccacgttcgaggccatgccgctccgcaccaccgcctcctacaacgccctcctcgccggctacttccgcaatcacctccccgacgccgcgctccgcgtcttccaccgtatgcccacgcgggacctcgcctcctacaacgcgctcatctctggtctctccctgcgccgtcacaccctccccgatgccgccgcggcgctcgccaccatcccctacccgccctcggtcgtctccttcacatccctcctgcgtgggtatgtgcgccacggcctcctggctgacgccatacagctgttccgccaaatgcctgagcgtaaccacatatcgtacacggtgctgctcggtggcttcctcgacgccggccgtgttgacgaggctcgcaagttgtttgacgaaatgcccgcaaaggatgttgttgcgtggactgccatgctgtctgggtactgccaggttggccgggttgatgaggcgcgcactctatttgatgaaatgccaaagaggaatgttgtgtcgtggacagctatggtctctggctacgctcagaatgggcaggtgaaccttgcccggaagctgttcgaggtgatgcctgagcgaaatgaggtgtcgtggactgcaatgctatttgggtatatacaggctggccgcatagaggatgctgaggagctgtttaatgcaatgccagatcacccattggctgcctgcaatgggatgattgttgggtttgggcagcaggggatggtggatgctgccaagtcagtctttgacaggatgtgtgagagagatgatggaacatggagtgcaatcatcaaagcatatgaacagaatgaattcttgatggaggcactgtctacctttcgtgagatgttgcacattggaatccgtccaaactacccatcagtcatcagcatcctcaccgtatgcgcagcactggctgttcttgattatgggagggaagtgcatggtgcaatgctgaggcgctcctttgatatggacatctatgccgtgtcagcattaatcacaatgtacatcaaatgtggcaatttggataaggccaaaagggtctttcacatgtttgagcccaaagacgttgtgatgtggaactctatgatcactggttatgctcaacatgggttgggagaggaagcactccacatattcgatgacatgaggttggctgggatggtgcctgatggaattacatatattggggcccttacagcatgcagctacacaggaaaagttaaagaaggcagggatatttttaattctatgcgtacaaaatctggcatcaaacctggattagagcattatgcttgtatggttgatttgcttggtcgagctggacttgtggatgaagcactgtatttgataaagaccatgccagttgaaccagatgctgtcatctggggagctctaatgggagcctgtaggatgcacaagaatgctgagattgctgagatttctgctaagaagcttttagagctagagcctggaaatgctggaccatatgtcttgctctctcacatttatacatcctctggaagatgggaagatgcttctaatatgcggaaattcattagctcaagacatttgaacaaatcactcggctgtagttggatagaatacgacaagagggtgcatctcttcaaatcgggtgatgttttagcacatcaagagcatgctagtatccttaaaatgctggagaagttagatgggttgttgatggaatctggatactcagctgatggaagttttgtgcttcatgatatagatgatgagcaaaaaacgcatagcctacggtatcacagtgagaggcaggctgtggcatatggactattgaaaatcccagaagaattgcccatccgtgtcatgaaaaatctcagagtctgtgggactattggtgaggtgaatgctgtagtaaattccttgcttcatatcatctctttgatgagcctttcatttggagacacatggaggattatatttccgctgaagatgaggtacatccaggatcagcacatggtcaactgcaaatcctgttgtaacacagagcctctaatttcaacatgaacaatttatcttttgagttgatacattctggcgaagaaagctatgagatactagtacctggtatgatgcttggaatcatagatgtgaaatattgactggcagcattcatcttttcatcttaaagcacctcaccaagtttggcgaatagtcacagttcacaaaaagatggagaattgggtacactagtgtgccatctgccatgggatctgaacaactgcatattgtgcttttttgtgcaggttgccactggcaagattagacaattacttgcggggatcaagtatggaagttcacttacatttcttgtaacataactctactgccagcagtggaccaagggaagggaaggaaataaaacagcatcatatggaacccgtggcgaaaacgagagcatgacga

SEQ ID NO: 1519 - DNA, 3094 bp, Zea Mays
attttgaacgcatggggtaaatgcattcgagaactgtacagtttcgaaagtacagagaatgttttcggcgactgcaatactgcgaagtggccatccgtcggcaaagggccgacttcctgtgctcgttcctgtcatacctcgccaccatgcgcctcccgcccgtccgcttcctgccgtcgagctcaacgccggcggtagtggacgcgaacgcgcgcatcgctcggctggcacgcacggggaacatggagggcgcccgcgccacgttcgaggccatgccgctccgcaccaccgcctcctacaacgccctcctcgccggctacttccgcaatcacctccccgacgccgcgctccgcgtcttccaccgtatgcccacgcgggacctcgcctcctacaacgcgctcatctctggtctctccctgcgccgtcacaccctccccgatgccgccgcggcgctcgccaccatcccctacccgccctcggtcgtctccttcacatccctcctgcgtgggtatgtgcgccacggcctcctggctgacgccatacagctgttccgccaaatgcctgagcgtaaccacatatcgtacacggtgctgctcggtggcttcctcgacgccggccgtgttgacgaggctcgcaagttgtttgacgaaatgcccgcaaaggatgttgttgcgtggactgccatgctgtctgggtactgccaggttggccgggttgatgaggcgcgcactctatttgatgaaatgccaaagaggaatgttgtgtcgtggacagctatggtctctggctacgctcagaatgggcaggtgaaccttgcccggaagctgttcgaggtgatgcctgagcgaaatgaggtgtcgtggactgcaatgctatttgggtatatacaggctggccgcatagaggatgctgaggagctgtttaatgcaatgccagatcacccattggctgcctgcaatgggatgattgttgggtttgggcagcaggggatggtggatgctgccaagtcagtctttgacaggatgtgtgagagagatgatggaacatggagtgcaatcatcaaagcatatgaacagaatgaattcttgatggaggcactgtctacctttcgtgagatgttgcacattggaatccgtccaaactacccatcagtcatcagcatcctcaccgtatgcgcagcactggctgttcttgattatgggagggaagtgcatggtgcaatgctgaggcgctcctttgatatggacatctatgccgtgtcagcattaatcacaatgtacatcaaatgtggcaatttggataaggccaaaagggtctttcacatgtttgagcccaaagacgttgtgatgtggaactctatgatcactggttatgctcaacatgggttgggagaggaagcactccacatattcgatgacatgaggttggctgggatggtgcctgatggaattacatatattggggcccttacagcatgcagctacacaggaaaagttaaagaaggcagggatatttttaattctatgcgtacaaaatctggcatcaaacctggattagagcattatgcttgtatggttgatttgcttggtcgagctggacttgtggatgaagcactgtatttgataaagaccatgccagttgaaccagatgctgtcatctggggagctctaatgggagcctgtaggatgcacaagaatgctgagattgctgagatttctgctaagaagcttttagagctagagcctggaaatgctggaccatatgtcttgctctctcacatttatacatcctctggaagatgggaagatgcttctaatatgcggaaattcattagctcaagacatttgaacaaatcactcggctgtagttggatagaatacgacaagagggtgcatctcttcaaatcgggtgatgttttagcacatcaagagcatgctagtatccttaaaatgctggagaagttagatgggttgttgatggaatctggatactcagctgatggaagttttgtgcttcatgatatagatgatgagcaaaaaacgcatagcctacggtatcacagtgagaggcaggctgtggcatatggactattgaaaatcccagaagaattgcccatccgtgtcatgaaaaatctcagagtctgtgggactattggtgaggtgaatgctgtagtaaattccttgcttcatatcatctctttgatgagcctttcatttggagacacatggaggattatatttccgctgaagatgaggtacatccaggatcagcacatggtcaactgcaaatcctgttgtaacacagagcctctaatttcaacatgaacaatttatcttttgagttgatacattctggcgaagaaagctatgagatactagtacctggtatgatgcttggaatcatagatgtgaaatattgactggcagcattcatcttttcatcttaaagcacctcaccaagtttggcgaatagtcacagttcacaaaaagatggagaattgggtacactagtgtgccatctgccatgggatctgaacaactgcatattgtgcttttttgtgcaggttgccactggcaagattagacaattacttgcggggatcaagtatggaagttcacttacatttcttagccaagaaggccagaaaggttcacaaggatcacacgctggcacgggcgacgcaaagcctcgtcaaccgccccgtgaatctgcaagtatgacaaccgcgggcacgtattgctctagaacgctaccacaccagctcccagcgaagtggttgaggcatttcatcgagctaccaaccaaggaatacaaacaataccacaggcgctcgtggcgagtactcgccagggtgaagtgtaagttcgccaacgaggaccacgacggtgtcggagctgcggacgccgatacggcgagcctgggcgctgctcgcttccttggttctgcggtactcgatgactattgacttgcgtgctccctccgttagatcacctcgaccagttctggcattctgggaatgaggaagtgaagactaattgctcgtggcagcttgtgacggggaaaatggatagcgacggtgtaagctggacctgag

SEQ ID NO: 1520 - DNA, 3127 bp, Zea Mays
attttgaacgcatggggtaaatgcattcgagaactgtacagtttcgaaagtacagagaatgttttcggcgactgcaatactgcgaagtggccatccgtcggcaaagggccgacttcctgtgctcgttcctgtcatacctcgccaccatgcgcctcccgcccgtccgcttcctgccgtcgagctcaacgccggcggtagtggacgcgaacgcgcgcatcgctcggctggcacgcacggggaacatggagggcgcccgcgccacgttcgaggccatgccgctccgcaccaccgcctcctacaacgccctcctcgccggctacttccgcaatcacctccccgacgccgcgctccgcgtcttccaccgtatgcccacgcgggacctcgcctcctacaacgcgctcatctctggtctctccctgcgccgtcacaccctccccgatgccgccgcggcgctcgccaccatcccctacccgccctcggtcgtctccttcacatccctcctgcgtgggtatgtgcgccacggcctcctggctgacgccatacagctgttccgccaaatgcctgagcgtaaccacatatcgtacacggtgctgctcggtggcttcctcgacgccggccgtgttgacgaggctcgcaagttgtttgacgaaatgcccgcaaaggatgttgttgcgtggactgccatgctgtctgggtactgccaggttggccgggttgatgaggcgcgcactctatttgatgaaatgccaaagaggaatgttgtgtcgtggacagctatggtctctggctacgctcagaatgggcaggtgaaccttgcccggaagctgttcgaggtgatgcctgagcgaaatgaggtgtcgtggactgcaatgctatttgggtatatacaggctggccgcatagaggatgctgaggagctgtttaatgcaatgccagatcacccattggctgcctgcaatgggatgattgttgggtttgggcagcaggggatggtggatgctgccaagtcagtctttgacaggatgtgtgagagagatgatggaacatggagtgcaatcatcaaagcatatgaacagaatgaattcttgatggaggcactgtctacctttcgtgagatgttgcacattggaatccgtccaaactacccatcagtcatcagcatcctcaccgtatgcgcagcactggctgttcttgattatgggagggaagtgcatggtgcaatgctgaggcgctcctttgatatggacatctatgccgtgtcagcattaatcacaatgtacatcaaatgtggcaatttggataaggccaaaagggtctttcacatgtttgagcccaaagacgttgtgatgtggaactctatgatcactggttatgctcaacatgggttgggagaggaagcactccacatattcgatgacatgaggttggctgggatggtgcctgatggaattacatatattggggcccttacagcatgcagctacacaggaaaagttaaagaaggcagggatatttttaattctatgcgtacaaaatctggcatcaaacctggattagagcattatgcttgtatggttgatttgcttggtcgagctggacttgtggatgaagcactgtatttgataaagaccatgccagttgaaccagatgctgtcatctggggagctctaatgggagcctgtaggatgcacaagaatgctgagattgctgagatttctgctaagaagcttttagagctagagcctggaaatgctggaccatatgtcttgctctctcacatttatacatcctctggaagatgggaagatgcttctaatatgcggaaattcattagctcaagacatttgaacaaatcactcggctgtagttggatagaatacgacaagagggtgcatctcttcaaatcgggtgatgttttagcacatcaagagcatgctagtatccttaaaatgctggagaagttagatgggttgttgatggaatctggatactcagctgatggaagttttgtgcttcatgatatagatgatgagcaaaaaacgcatagcctacggtatcacagtgagaggcaggctgtggcatatggactattgaaaatcccagaagaattgcccatccgtgtcatgaaaaatctcagagtctgtgggactattggtgaggtgaatgctgtagtaaattccttgcttcatatcatctctttgatgagcctttcatttggagacacatggaggattatatttccgctgaagatgaggtacatccaggatcagcacatggtcaactgcaaatcctgttgtaacacagagcctctaatttcaacatgaacaatttatcttttgagttgatacattctggcgaagaaagctatgagatactagtacctggtatgatgcttggaatcatagatgtgaaatattgactggcagcattcatcttttcatcttaaagcacctcaccaagtttggcgaatagtcacagttcacaaaaagatggagaattgggtacactagtgtgccatctgccatgggatctgaacaactgcatattgtgcttttttgtgcaggttgccactggcaagattagacaattacttgcggggatcaagtatggaagttcacttacatttcttgtaacataactctactgccagcagtggaccaagagccaagaaggccagaaaggttcacaaggatcacacgctggcacgggcgacgcaaagcctcgtcaaccgccccgtgaatctgcaagtatgacaaccgcgggcacgtattgctctagaacgctaccacaccagctcccagcgaagtggttgaggcatttcatcgagctaccaaccaaggaatacaaacaataccacaggcgctcgtggcgagtactcgccagggtgaagtgtaagttcgccaacgaggaccacgacggtgtcggagctgcggacgccgatacggcgagcctgggcgctgctcgcttccttggttctgcggtactcgatgactattgacttgcgtgctccctccgttagatcacctcgaccagttctggcattctgggaatgaggaagtgaagactaattgctcgtggcagcttgtgacggggaaaatggatagcgacggtgtaagctggacctgag

SEQ ID NO: 1521 - DNA, 2941 bp, Zea Mays
cgtcggcaaagggccgacttcctgtgctcgttcctgtcatacctcgccaccatgcgcctcccgcccgtccgcttcctgccgtcgagctcaacgccggcggtagtggacgcgaacgcgcgcatcgctcggctggcacgcacggggaacatggagggcgcccgcgccacgttcgaggccatgccgctccgcaccaccgcctcctacaacgccctcctcgccggctacttccgcaatcacctccccgacgccgcgctccgcgtcttccaccgtatgcccacgcgggacctcgcctcctacaacgcgctcatctctggtctctccctgcgccgtcacaccctccccgatgccgccgcggcgctcgccaccatcccctacccgccctcggtcgtctccttcacatccctcctgcgtgggtatgtgcgccacggcctcctggctgacgccatacagctgttccgccaaatgcctgagcgtaaccacatatcgtacacggtgctgctcggtggcttcctcgacgccggccgtgttgacgaggctcgcaagttgtttgacgaaatgcccgcaaaggatgttgttgcgtggactgccatgctgtctgggtactgccaggttggccgggttgatgaggcgcgcactctatttgatgaaatgccaaagaggaatgttgtgtcgtggacagctatggtctctggctacgctcagaatgggcaggtgaaccttgcccggaagctgttcgaggtgatgcctgagcgaaatgaggtgtcgtggactgcaatgctatttgggtatatacaggctggccgcatagaggatgctgaggagctgtttaatgcaatgccagatcacccattggctgcctgcaatgggatgattgttgggtttgggcagcaggggatggtggatgctgccaagtcagtctttgacaggatgtgtgagagagatgatggaacatggagtgcaatcatcaaagcatatgaacagaatgaattcttgatggaggcactgtctacctttcgtgagatgttgcacattggaatccgtccaaactacccatcagtcatcagcatcctcaccgtatgcgcagcactggctgttcttgattatgggagggaagtgcatggtgcaatgctgaggcgctcctttgatatggacatctatgccgtgtcagcattaatcacaatgtacatcaaatgtggcaatttggataaggccaaaagggtctttcacatgtttgagcccaaagacgttgtgatgtggaactctatgatcactggttatgctcaacatgggttgggagaggaagcactccacatattcgatgacatgaggttggctgggatggtgcctgatggaattacatatattggggcccttacagcatgcagctacacaggaaaagttaaagaaggcagggatatttttaattctatgcgtacaaaatctggcatcaaacctggattagagcattatgcttgtatggttgatttgcttggtcgagctggacttgtggatgaagcactgtatttgataaagaccatgccagttgaaccagatgctgtcatctggggagctctaatgggagcctgtaggatgcacaagaatgctgagattgctgagatttctgctaagaagcttttagagctagagcctggaaatgctggaccatatgtcttgctctctcacatttatacatcctctggaagatgggaagatgcttctaatatgcggaaattcattagctcaagacatttgaacaaatcactcggctgtagttggatagaatacgacaagagggtgcatctcttcaaatcgggtgatgttttagcacatcaagagcatgctagtatccttaaaatgctggagaagttagatgggttgttgatggaatctggatactcagctgatggaagttttgtgcttcatgatatagatgatgagcaaaaaacgcatagcctacggtatcacagtgagaggcaggctgtggcatatggactattgaaaatcccagaagaattgcccatccgtgtcatgaaaaatctcagagtctgtgggactattggtgaggagacacatggaggattatatttccgctgaagatgaggtacatccaggatcagcacatggtcaactgcaaatcctgttgtaacacagagcctctaatttcaacatgaacaatttatcttttgagttgatacattctggcgaagaaagctatgagatactagtacctggtatgatgcttggaatcatagatgtgaaatattgactggcagcattcatcttttcatcttaaagcacctcaccaagtttggcgaatagtcacagttcacaaaaagatggagaattgggtacactagtgtgccatctgccatgggatctgaacaactgcatattgtgcttttttgtgcaggttgccactggcaagattagacaattacttgcggggatcaagtatggaagttcacttacatttcttagccaagaaggccagaaaggttcacaaggatcacacgctggcacgggcgacgcaaagcctcgtcaaccgccccgtgaatctgcaagtatgacaaccgcgggcacgtattgctctagaacgctaccacaccagctcccagcgaagtggttgaggcatttcatcgagctaccaaccaaggaatacaaacaataccacaggcgctcgtggcgagtactcgccagggtgaagtgtaagttcgccaacgaggaccacgacggtgtcggagctgcggacgccgatacggcgagcctgggcgctgctcgcttccttggttctgcggtactcgatgactattgacttgcgtgctccctccgttagatcacctcgaccagttctggcattctgggaatgaggaagtgaagactaattgctcgtggcagcttgtgacggggaaaatggatagcgacggtgtaagctggacctgag

SEQ ID NO: 1522 - DNA, 458 bp, Zea Mays
ctgaagcctgctcctggtcctcctcttggacaggtccttgctcggggatgagcacgtactctccatcggcaagattacaatctaatgaatgcaaggcgtaagatatatgcatgatatgatatgtgcttttagaaattacaactttaaaggggtatgatcttttgagtttaaacaagttaactttacttatgtaaaacccttgggtggtatacttggtaacttgggttaaacttagctaaggtaagtggtaggtttatttttgggtttctactgaattatttttaagtcttagggagaattgataagttctcaagttagactcattgggatgaggttcattccttccttccttttcttttattcttttaatgttttggagtaggtttgaactacaagttgcttttataaaacttcgaaaattctgcaaaaattacagtggcttgttactggtgtatgat

SEQ ID NO: 1523 - DNA, 2117 bp, Zea Mays
atacgagccccgcagcccccgtccccgtccccgtcctcctcctcttcttcccccttcctagcggcacggcaccaggcccgccctggtggcatctccgtaatttcgcgcctcttcgccgccaaggggtggggccgtgggggtggcaagaggaagaggtatgggcaacgccagcggccgcgaggaggacgctgcagctgttgacggcgacggcgccgacgtggaggacggcggaggggactcgtcggtccgctcgtcggagcgcgcctttccgccgtacggcagcgtaggagccaaccacgtgcggcgcgcgtgctcggtgggtgtcgtaggtggcggtggaggcgccggatcgccacccgggagtcctggccactcgctctcgccgcggatgttcgtgccccagcctaggaaggaggaagcagccatctatggtgcgagggagttgcaacccaaactgtctcagcaaaagataccagaattctcttgcaaagacacaagtcaggtggtccatagtttcagcctcttggtcacacagaagacatttctccgggtgatccaaacctcgttttgcaagcctattcgctgtccagcatcttttctgagtaactagccaaatgaaaaaccggcatttgggcggggcccatgatttccacaccatcttataatatgcaaaggaacttgagccaaggaaaaggcctttgtaagaagatttagccgaatatttgccatttgaggctaagctgaaaaggtgtttatcatctatgtcaagctgcagttcaaaatctgaaagcaaatcccagagacccctgtacctccactgcaaagggctgctgatgtaactccagtgttcaaccagatattgatgaatgatcaagaagaagaatatgatggcccccctcaaaaggaaattccttctttaattgtctggacccttggaggaaagaatgtatatgttgaaggatcatgggataactggaaatcaagaaaagccatgcaaaaatctgggaaagatcactctcttttgctggtactcccgtcaggagtttaccgatacagatttgttgtagatggagaaaggagatgccttcctgaccttccctgtgaaactgatgcaatgggcaatgcggttaaccttcttgatgttaatgattttgtcccagaaagtgttgagagcgtggtagaatttgagccaccgctttctccagactctagctacagtttccaggcacctgaggacaaggacttcgccaaggagccacctgctcttccagctcaactccatctcggcgtccttaactcacagaactcggaagaaagctgcgcgcggccgcagcacatagtcctcaatcacctcttcatagagaagggctggggcgcccaccccctggtggctctcggcctaacccacaggttcgagtccaaatatgtaaccctcgtcctgtacaaacccatcgaacgatagcaatagcccgcgcatgaagagcggaagttcaatgcttgacaactcactgcgggagcagcgatgaacagcgccgaggttgtacatgcttgtgaaagtggttgaggttcaggagtattttttttccgtgccctgcttgcagaacctctggtagtctggttgttagctgtacatgctgcgctatcatgatgttggccttctggtttgtttacagagagacaaggcgtccttacaatttttacatgtccgcttgtcgtcgtcgttcctctcccatcccatggcagattggcaggaatgaaatgtgttgaaatccacatgaatgttaggtgccggagatagatcaagggattcctagatttttatttgttttttgactggtcaagaagatgttgttgttatgtactaaactcaagaaatttttacaaatgagatactagtgttctcaggcccggagccatttttttttacaatgcccttatgcaacgcattcatggagtgagatttgccaaattctgcagaactctgcactattttttcttgaaagcgtctagacatttaggtagtagagtttctgtgattaatgacatcataaaattattatgattattgtgttttacaaaaaaaaaatataaactagatcatggcaatagaaaataaa

SEQ ID NO: 1524 - DNA, 3340 bp, Zea Mays
atacgagccccgcagcccccgtccccgtccccgtcctcctcctcttcttcccccttcctagcggcacggcaccaggcccgccctggtggcatctccgtaatttcgcgcctcttcgccgccaaggggtggggccgtgggggtggcaagaggaagaggtatgggcaacgccagcggccgcgaggaggacgctgcagctgttgacggcgacggcgccgacgtggaggacggcggaggggactcgtcggtccgctcgtcggagcgcgcctttccgccgtacggcagcgtaggagccaaccacgtgcggcgcgcgtgctcggtgggtgtcgtaggtggcggtggaggcgccggatcgccacccgggagtcctggccactcgctctcgccgcggatgttcgtgccccagaacgatgaggcaccttgaggaggatgacgagatagatgacgaactggatcagatcatggctcttatgatgggtcaatacaagaagaggaaaaatggccagcgtaaaaagcgtcgaggttcagtttttggacataaagttcatgaccggagtagacaagaacatgatagaaaattatttcaagattactttgctgaaaatccaacatatcccgagaagttttttcggcgtcgttttcggatgagttcctctcttttcaagcggatagctaaagccgtagagaagcatgatgaatactttgttcaagatagaaatgcagctggtgttctcggtttttcatgtctacagaaggtgacagcagcttttagacagctagcttatggtgttccagcagattatgttgatgagtacttgaggattggtgaaagcactgctattgagagcttacggaaatttgtcaaggctgtctgtgaggtttttggcccacaatacttgagagctccaaatgaagatgacacagctaggttacttagtattgccgaacaacgtggatttcctggaatgcttggtagtattgattgtatgcattggaagtggaagaattgtccaacagcttaccaaggcacatattgtggtcatgtgaaagaaccaactattatactagaggcagttgcgtctcatgatttatggatatggcatgcattctttggtctaccagggtcactcaatgatattaatgttttgcacagatctcatctttttgatagacttgttgaaggcaaagctccagcagtgaactacacaattaatgggcacaagtatgatatgggctactatctagcagatgggatctatccaaattggtcagcctttgtgaaatcaatcaaggctcctgcaaatgagaaggaccaaaattttactgctgcacaagagtcgctgaggaaagatgttgaacgtgcatttggtgtactgcaggctcgatttgccattgttcgaggtccagcaaggttttgggatgtagctacacttcggaacattatgaaagcatgcataataatgcataatatgataatagaagatgaaagagacgcaggtcgtcttgagccgccctatgagaagagcgacgctgagacaaatggttgggtttcacatgttggaacatcaaacttatcagcattcatcgacaagcacaaagatatagcccattctttctttctatggcttcatgcctaggaaggaggaagcagccatctatggtgcgagggagttgcaacccaaactgtctcagcaaaagataccagaattctcttgcaaagacacaagtcaggtggtccatagtttcagcctcttggtcacacagaagacatttctccgggtgatccaaacctcgttttgcaagcctattcgctgtccagcatcttttctgagtaactagccaaatgaaaaaccggcatttgggcggggcccatgatttccacaccatcttataatatgcaaaggaacttgagccaaggaaaaggcctttgtaagaagatttagccgaatatttgccatttgaggctaagctgaaaaggtgtttatcatctatgtcaagctgcagttcaaaatctgaaagcaaatcccagaggtgctggctaaagtttagctggggtggatccaaacagagcctaagtgtatgatattgatgaatgatcaagaagaagaatatgatggcccccctcaaaaggaaattccttctttaattgtctggacccttggaggaaagaatgtatatgttgaaggatcatgggataactggaaatcaagaaaagccatgcaaaaatctgggaaagatcactctcttttgctggtactcccgtcaggagtttaccgatacagatttgttgtagatggagaaaggagatgccttcctgaccttccctgtgaaactgatgcaatgggcaatgcggttaaccttcttgatgttaatgattttgtcccagaaagtgttgagagcgtggtagaatttgagccaccgctttctccagactctagctacagtttccaggcacctgaggacaaggacttcgccaaggagccacctgctcttccagctcaactccatctcggcgtccttaactcacagaactcggaagaaagctgcgcgcggccgcagcacatagtcctcaatcacctcttcatagagaagggctggggcgcccaccccctggtggctctcggcctaacccacaggttcgagtccaaatatgtaaccctcgtcctgtacaaacccatcgaacgatagcaatagcccgcgcatgaagagcggaagttcaatgcttgacaactcactgcgggagcagcgatgaacagcgccgaggttgtacatgcttgtgaaagtggttgaggttcaggagtattttttttccgtgccctgcttgcagaacctctggtagtctggttgttagctgtacatgctgcgctatcatgatgttggccttctggtttgtttacagagagacaaggcgtccttacaatttttacatgtccgcttgtcgtcgtcgttcctctcccatcccatggcagattggcaggaatgaaatgtgttgaaatccacatgaatgttaggtgccggagatagatcaagggattcctagatttttatttgttttttgactggtcaagaagatgttgttgttatgtactaaactcaagaaatttttacaaatgagatactagtgttctcaggcccggagccatttttttttacaatgcccttatgcaacgcattcatggagtgagatttgccaaattctgcagaactctgcactattttttcttgaaagcgtctagacatttaggtagtagagtttctgtgattaatgacatcataaaattattatgattattgtgttttacaaaaaaaaaatataaactagatcatggcaatagaaaataaa

SEQ ID NO: 1525 - DNA, 3119 bp, Zea Mays
cttgtgattgatgccaaccgacaagcgtcttttctctatgaaccaattttgctgccgtgcgcgtgcaatttcgtgaagttatttgtaagttgctcacttagtactttagtagcttaactactagtttgtgctcgaaatgcggcgaaacgtttttgcacccgtcagaacgcaaatgctaagagcaactccaagaaggggccctaaatttaggtcctaaattttgttttagggaccaatttattcgtaatttaattggttaactccaacagcagggcctcaaatgtagtgcttagcaactaattctgtttttcggctcgcgcgctctgttttcccgcgcgcgctctgcttcctgcccaaaatcacgattcccagctaccctccctcggatctccctcaaatccctagtgcacacacgaacgtatccatgttctagggcgccgtcgttcttccctacagagggtggcatccatctccgcggaagagggtgcgcagaccatcctgctgcaaaaggccaccgttcttcacgtacgctcgttctctgttctgtcagtgccacaagatatgtcagaccatgtgcgaacgatgaggcaccttgaggaggatgacgagatagatgacgaactggatcagatcatggctcttatgatgggtcaatacaagaagaggaaaaatggccagcgtaaaaagcgtcgaggttcagtttttggacataaagttcatgaccggagtagacaagaacatgatagaaaattatttcaagattactttgctgaaaatccaacatatcccgagaagttttttcggcgtcgttttcggatgagttcctctcttttcaagcggatagctaaagccgtagagaagcatgatgaatactttgttcaagatagaaatgcagctggtgttctcggtttttcatgtctacagaaggtgacagcagcttttagacagctagcttatggtgttccagcagattatgttgatgagtacttgaggattggtgaaagcactgctattgagagcttacggaaatttgtcaaggctgtctgtgaggtttttggcccacaatacttgagagctccaaatgaagatgacacagctaggttacttagtattgccgaacaacgtggatttcctggaatgcttggtagtattgattgtatgcattggaagtggaagaattgtccaacagcttaccaaggcacatattgtggtcatgtgaaagaaccaactattatactagaggcagttgcgtctcatgatttatggatatggcatgcattctttggtctaccagggtcactcaatgatattaatgttttgcacagatctcatctttttgatagacttgttgaaggcaaagctccagcagtgaactacacaattaatgggcacaagtatgatatgggctactatctagcagatgggatctatccaaattggtcagcctttgtgaaatcaatcaaggctcctgcaaatgagaaggaccaaaattttactgctgcacaagagtcgctgaggaaagatgttgaacgtgcatttggtgtactgcaggctcgatttgccattgttcgaggtccagcaaggttttgggatgtagctacacttcggaacattatgaaagcatgcataataatgcataatatgataatagaagatgaaagagacgcaggtcgtcttgagccgccctatgagaagagcgacgctgagacaaatggttgggtttcacatgttggaacatcaaacttatcagcattcatcgacaagcacaaagatatagcccattctttctttctatggcttcatgacccctgtacctccactgcaaagggctgctgatgtaactccagtgttcaaccagatattgatgaatgatcaagaagaagaatatgatggcccccctcaaaaggaaattccttctttaattgtctggacccttggaggaaagaatgtatatgttgaaggatcatgggataactggaaatcaagaaaagccatgcaaaaatctgggaaagatcactctcttttgctggtactcccgtcaggagtttaccgatacagatttgttgtagatggagaaaggagatgccttcctgaccttccctgtgaaactgatgcaatgggcaatgcggttaaccttcttgatgttaatgattttgtcccagaaagtgttgagagcgtggtagaatttgagccaccgctttctccagactctagctacagtttccaggcacctgaggacaaggacttcgccaaggagccacctgctcttccagctcaactccatctcggcgtccttaactcacagaactcggaagaaagctgcgcgcggccgcagcacatagtcctcaatcacctcttcatagagaagggctggggcgcccaccccctggtggctctcggcctaacccacaggttcgagtccaaatatgtaaccctcgtcctgtacaaacccatcgaacgatagcaatagcccgcgcatgaagagcggaagttcaatgcttgacaactcactgcgggagcagcgatgaacagcgccgaggttgtacatgcttgtgaaagtggttgaggttcaggagtattttttttccgtgccctgcttgcagaacctctggtagtctggttgttagctgtacatgctgcgctatcatgatgttggccttctggtttgtttacagagagacaaggcgtccttacaatttttacatgtccgcttgtcgtcgtcgttcctctcccatcccatggcagattggcaggaatgaaatgtgttgaaatccacatgaatgttaggtgccggagatagatcaagggattcctagatttttatttgttttttgactggtcaagaagatgttgttgttatgtactaaactcaagaaatttttacaaatgagatactagtgttctcaggcccggagccatttttttttacaatgcccttatgcaacgcattcatggagtgagatttgccaaattctgcagaactctgcactattttttcttgaaagcgtctagacatttaggtagtagagtttctgtgattaatgacatcataaaattattatgattattgtgttttacaaaaaaaaaatataaactagatcatggcaatagaaaataaa

SEQ ID NO: 1526 - DNA, 2596 bp, Zea Mays
gtacttgatcattttgttaccctcactgtacttgatcatttggatgtctgcaatgaaaagaacgatgaggcaccttgaggaggatgacgagatagatgacgaactggatcagatcatggctcttatgatgggtcaatacaagaagaggaaaaatggccagcgtaaaaagcgtcgaggttcagtttttggacataaagttcatgaccggagtagacaagaacatgatagaaaattatttcaagattactttgctgaaaatccaacatatcccgagaagttttttcggcgtcgttttcggatgagttcctctcttttcaagcggatagctaaagccgtagagaagcatgatgaatactttgttcaagatagaaatgcagctggtgttctcggtttttcatgtctacagaaggtgacagcagcttttagacagctagcttatggtgttccagcagattatgttgatgagtacttgaggattggtgaaagcactgctattgagagcttacggaaatttgtcaaggctgtctgtgaggtttttggcccacaatacttgagagctccaaatgaagatgacacagctaggttacttagtattgccgaacaacgtggatttcctggaatgcttggtagtattgattgtatgcattggaagtggaagaattgtccaacagcttaccaaggcacatattgtggtcatgtgaaagaaccaactattatactagaggcagttgcgtctcatgatttatggatatggcatgcattctttggtctaccagggtcactcaatgatattaatgttttgcacagatctcatctttttgatagacttgttgaaggcaaagctccagcagtgaactacacaattaatgggcacaagtatgatatgggctactatctagcagatgggatctatccaaattggtcagcctttgtgaaatcaatcaaggctcctgcaaatgagaaggaccaaaattttactgctgcacaagagtcgctgaggaaagatgttgaacgtgcatttggtgtactgcaggctcgatttgccattgttcgaggtccagcaaggttttgggatgtagctacacttcggaacattatgaaagcatgcataataatgcataatatgataatagaagatgaaagagacgcaggtcgtcttgagccgccctatgagaagagcgacgctgagacaaatggttgggtttcacatgttggaacatcaaacttatcagcattcatcgacaagcacaaagatatagcccattctttctttctatggcttcatgacccctgtacctccactgcaaagggctgctgatgtaactccagtgttcaaccagatattgatgaatgatcaagaagaagaatatgatggcccccctcaaaaggaaattccttctttaattgtctggacccttggaggaaagaatgtatatgttgaaggatcatgggataactggaaatcaagccatgcaaaaatctgggaaagatcactctcttttgctggtactcccgtcaggagtttaccgatacagatttgttgtagatggagaaaggagatgccttcctgaccttccctgtgaaactgatgcaatgggcaatgcggttaaccttcttgatgttaatgattttgtcccagaaagtgttgagagcgtggtagaatttgagccaccgctttctccagactctagctacagtttccaggcacctgaggacaaggacttcgccaaggagccacctgctcttccagctcaactccatctcggcgtccttaactcacagaactcggaagaaagctgcgcgcggccgcagcacatagtcctcaatcacctcttcatagagaagggctggggcgcccaccccctggtggctctcggcctaacccacaggttcgagtccaaatatgtaaccctcgtcctgtacaaacccatcgaacgatagcaatagcccgcgcatgaagagcggaagttcaatgcttgacaactcactgcgggagcagcgatgaacagcgccgaggttgtacatgcttgtgaaagtggttgaggttcaggagtattttttttccgtgccctgcttgcagaacctctggtagtctggttgttagctgtacatgctgcgctatcatgatgttggccttctggtttgtttacagagagacaaggcgtccttacaatttttacatgtccgcttgtcgtcgtcgttcctctcccatcccatggcagattggcaggaatgaaatgtgttgaaatccacatgaatgttaggtgccggagatagatcaagggattcctagatttttatttgttttttgactggtcaagaagatgttgttgttatgtactaaactcaagaaatttttacaaatgagatactagtgttctcaggcccggagccatttttttttacaatgcccttatgcaacgcattcatggagtgagatttgccaaattctgcagaactctgcactattttttcttgaaagcgtctagacatttaggtagtagagtttctgtgattaatgacatcataaaattattatgattattgtgttttacaaaaaaaaaatataaactagatcatggcaatagaaaataaa

SEQ ID NO: 1527 - DNA, 2102 bp, Zea Mays
aacatcgacactgaccagataattaatccaaagtttcccaacgacatgattgcggccattattccttaatctccatacagtactggacagtatgtgtagtacactacgctccacaagcgctttaattaacaaacaccttattaatacacatcagccagaaggcagcagcagtagtacaggaaggcacgcggctagcggccaccgcagcgcgcgcagcggagtgtgcagttcaactcggatactgccccaccccaccaccaccagtccacagcttttgtcgcctcccctagcaaagctcgcacgagatgaaaccctgagctgcccttgccatcgccgcggggagggccggagcgacaggggcgatgccgtcattatattgcgccctccacgcgcgcctccaattataatgccgcggcacgcccccacacgccgtgcttcgctgctcccgctcggctgaacaaacggctcagggaacacagaggctatgcagccaccgcagccgcagccggagcccgccgccaaccggcgggcaccctccacgtgctcccccgcacagaggcggagcggtggcattgggtgcatggccggcctcctccgcctcatctcgccgtaccaccggagccaccaccggaagcgcctcaccgccaagaacgcgccagcagcgcgggcctcccaagcaccgccacccccgccgtcctcgtcgtcgcccagaaagaaggcggcggcccagcagccttcagcttcgcccgcggcttctccgacgaagccgacggtgcagcagctgatgacgaccgctgttcggcggcggcgctcctgcgacgcgccgcggagcccgacgatcgcgccggagcaccggcgctccagctgcgacagcccccgggcgccgccgccggccatcatcgcccgcctcatgggcctggaggagtccgcgccgtcctcgcccgccgcgacgctgctgcggccagtcgtcccgagtcgtccgcctccgccgccgccggcggcggcgccggagacagccgcggagaagcggcggaagctgctgggcgcgctggagaagtgcgacgaggacctcaagacgcttcgccggatcatcgcggccgtccgcgccgcggagatgcgcgcggcctccgcgtccgaggtctgcccggctgcagcgaagacgacggcgcatgcgggcaagggcgccacggggacgttcgcccgcgacaacgaacacgtcgaacagtcgccgtcgccgtccccatcgccgccgacgcagcagcagcagcaccccagcccggactcggtgctggacgccatcagctccccgaggttcccatgcaggaagcggccgtctccatgcacggatctcgatgtgggtggcaaggggggcgcttgcggtgccgtcggatcgaagatcgtgaagccctcccgaacccttgttttctccggcgactactgcaagatcaaaccaggcggtgagctgccgctgcacgccgtccattactacccggtgccgcggcggcggggcgggtgatcagccgcgcgatggcggagagcgtcggggaggcaataatgtgggtgcggcagcagcaggcaggcgcgggcgacgacgagcgcggcagggtcgcggccgcgctggagcgtgccatcgtgcaggacctggtgggcgacctcgttgccgagatgatgcagcagcagcaggcgcaggccgggcacggggccggcggcggcgggtgcaggaagagactgtgcttctgatgctgtgaattcggcatgtgctttttttttcttcttccttgttttttgtttcttttgtcgcgtggcgtcgcatcgcatgtgcttgaatttggcaggtcaaggtctctgagctgtgaggaattaataactggctctgctgctgtggctgcgccatagatgtcagtagtcgcgggtacagctcgcctgggtagctacccccacctgactgacgatcgtggtagtattaaaagaacggattcgccgcggcgtcagttgtaggtggagtaataacaatcaatatgaaagtgatgagaagcaactgccaagtacgctggcgggctcacttggattcaactctgataggtactgtgagtagcactgtg

SEQ ID NO: 1528 - DNA, 862 bp, Zea Mays
caacaccatgcacagtgcactgtctgcgtaaccagttgtccctgtataatactctagctgtgccccattggctaaaacctgtttgagtcttctgtatgaatgagtttattcgcgcctataggctataattgagaggccaactacccggggtcgcttgagcctgggtgctctgctagcaggttgttttctcctaatacatctactaaagcaacaccacgtacagcacactgcacactgtctatcatggtaaccagtgttctcttgcctaggaggctaggataagaaaaaaagaagatcgatttcttaaaaatgtatctgttcaaccacaacatctgaagtaagaagtaggaactgttctcatactgcatttacccggatttaaaatggtaataaagtactgcagccattgtttggcccaacatggaacgaaccagaatcgcacagcacaacccgactttcagagagtttgccagaaaggagcggaacaaacatgggctcaggattcaggaggtttaattcaactgaacccctagcaaatttcgaaaataaaccgggttcgggcttccctctactccacgtacatgcaaatttcacagtaaactgaactgctaatccatccaggaaagaaaggttgagtcgttgagagaagctcgtccaagtagggtagggtttccttaccaagcgaagcgtcttatgctcctgcggggagggctcgatgttcgtgtgctcgtgtgaggagaccctgcgacgaggagacgggagtcaactgatcggtggcctcggttgtcgcttcggcggtcggccagcaggcagcaccgaagcggggagagaaatgaagcggccaaacggatgataattcgtc

SEQ ID NO: 1529 - DNA, 672 bp, Zea Mays
cttgcttgctatcaggccctcatcaagtaaagatggttatacggttaaccagaaggttgacccagaaacgccacatataaaggaggccaccatgtcagatgtatcaccaactaaagtaaccaaacacaacaatggggatctgctatatatgaaggaattatatcatgcgcttcccatggattatgtgacaatagccaaacttcaatgaaagctagatggggaagccaaccaatatacagtccaaaagttgattgataagatggtgcaagatggatatgtgaaaaattcaactaactaaagattgggtaattgattgaatctgtacacagatggtaacatatcatgtacatataagattaccgtatcattatcagtgcctaaccaatcattgtaccattataaccctataaataagttaaaatactgttacattaataaattatgcaggctattgacaccaatacagagcatgctgagcctaagcacaaataccttctgagagtccacgaagtgggagatggctccacaatggactgcctccactaaattggatctgatcttactcgtactcgagagctaccagagctacaacagaatgtgtccatgcagagcgggcaagaagatttcgcagtggataaggattcaagcaggactctaacaagtgtgcgtgag

SEQ ID NO: 1530 - DNA, 1792 bp, Zea Mays
tgcaagcgtggctgtctcctaaaccgggtgcctctcttcctcaagctagccacttctctctcgatcctctccaagtcgaagcaccgaatctactgcccctcccacctctcacacgtacgtagtgtgtgtgtgtgcgcgctactactcgatcgtgtgtcgcgcgcacacacaaccatccaagaaccaaagattccaatctgaaccaacgttcttcttcacctaaccagctagcagttcgatcgatcgatggaggggggcagcaacagcccggacgggcagtcgtcgggcggcagccccgaggagcggggaagcggcggtagcggaggccggggcaccggggagccggcgcggtcgcggtggacgccgaagccggagcagatactgatcctcgagtccatcttcaacagcggcatggtcaacccgcccaaggatgaaaccgtccgcatccgcaagctgctcgagcgcttcggcgccgtcggggacgccaacgtcttctactggttccagaaccgccgctcccgctcgcgccgccgccagcgccagatgcaggccgccgcagcggcggcggcggcggcggcggcatcctccgcgtccaacaacagctctcccgcggctagcgcaaccgtcggccttccttctggcgctctacaatatcctttggccatgggcgggaccgccgcctgccagtatgagcagcaggcgagctcctcctcgtcgtcgggaagcactggcggctcctctcttgggctgttcgcgctcggagccgccggggtgcccggcaccggcggcggtgggtacttccaggcgtcgtgtggcgcttcgtcgccgctggcgacagggctgatgggggacgtggacagcagtggcggcagcgacgatctcttcgccatctcccgccagatggggttcgcggcggcgagcaccgtcgcctcggcctctgtggcaccgagctccaacgcacaccaccagcagtattactcatgcgaatcacctgcagcgacgatcacggtgttcatcaatggagtcccaatggaggttcccaggggcccaatagacttgcgagccatgttcggccaggacgtgatgctcgtccattccaccggggtcatcctcccagtcaacgactacggaattctaacgcagaccttgcagttgggtgaaagctatttcttgcaaggccaacttaaaactgccgcaagtagctagattgtagcgcagtctacggccggtctctagctactcgatattcatcggttcagatgggatgcagctcacgaatcacgatcaaccaagatgggtcatttgcatgcaactgatatatatctgtccatcatccatatatataatcgagaagaaaagttagctagcaccaagaaaatatacatatattgcacctcaagaaagtaactatatatataatatttatgcccttaaaacataagacagcgtatgtgggcggttcagtttttcgattggattatatgaattacaatggatgcctttctcccaagcaccattttatttacaaggatacgcatgttaatgcatgcatgcatgcaggaagaatctccttgacgacagtgtgagctacatatatattcatcttagctagacggttgcgcgcacctttgtaatgatttaatttgtaactgtgtaatgttgtatgccgtctatatatgtcggctggaccgtgcatggaatgtctgtcctcatgtaaggccaaatggagctctaaaatatgatcttgtttctacgcccttttgtcgtttgtgtggattttaaagtatacgga

SEQ ID NO: 1531 - DNA, 1984 bp, Zea Mays
gtttctccacacgattttgatggaaaacgtcaaaacgttggttctcgccactacaattttgtccgtgtattttcgttgacgaagtagcagggaattgatgcagaattcgaggagatctagcttggttcttttgggctcgcatgctttattttgggtcttcctttcattaattaattgcgtcggttcttgttctttagttcttcaagtattgttcggttacctcccatgtagcggtcgtccataagatcacaccacatgatacatatgctgtcctcactcctgccatcatgtatatccattcatacgtgactgtttgtagaaatttaattaaacatcgtgattattgggagggatgaaacaattttcaaagtgtaacatgtcgttaggactgaatattaacactcatgtactgaacataatatgcatccgtttgttaaaactgaccactttctcgtttttgccttttggtctacttaaccctccctccatgcgaccatgcatggatctgaaacttttgagtagtaccattcaaccatgtatttgatacctacctacctagctagtacgttaacaagaacttcaattatttacatatgcttttgaaatagtaattgggttatttagtgtcatcaactaacaaaagttaggtattacctctagctagctagcaggcagtggcgaagctagagctgtgaatatcctggtgccattgagcgtacatgaatggatttaggtggtgctcaagagatgaaaatgaaatactaatcactgaaatttcaaattttccctgggtctatctagcttcgcccatgctagcacatgttaagcaaaggaacgctgaacaacgctaataatggggctgtaatgcaagcatgcatgcaactactactgatcatattttcatgcatgctaagctagtttggagaaaaaacctagacccaaaacgtgagaatgaagaccgacctaaggagtactatagtactatatagcaacgactataaatttcattaattcgtaatcttctcaaattcagaactccgcatccatttgttaattctgtcgtcggttggcagcagctagacataattctaataagagatgccgcaatttaatttaattttgagtggattctgaactaactggctagctgtgcggattgattggctggttgccttctaattccagcgacgatcacggtgttcatcaatggagtcccaatggaggttcccaggggcccaatagacttgcgagccatgttcggccaggacgtgatgctcgtccattccaccggggtcatcctcccagtcaacgactacggaattctaacgcagaccttgcagttgggtgaaagctatttcttggtagcaaggccaacttaaaactgccgcaagtagctagattgtagcgcagtctacggccggtctctagctactcgatattcatcggttcagatgggatgcagctcacgaatcacgatcaaccaagatgggtcatttgcatgcaactgatatatatctgtccatcatccatatatataatcgagaagaaaagttagctagcaccaagaaaatatacatatattgcacctcaagaaagtaactatatatataatatttatgcccttaaaacataagacagcgtatgtgggcggttcagtttttcgattggattatatgaattacaatggatgcctttctcccaagcaccattttatttacaaggatacgcatgttaatgcatgcatgcatgcaggaagaatctccttgacgacagtgtgagctacatatatattcatcttagctagacggttgcgcgcacctttgtaatgatttaatttgtaactgtgtaatgttgtatgccgtctatatatgtcggctggaccgtgcatggaatgtctgtcctcatgtaaggccaaatggagctctaaaatatgatcttgtttctacgcccttttgtcgtttgtgtggattttaaagtatacgga

SEQ ID NO: 1532 - DNA, 1044 bp, Zea Mays
ctccagtccacttctccagggagatacggctcgaaatgctcgatgaatgacgatggagtgggagatgtttggtccaaataaaatgatgggccacgaagcaagctacaaggcccgactgcacatgggctttagtcctcgcaccccgagaaacgaagcctctcctccttggccttgagcccttgagcattcatcgtccgactccgacggcttctattgcagttgcaggtttaagtggctagctggtgatccatttccttcaagtggtttgtccattgccatggtgcaaccaatcactgaagagcagaaagggcattcagtattaagcttaattggaggccgataactgctagagtctggttttataaggaagacaagtgaggagagaatttcgaatcgttagaacaaacactcaagcctggaccaatcctggcagcaactgaaaagagggaaacggaaagtgggtagacgaatccgatgggctgtgcatctgtatggagtcctctgagtttggctactatctgttctacataaggcgcagaaagttggggcttaaaaatgacggcgagcgcgcacgcgatcccgcgggaagggaataaggaaaagcgatgttgacaaagctggatgggaatcctgcgcttttttggaggcgaagatgagaaggaatatatcgcctgtgtcgacctcgccggcctgcttcttctgttccgtggcttggttgtgctcccgctggatcgtgccagccgccagcaggatgatgagcacgtgtgaaccctggcgtgggtatgttgttgtttgctctgggagtgttttgctcagtagtcgttctttgtttatttgtacaaactcgtccatttgtgtcggttgcagaaatacgaaaacacttcaaatggtacgaattggaatttggaaagtacagagtatagaccgctggataagctgtttttattgtttggcgtaatgaactggtgatccatatgttcgccttaaaaaaaaagacctgatggttcaagtatctatactactagtacccttgtggatgttttt

SEQ ID NO: 1533 - DNA, 1028 bp, Zea Mays
ggctcgaaatgctcgatgaatgacgatggagtgggagatgtttggtccaaataaaatgatgggccacgaagcaagctacaaggcccgactgcacatgggctttagtcctcgcaccccgagaaacgaagcctctcctccttggccttgagcccttgagcattcatcgtccgactccgacggcttctattgcagttgcaggtttaagtggctagctggtgatccatttccttcaagtggtttgtccattgccatggtgcaaccaatcactgaagagcagaaagggcattcagtattaagcttaattggaggccgataactgctagatgttatgcagagtctggttttataaggaagacaagtgaggagagaatttcgaatcgttagaacaaacactcaagcctggaccaatcctggcagcaactgaaaagagggaaacggaaagtgggtagacgaatccgatgggctgtgcatctgtatggagtcctctgagtttggctactatctgttctacataaggcgcagaaagttggggcttaaaaatgacggcgagcgcgcacgcgatcccgcgggaagggaataaggaaaagcgatgttgacaaagctggatgggaatcctgcgcttttttggaggcgaagatgagaaggaatatatcgcctgtgtcgacctcgccggcctgcttcttctgttccgtggcttggttgtgctcccgctggatcgtgccagccgccagcaggatgatgagcacgtgtgaaccctggcgtgggtatgttgttgtttgctctgggagtgttttgctcagtagtcgttctttgtttatttgtacaaactcgtccatttgtgtcggttgcagaaatacgaaaacacttcaaatggtacgaattggaatttggaaagtacagagtatagaccgctggataagctgtttttattgtttggcgtaatgaactggtgatccatatgttcgccttaaaaaaaaagacctgatggttcaagtatctatactactagtacccttgtggatgttttt

SEQ ID NO: 1534 - DNA, 2194 bp, Zea Mays
tggcgaatcacgaacttcatatcaaaccgacaaattggttggagcaaatgttgtttagcttttgtgaggaaagaggcggcggcggcggcggtgattgtttagcaggagaagatccccttctgcactcatcgaacggccgccgccacctagatcagttgggagtgtctcctgtgccttttctagcacagattgtaggtacttcccttgtgcttcaatgcggagttgcaaatgtctttgtacctgttgaaaggcgtcgtttatgtgtaaggtatcacattatcagtacttgaccattaacagtaaagagcttgtgacatgaaaagaataaaatctggatttacaattggtcagtttgtttaaacttattttagcatcattagtttttacttgttctttttaaaactgtgttcagttaaacgtatgacaagattatgttcctagaccaccatgactaggccctcttgcattgtgagcctcttagaagtcatatgctggtgtccagcatatacttttgttgataaatgagctatagatgttcattgtgtgaaggacaaaatatgtggatgctctaaagctaaagatatgcatacatttaggggtggcaataggctctaaattttacactataaaatttaaaaatcagattggatcggctctatttttattcatctttgaactaaaattgattaaaggctcaaacaaattgtgaagaaatatttggatcgtgatccattaccacccctacatatattacatactttctcttggactttttactctatcggtaatataggaactagtgcttggctaaaacaattgagttgattggactattggagcaattataagtgatgtttttttcttaaaggaatggtgattgggatgccatttttttgacatgtaacattatatatgatctgaccatgtccctgaagtttaccaactgatggtgaagctacgtaatttttctttatttggatgtctgtacatcaggtactttcatggcaaaataaaccttcatttgatgagtgtcctagatctacttaaagcctggtttgggataaattttgctatatatttgtccagacaatctactccagtcttttacacaataactctgctagggatgaatcagttatgtctttgtaaggaatgtttaaatggtaatttagttagtaatatgatttattttttatgcttctgtacctctagttgctcatgcagtcggcgctgtacttcaatttgcatctgaagggcttcacctatgtgcacagatctgataaaaatacaaatccatgttatcttatgcaaacatgttgaagaaaacatttattcatctcttacttgtttgtctgggttccaaggtttaagtggctagctggtgatccatttccttcaagtggtttgtccattgccatggtgcaaccaatcactgaagagcagaaagggcattcagtattaagcttaattggaggccgataactgctagatgttatgcagagtctggttttataaggaagacaagtgaggagagaatttcgaatcgttagaacaaacactcaagcctggaccaatcctggcagcaactgaaaagagggaaacggaaagtgggtagacgaatccgatgggctgtgcatctgtatggagtcctctgagtttggctactatctgttctacataaggcgcagaaagttggggcttaaaaatgacggcgagcgcgcacgcgatcccgcgggaagggaataaggaaaagcgatgttgacaaagctggatgggaatcctgcgcttttttggaggcgaagatgagaaggaatatatcgcctgtgtcgacctcgccggcctgcttcttctgttccgtggcttggttgtgctcccgctggatcgtgccagccgccagcaggatgatgagcacgtgtgaaccctggcgtgggtatgttgttgtttgctctgggagtgttttgctcagtagtcgttctttgtttatttgtacaaactcgtccatttgtgtcggttgcagaaatacgaaaacacttcaaatggtacgaattggaatttggaaagtacagagtatagaccgctggataagctgtttttattgtttggcgtaatgaactggtgatccatatgttcgccttaaaaaaaaagacctgatggttcaagtatctatactactagtacccttgtggatgttttt

SEQ ID NO: 1535 - DNA, 971 bp, Zea Mays
cttcatatcaaaccgacaaattggttggagcaaatgttgtttagcttttgtgaggaaagaggcggcggcggcggcggtgattgtttagcaggagaagatccccttctgcactcatcgaacggccgccgccacctagatcagttgggagtggctagctggtgatccatttccttcaagtggtttgtccattgccatggtgcaaccaatcactgaagagcagaaagggcattcagtattaagcttaattggaggccgataactgctagatgttatgcagagtctggttttataaggaagacaagtgaggagagaatttcgaatcgttagaacaaacactcaagcctggaccaatcctggcagcaactgaaaagagggaaacggaaagtgggtagacgaatccgatgggctgtgcatctgtatggagtcctctgagtttggctactatctgttctacataaggcgcagaaagttggggcttaaaaatgacggcgagcgcgcacgcgatcccgcgggaagggaataaggaaaagcgatgttgacaaagctggatgggaatcctgcgcttttttggaggcgaagatgagaaggaatatatcgcctgtgtcgacctcgccggcctgcttcttctgttccgtggcttggttgtgctcccgctggatcgtgccagccgccagcaggatgatgagcacgtgtgaaccctggcgtgggtatgttgttgtttgctctgggagtgttttgctcagtagtcgttctttgtttatttgtacaaactcgtccatttgtgtcggttgcagaaatacgaaaacacttcaaatggtacgaattggaatttggaaagtacagagtatagaccgctggataagctgtttttattgtttggcgtaatgaactggtgatccatatgttcgccttaaaaaaaaagacctgatggttcaagtatctatactactagtacccttgtggatgttttt

SEQ ID NO: 1536 - DNA, 2165 bp, Zea Mays
atatcaaaccgacaaattggttggagcaaatgttgtttagcttttgtgaggaaagaggcggcggcggcggcggtgattgtttagcaggagaagatccccttctgcactcatcgaacggccgccgccacctagatcagttgggagtgtctcctgtgccttttctagcacagattgtaggtacttcccttgtgcttcaatgcggagttgcaaatgtctttgtacctgttgaaaggcgtcgtttatgtgtaaggtatcacattatcagtacttgaccattaacagtaaagagcttgtgacatgaaaagaataaaatctggatttacaattggtcagtttgtttaaacttattttagcatcattagtttttacttgttctttttaaaactgtgttcagttaaacgtatgacaagattatgttcctagaccaccatgactaggccctcttgcattgtgagcctcttagaagtcatatgctggtgtccagcatatacttttgttgataaatgagctatagatgttcattgtgtgaaggacaaaatatgtggatgctctaaagctaaagatatgcatacatttaggggtggcaataggctctaaattttacactataaaatttaaaaatcagattggatcggctctatttttattcatctttgaactaaaattgattaaaggctcaaacaaattgtgaagaaatatttggatcgtgatccattaccacccctacatatattacatactttctcttggactttttactctatcggtaatataggaactagtgcttggctaaaacaattgagttgattggactattggagcaattataagtgatgtttttttcttaaaggaatggtgattgggatgccatttttttgacatgtaacattatatatgatctgaccatgtccctgaagtttaccaactgatggtgaagctacgtaatttttctttatttggatgtctgtacatcaggtactttcatggcaaaataaaccttcatttgatgagtgtcctagatctacttaaagcctggtttgggataaattttgctatatatttgtccagacaatctactccagtcttttacacaataactctgctagggatgaatcagttatgtctttgtaaggaatgtttaaatggtaatttagttagtaatatgatttattttttatgcttctgtacctctagttgctcatgcagtcggcgctgtacttcaatttgcatctgaagggcttcacctatgtgcacagatctgataaaaatacaaatccatgttatcttatgcaaacatgttgaagaaaacatttattcatctcttacttgtttgtctgggttccaaggtttaagtggctagctggtgatccatttccttcaagtggtttgtccattgccatggtgcaaccaatcactgaagagcagaaagggcattcagtattaagcttaattggaggccgataactgctagagtctggttttataaggaagacaagtgaggagagaatttcgaatcgttagaacaaacactcaagcctggaccaatcctggcagcaactgaaaagagggaaacggaaagtgggtagacgaatccgatgggctgtgcatctgtatggagtcctctgagtttggctactatctgttctacataaggcgcagaaagttggggcttaaaaatgacggcgagcgcgcacgcgatcccgcgggaagggaataaggaaaagcgatgttgacaaagctggatgggaatcctgcgcttttttggaggcgaagatgagaaggaatatatcgcctgtgtcgacctcgccggcctgcttcttctgttccgtggcttggttgtgctcccgctggatcgtgccagccgccagcaggatgatgagcacgtgtgaaccctggcgtgggtatgttgttgtttgctctgggagtgttttgctcagtagtcgttctttgtttatttgtacaaactcgtccatttgtgtcggttgcagaaatacgaaaacacttcaaatggtacgaattggaatttggaaagtacagagtatagaccgctggataagctgtttttattgtttggcgtaatgaactggtgatccatatgttcgccttaaaaaaaaagacctgatggttcaagtatctatactactagtacccttgtggatgttttt

SEQ ID NO: 1537 - DNA, 1080 bp, Zea Mays
atatcaaaccgacaaattggttggagcaaatgttgtttagcttttgtgaggaaagaggcggcggcggcggcggtgattgtttagcaggagaagatccccttctgcactcatcgaacggccgccgccacctagatcagttgggagtgtctcctgtgccttttctagcacagattgtaggtacttcccttgtgcttcaatgcggagttgcaaatgtctttgtacctgttgaaaggcgtcgtttatgtgtaaggtttaagtggctagctggtgatccatttccttcaagtggtttgtccattgccatggtgcaaccaatcactgaagagcagaaagggcattcagtattaagcttaattggaggccgataactgctagatgttatgcagagtctggttttataaggaagacaagtgaggagagaatttcgaatcgttagaacaaacactcaagcctggaccaatcctggcagcaactgaaaagagggaaacggaaagtgggtagacgaatccgatgggctgtgcatctgtatggagtcctctgagtttggctactatctgttctacataaggcgcagaaagttggggcttaaaaatgacggcgagcgcgcacgcgatcccgcgggaagggaataaggaaaagcgatgttgacaaagctggatgggaatcctgcgcttttttggaggcgaagatgagaaggaatatatcgcctgtgtcgacctcgccggcctgcttcttctgttccgtggcttggttgtgctcccgctggatcgtgccagccgccagcaggatgatgagcacgtgtgaaccctggcgtgggtatgttgttgtttgctctgggagtgttttgctcagtagtcgttctttgtttatttgtacaaactcgtccatttgtgtcggttgcagaaatacgaaaacacttcaaatggtacgaattggaatttggaaagtacagagtatagaccgctggataagctgtttttattgtttggcgtaatgaactggtgatccatatgttcgccttaaaaaaaaagacctgatggttcaagtatctatactactagtacccttgtggatgttttt

SEQ ID NO: 1538 - DNA, 956 bp, Zea Mays
atatcaaaccgacaaattggttggagcaaatgttgtttagcttttgtgaggaaagaggcggcggcggcggcggtgattgtttagcaggagaagatccccttctgcactcatcgaacggccgccgccacctagatcagttgggagtggctagctggtgatccatttccttcaagtggtttgtccattgccatggtgcaaccaatcactgaagagcagaaagggcattcagtattaagcttaattggaggccgataactgctagagtctggttttataaggaagacaagtgaggagagaatttcgaatcgttagaacaaacactcaagcctggaccaatcctggcagcaactgaaaagagggaaacggaaagtgggtagacgaatccgatgggctgtgcatctgtatggagtcctctgagtttggctactatctgttctacataaggcgcagaaagttggggcttaaaaatgacggcgagcgcgcacgcgatcccgcgggaagggaataaggaaaagcgatgttgacaaagctggatgggaatcctgcgcttttttggaggcgaagatgagaaggaatatatcgcctgtgtcgacctcgccggcctgcttcttctgttccgtggcttggttgtgctcccgctggatcgtgccagccgccagcaggatgatgagcacgtgtgaaccctggcgtgggtatgttgttgtttgctctgggagtgttttgctcagtagtcgttctttgtttatttgtacaaactcgtccatttgtgtcggttgcagaaatacgaaaacacttcaaatggtacgaattggaatttggaaagtacagagtatagaccgctggataagctgtttttattgtttggcgtaatgaactggtgatccatatgttcgccttaaaaaaaaagacctgatggttcaagtatctatactactagtacccttgtggatgttttt

SEQ ID NO: 1539 - DNA, 963 bp, Zea Mays
atatcaaaccgacaaattggttggagcaaatgttgtttagcttttgtgaggaaagaggcggcggcggcggcggtgattgtttagcaggagaagatccccttctgcactcatcgaacggccgccgccacctagatcagttgggaggtttaagtggctagctggtgatccatttccttcaagtggtttgtccattgccatggtgcaaccaatcactgaagagcagaaagggcattcagtattaagcttaattggaggccgataactgctagagtctggttttataaggaagacaagtgaggagagaatttcgaatcgttagaacaaacactcaagcctggaccaatcctggcagcaactgaaaagagggaaacggaaagtgggtagacgaatccgatgggctgtgcatctgtatggagtcctctgagtttggctactatctgttctacataaggcgcagaaagttggggcttaaaaatgacggcgagcgcgcacgcgatcccgcgggaagggaataaggaaaagcgatgttgacaaagctggatgggaatcctgcgcttttttggaggcgaagatgagaaggaatatatcgcctgtgtcgacctcgccggcctgcttcttctgttccgtggcttggttgtgctcccgctggatcgtgccagccgccagcaggatgatgagcacgtgtgaaccctggcgtgggtatgttgttgtttgctctgggagtgttttgctcagtagtcgttctttgtttatttgtacaaactcgtccatttgtgtcggttgcagaaatacgaaaacacttcaaatggtacgaattggaatttggaaagtacagagtatagaccgctggataagctgtttttattgtttggcgtaatgaactggtgatccatatgttcgccttaaaaaaaaagacctgatggttcaagtatctatactactagtacccttgtggatgttttt

SEQ ID NO: 1540 - DNA, 974 bp, Zea Mays
atatcaaaccgacaaattggttggagcaaatgttgtttagcttttgtgaggaaagaggcggcggcggcggcggtgattgtttagcaggagaagatccccttctgcactcatcgaacggccgccgccacctagatcagttgggaggtttaagtggctagctggtgatccatttccttcaagtggtttgtccattgccatggtgcaaccaatcactgaagagcagaaagggcattcagtattaagcttaattggaggccgataactgctagatgttatgcagagtctggttttataaggaagacaagtgaggagagaatttcgaatcgttagaacaaacactcaagcctggaccaatcctggcagcaactgaaaagagggaaacggaaagtgggtagacgaatccgatgggctgtgcatctgtatggagtcctctgagtttggctactatctgttctacataaggcgcagaaagttggggcttaaaaatgacggcgagcgcgcacgcgatcccgcgggaagggaataaggaaaagcgatgttgacaaagctggatgggaatcctgcgcttttttggaggcgaagatgagaaggaatatatcgcctgtgtcgacctcgccggcctgcttcttctgttccgtggcttggttgtgctcccgctggatcgtgccagccgccagcaggatgatgagcacgtgtgaaccctggcgtgggtatgttgttgtttgctctgggagtgttttgctcagtagtcgttctttgtttatttgtacaaactcgtccatttgtgtcggttgcagaaatacgaaaacacttcaaatggtacgaattggaatttggaaagtacagagtatagaccgctggataagctgtttttattgtttggcgtaatgaactggtgatccatatgttcgccttaaaaaaaaagacctgatggttcaagtatctatactactagtacccttgtggatgttttt

SEQ ID NO: 1541 - DNA, 1388 bp, Zea Mays
tcctagaccaccatgactaggccctcttgcattgtgagcctcttagaagtcatatgctggtgtccagcatatacttttgttgataaatgagctatagatgttcattgtgtgaaggacaaaatatgtggatgctctaaagctaaagatatgcatacatttaggggtggcaataggctctaaattttacactataaaatttaaaaatcagattggatcggctctatttttattcatctttgaactaaaattgattaaaggctcaaacaaattgtgaagaaatatttggatcgtgatccattaccacccctacatatattacatactttctcttggactttttactctatcggtaatataggaactagtgcttggctaaaacaattgagttgattggactattggagcaattataagtgatgtttttttcttaaaggaatggtgattgggatgccatttttttgacatgtaacattatatatgatctgaccatgtccctgaagtttaccaactgatggtgaagctacgtaatttttctttatttggatgtctgtacatcaggtttaagtggctagctggtgatccatttccttcaagtggtttgtccattgccatggtgcaaccaatcactgaagagcagaaagggcattcagtattaagcttaattggaggccgataactgctagatgttatgcagagtctggttttataaggaagacaagtgaggagagaatttcgaatcgttagaacaaacactcaagcctggaccaatcctggcagcaactgaaaagagggaaacggaaagtgggtagacgaatccgatgggctgtgcatctgtatggagtcctctgagtttggctactatctgttctacataaggcgcagaaagttggggcttaaaaatgacggcgagcgcgcacgcgatcccgcgggaagggaataaggaaaagcgatgttgacaaagctggatgggaatcctgcgcttttttggaggcgaagatgagaaggaatatatcgcctgtgtcgacctcgccggcctgcttcttctgttccgtggcttggttgtgctcccgctggatcgtgccagccgccagcaggatgatgagcacgtgtgaaccctggcgtgggtatgttgttgtttgctctgggagtgttttgctcagtagtcgttctttgtttatttgtacaaactcgtccatttgtgtcggttgcagaaatacgaaaacacttcaaatggtacgaattggaatttggaaagtacagagtatagaccgctggataagctgtttttattgtttggcgtaatgaactggtgatccatatgttcgccttaaaaaaaaagacctgatggttcaagtatctatactactagtacccttgtggatgttttt

SEQ ID NO: 1542 - DNA, 1483 bp, Zea Mays
ggacgaggagttcccgtatctttgcgagaacagcccgcccaatggccatgagaaccaacgcctcttccagccgccgcttaccccgtcgtcgccgcgcgcgttgccactggactcagcacctgagcctctgccaccgtcaattgccccgccgccggctcctccgtgggcacctggtgcctgcacacggggcaggagctgtgcatctccagccacggcaggatgcactggtcgtggaaccggtgcttgcacggcatctcgcgctccgcgccgccaccggcgacctcgtccaggcacatggggcaggtggttgtgtttcttgtggaacggcccaactggttggtaacttggtatccagtccattgtgcatcacaacaaggaccaaataaaggcatagggaaaaagaaggcaggactggcaagaaggaaacagaggtccgcgagcaaacgccttcaagcccatctcggtagccggagaacgagcagcagcggaggcgatggcgtccccggatcccggccacacgccggcgcaaggcgaggaatctgcctccccctcctcgtggcctccccgaaagctccagagtttcacaccagggctgtggtcacaatacaaagcttatgaggatgcagttgtggagaacattaaaggaactattgcggatgctctggttcttgtgagagagcatcaggcggaggcaattggatgtgccactgttgcaggattcattctgttcagaggccctcgaagatttttataccgcaatacctttggccgtttaaagactgagaaggatttactgaatgatgccgagcaaagtatgatggagtaccaaacatctattcagaacttgaagaaagaatcaaaatacactcttgacaaagtagctatcggtgaaagcgatgtgcagcgtgggcgaactgatctgagatctactgggaagcagatacaatctcttataggttccatttacaaagcagaatctacagctgcaggtctgatggatagactaagaaccattccaaccaggcaatctctcgagctgcgagcagaggtggcttccatggcctccgatttgaagaaccagaggtgtgccttgcaggaaaggatcaacaaaatatctgaatatggtgtccgtgtctgaactgctgcaccgtctgtacatttcccctcatagagcctcttttggtcctcccgtacaataaactgtgaatccaccgtgaggtgcgcgttttggttagacaggttccgattctaaccatattttctgtcagcattttgaatgctaggacagacatggtaactcatcacaaccataaattgttcctatcactttaacgttgagcattgctcgtttctgggaagcagatgggctgatggctactatcttatatatgcgattgcaaggaaaaactttgttccaccttgggtgctgtgcttcctgtatacaattctgctattccgtttcggaagaaaaaaaaaacaaata

SEQ ID NO: 1543 - DNA, 1485 bp, Zea Mays
ggacgaggagttcccgtatctttgcgagaacagcccgcccaatggccatgagaaccaacgcctcttccagccgccgcttaccccgtcgtcgccgcgcgcgttgccactggactcagcacctgagcctctgccaccgtcaattgccccgccgccggctcctccgtgggcacctggtgcctgcacacggggcaggagctgtgcatctccagccacggcaggatgcactggtcgtggaaccggtgcttgcacggcatctcgcgctccgcgccgccaccggcgacctcgtccaggcacatggggcaggtggttgtgtttcttgtggaacggcccaactggttggtaacttggtatccagtccattgtgcatcacaacaaggaccaaataaaggcatagagggaaaaagaaggcaggactggcaagaaggaaacagaggtccgcgagcaaacgccttcaagcccatctcggtagccggagaacgagcagcagcggaggcgatggcgtccccggatcccggccacacgccggcgcaaggcgaggaatctgcctccccctcctcgtggcctccccgaaagctccagagtttcacaccagggctgtggtcacaatacaaagcttatgaggatgcagttgtggagaacattaaaggaactattgcggatgctctggttcttgtgagagagcatcaggcggaggcaattggatgtgccactgttgcaggattcattctgttcagaggccctcgaagatttttataccgcaatacctttggccgtttaaagactgagaaggatttactgaatgatgccgagcaaagtatgatggagtaccaaacatctattcagaacttgaagaaagaatcaaaatacactcttgacaaagtagctatcggtgaaagcgatgtgcagcgtgggcgaactgatctgagatctactgggaagcagatacaatctcttataggttccatttacaaagcagaatctacagctgcaggtctgatggatagactaagaaccattccaaccaggcaatctctcgagctgcgagcagaggtggcttccatggcctccgatttgaagaaccagaggtgtgccttgcaggaaaggatcaacaaaatatctgaatatggtgtccgtgtctgaactgctgcaccgtctgtacatttcccctcatagagcctcttttggtcctcccgtacaataaactgtgaatccaccgtgaggtgcgcgttttggttagacaggttccgattctaaccatattttctgtcagcattttgaatgctaggacagacatggtaactcatcacaaccataaattgttcctatcactttaacgttgagcattgctcgtttctgggaagcagatgggctgatggctactatcttatatatgcgattgcaaggaaaaactttgttccaccttgggtgctgtgcttcctgtatacaattctgctattccgtttcggaagaaaaaaaaaacaaata

SEQ ID NO: 1544 - DNA, 1387 bp, Zea Mays
cacagacggacagacccaaaggccaaaggtccagagcgctcgacctaggcgagtgggtgactgcttcaaccacgagcgcagcgcggcggcgacgccatctcccacggatgtagcttcgtctccttcccgttcgctgtcgtcgacgccatcatccacgggcacagcgcgacgccgctccataccgagtctgtgggcctgacaccaggggagtcgccctccagccctcgcccggctgcccctgcctatgcccctcggctccgaccaccgagttttggccaagtcgccaatcgctcagccattcagccataacgacaaaggtttgggagtattttcaacaggagttagttgaggttgatggagtgatgaaggctatttgcaaatactgtgggacgaagctgacaaggaaaaggaattcatgcacaaatagccttagaaaccatgttgcggatacatgtcctaaaattctagttgaggaccgcaagcgattcattgctacaatgagaaaaaagccaggagaaggttcatttgtgtttgaccctcgaaagactcatgagtgcatggttaagtggtgcatcagtgccgaggtcgcattcaacaagtttgatgatccgttctttgccccgtggatggagtcattgcaaccatcgtttagcggtgttgggccttagacaatgagaaatgattgtattaccatattcaagatgatgtggcaagagctaaggaatgagctacagagtcttaactctcagatttgcttgacatctgatctttagacctcaaatcagaagttgggttatctttgcttgacaacccactacattgatgcaaactttatcttgaaaaaagaagactattgcattcaaagttgtaaaatatcaccctctcgcatacaagcttttaatgagattgctgagaggtctggatttccttcaaaggctggattaattcttgatgttccaaattgttgcaattcgacacacaacatgattatggaggccattgagtacaaagttgtcttgaagagatatgctgaggaacaacttgagccttcaccagatgatgaagagtggacaaattctgaggcgattggagagtttcttgggggcatttgaggaagctacaaaagtattctcaacacatagaagtccaacatctcatttgtttttgcataatgtgttatgtattgtatccatcaagctctaagaaataaaaattggcaaatcaattgtgtgcttgaggatctagcactagcgatgtatccaggtgttggtgctcactggagtaatggagtcgaatgcttttggcgcgcttttttcctattgcgaattgtgttgttttactgtttgtgaggtcgttaagattgcaatgcgatgtggttttgatgctg

SEQ ID NO: 1545 - DNA, 454 bp, Zea Mays
gaaaacataaattaaacttaactcttaattgaacacaggtatctgttggaaagaaaacataaattaaacttaactactatctgccaagaataaagtgtgtccagtgatgtaagagtgcagacatgtggaggatctgttgccaggcaggagtgcatcatgtttcctcctcatgctttctctttggatgctgtgtatcatttgaacacaggtggcatagcgccctttgcaagttcaggaggaaagaaagaaaaaaaacacacacagcctagctgccactaggcgtcaggtcaccgttagtgctcaaaataactctgaaatttctaaacaaacagacaaagattgcagtttctactgattttcataagtaatgctacttaatacatccatataactaaattaaaaacaagttaaaagggatgagaagaggatcaataccatatcatgttcttgcaat

SEQ ID NO: 1546 - DNA, 547 bp, Zea Mays
caaccatcgcgaccaccgcaatccgcccgcccgcccgcagcaaaccctgcctccctacgctccgcgacgccgcaaccgccgcagtacgcccgcccgtcctccgcaatcctcccaagtaaaggcgctcctccacaacgtctaggaggagcagggctgtgcggcttgcgcctgtcctcctggtatccctctcccaccaccagcatctggtgcttctcttcgcctcgccccaaccacgccgccctgccctgccactcacgtaccaaatatctccatccaagctctatttaggtggaaaagaggacgagactgtatgatttgttcgggaacaccagcgtggaggtagcaacgccaagcatggagatgctggggttcaagaacatgccgcaaggtctcagagaagacaacgaggagattactcctaatggttgcatatattagttcgcgaggcagctatgctcaacacaagtgtatgatgaacaagcacaagctccgcaagctccggaagcgactttgccgccagacatgagagctctctcctctccagttc

SEQ ID NO: 1547 - DNA, 1757 bp, Zea Mays
atgaacatatttattttgtgtctttcctttccaaatagggaatgcctcctagaatttagggaagctgtgtcaaccctgatatttgctgccatttggtatcctgatttacctaaactttgtgacctaaggcacatattcgcagagagatatggaaattttgttgagcattttgttggccaggaggtctttgcaaaaaagacagtaaagttctctgtgttggacgcgatggggctctcatccaaacctctccacagaggggtgaaacatgacatctcttgtctgtctcaagattcgtatggtccatacattgctgcgtcatgtatggataacataatctacttgtacagtgttctccatatgaacaagggtctcataaaggtttacactagcatcaagataagagtcttttttcgtcaaggtcactgagtggccatctggggttctcacttcatatataccttagtatatagataatgtcgtaacgcatgagcacttagctattattaataatttgtgagccgttgcaacgcacgggtacctatctattatgatggcgaggacaactccattgccgctaagagtcaaatcaagtttgagacatgacttcaagttcttgaaggtagagaacttgggaaatcaattggttcaacaaaaaggaaagcccaagatagaagtgtatgaaaaggacaggaagaagggtgctggggctttaacaactcatgctagggttcagtaatgttcttccaatactactagcatatgttcaaagtcaccaagctcctgacaagccagttctgtggattacccataatgcaaaaagttttgatgtccctttccttaaccaagagtttgacagaagttcagcccaggttcctgaagatcatttggctatttgtcgatagtctttgttcagtgaaaaagtcgaagaaaacaaaaggcgataggtttctgtcacaagtctaatcatacagtaattagaaagtgtttctgtcacaagtctttcttcatgcaggcggtcggacttgggtacaaatctgtagcacactttctaattgccaagcataataacaaacaagtgcccactgatatagtgcgagagccagagcagcacgcctttgcacagattgttagcttcttaggtacttttgatatctgattacagcagtcgataggttgagagtttgttgcttcattcatacacgcgtctaaggttggatcgctcatgttccttcaaaagctcaatggtattcagaagtcagtaggtcagaatggtgcagttgaacctgatacatcatgagatataataacgtcagtggatttgtgggaagatggtggctcagatgatggatatgtacttgttaagcaggaggatgttgttgatgagatgacttcatttatggctgcatgcttggtgtcaattaaaaagaccaaggacctgccccctgatcaacttcaaaaagcgcttaggaagacgttttcagctgaaaagaagaaaagtaaaatccggaaggcattggatggaactaaagtcatttataatgttgcttcatggggcgccactgctgttggcagcataaagcttgagaccatttgtttagtctatgcagatgagttcgactgctaattagcagcgcctcccagtcaaaagcagcatgtgtattgtataactgtaaatattgccttgatttgaacaaacttgttttttgtgctagaactttatttcacgaacttcatatgatagaccctactgtagagta

SEQ ID NO: 1548 - DNA, 1498 bp, Zea Mays
atgaacatatttattttgtgtctttcctttccaaatagggaatgcctcctagaatttagggaagctgtgtcaaccctgatatttgctgccatttggtatcctgatttacctaaactttgtgacctaaggcacatattcgcagagagatatggaaattttgttgagcattttgttggccaggaggtctttgcaaaaaagacagtaaagttctctgtgttggacgcgatggggctctcatccaaacctctccacagaggggtgaaacatgacatctcttgtctgtctcaagattcgtatggtccatacattgctgcgtcatgtatggataacattttgagacatgacttcaagttcttgaaggtagagaacttgggaaatcaattggttcaacaaaaaggaaagcccaagatagaagtgtatgaaaaggacaggaagaagggtgctggggctttaacaactcatgctagggttcagtaatgttcttccaatactactagcatatgttcaaagtcaccaagctcctgacaagccagttctgtggattacccataatgcaaaaagttttgatgtccctttccttaaccaagagtttgacagaagttcagcccaggttcctgaagatcatttggctatttgtcgatagtctttgttcagtgaaaaagtcgaagaaaacaaaaggcgataggtttctgtcacaagtctaatcatacagtaattagaaagtgtttctgtcacaagtctttcttcatgcaggcggtcggacttgggtacaaatctgtagcacactttctaattgccaagcataataacaaacaagtgcccactgatatagtgcgagagccagagcagcacgcctttgcacagattgttagcttcttaggtacttttgatatctgattacagcagtcgataggttgagagtttgttgcttcattcatacacgcgtctaaggttggatcgctcatgttccttcaaaagctcaatggtattcagaagtcagtaggtcagaatggtgcagttgaacctgatacatcatgagatataataacgtcagtggatttgtgggaagatggtggctcagatgatggatatgtacttgttaagcaggaggatgttgttgatgagatgacttcatttatggctgcatgcttggtgtcaattaaaaagaccaaggacctgccccctgatcaacttcaaaaagcgcttaggaagacgttttcagctgaaaagaagaaaagtaaaatccggaaggcattggatggaactaaagtcatttataatgttgcttcatggggcgccactgctgttggcagcataaagcttgagaccatttgtttagtctatgcagatgagttcgactgctaattagcagcgcctcccagtcaaaagcagcatgtgtattgtataactgtaaatattgccttgatttgaacaaacttgttttttgtgctagaactttatttcacgaacttcatatgatagaccctactgtagagta

SEQ ID NO: 1549 - DNA, 988 bp, Zea Mays
tgtacagtgttctccatatgaacaagggtctcataaaggtttacactagcatcaagataagagtcttttttcgtcaaggtcactgagtggccatctggggttctcacttcatatataccttagtatatagataatgtcgtaacgcatgagcacttagctattattaataatttgtgagccgttgcaacgcacgggtacctatctattatgatggcgaggacaactccattgccgctaagagtcaaatcaagtttgagacatgacttcaagttcttgaaggtagagaacttgggaaatcaattggttcaacaaaaaggaaagcccaagatagaagtgtatgaaaaggacaggaagaagggtgctggggctttaacaactcatgctagggttcagtaatgttcttccaatactactagcatatgttcaaagtcaccaagctcctgacaagccagttctgtggattacccataatgcaaaaagttttgatgtccctttccttaaccaagagtttgacagaagttcagcccaggttcctgaagatcatttggctatttgtcgatagtctttgttcagtgaaaaagtcgaagaaaacaaaaggaggatgttgttgatgagatgacttcatttatggctgcatgcttggtgtcaattaaaaagaccaaggacctgccccctgatcaacttcaaaaagcgcttaggaagacgttttcagctgaaaagaagaaaagtaaaatccggaaggcattggatggaactaaagtcatttataatgttgcttcatggggcgccactgctgttggcagcataaagcttgagaccatttgtttagtctatgcagatgagttcgactgctaattagcagcgcctcccagtcaaaagcagcatgtgtattgtataactgtaaatattgccttgatttgaacaaacttgttttttgtgctagaactttatttcacgaacttcatatgatagaccctactgtagagta

SEQ ID NO: 1550 - DNA, 575 bp, Zea Mays
caaaaggcgataggtttctgtcacaagtctaatcatacagtaattagaaagtgtttctgtcacaagtctttcttcatgcaggcggtcggacttggttgaacctgatacatcatgagatataataacgtcagtggatttgtgggaagatggtggctcagatgatggatatgtacttgttaagcaggaggatgttgttgatgagatgacttcatttatggctgcatgcttggtgtcaattaaaaagaccaaggacctgccccctgatcaacttcaaaaagcgcttaggaagacgttttcagctgaaaagaagaaaagtaaaatccggaaggcattggatggaactaaagtcatttataatgttgcttcatggggcgccactgctgttggcagcataaagcttgagaccatttgtttagtctatgcagatgagttcgactgctaattagcagcgcctcccagtcaaaagcagcatgtgtattgtataactgtaaatattgccttgatttgaacaaacttgttttttgtgctagaactttatttcacgaacttcatatgatagaccctactgtagagta

SEQ ID NO: 1551 - DNA, 684 bp, Zea Mays
cgctcatgttccttcaaaagctcaatggtattcagaagtcagtaggtcagaatggtgcagttgaacctgatacatcatgagatataataacgtcagtggatttgtgggaagatggtggctcagatgatggatatgtacttgttaagcaggaggatgttgttgatgagatgacttcatttatggctgcatgcttggtgtcaattaaaaagaccaaggacctgccccctgatcaacttcaaaaagcgcttaggaagacgttttcagctgaaaagaagaaaagtaaaatccggaaggcattggatggaactaaagtcatttataatgttgcttcatggggcgccactgctgttggggtctacaataatcgagcattacatacggtcgcaactacaacgttttagacttcctgccgtgtgatatccaagttcctttgaatattgtgtcaacaactaaggcatgttagaattgcttgcgtgtgtgctttttcattgttcagcagcataaagcttgagaccatttgtttagtctatgcagatgagttcgactgctaattagcagcgcctcccagtcaaaagcagcatgtgtattgtataactgtaaatattgccttgatttgaacaaacttgttttttgtgctagaactttatttcacgaacttcatatgatagaccctactgtagagta

SEQ ID NO: 1552 - DNA, 6409 bp, Zea Mays
caacactttcttggctgtccttcagtctgctgacattttgacaacgaagcactcatgcgtgcgacagcgagagcagccgctgcactgcacagtacgagtgcacagctgcactggcagaagggcacttcaaaagattttgaaaacctgcggaacaaattaataaacgaaccagtagaagccaaacgaaatctttgtatttcatacacttagcttttcccctcctttttcaaaaaaaaaaaccctctcccccaactccacctgcttcgttcgcttcccttcatccccactccaccaaaccctcgcgtcgctgggactgggagcagagtagagcacagcggagcagattagcagaaggtgtcgagtggaagcaaatggccaatgagtggccgcggtggtggtagcatcctcctcgccttttctccccgtctcccgcgttctggttgttgcagcgagcgggagcgggaggacacgtgctacccccgtcgcttctcgggcacgcctccctcactcggatctgggccgcgcgcgcgagatcctgagctccgggttggagagctcccgtgctccagctcaggtgacgtcgatggagcccgcggtggctacagcgggtgaagggcagcggttcaagcggattccgcggcaggcgtggtcggggaacctcgaactgggtcctctgcttaatgaaagcttagatcactggccacatctaaatgagctggtacagtgctacaaggctgattttgtgaaggatgactgcaaatatggacactatgagagtgttgcatcaccgtctttccaaaatcaaatttttgagggacctgatactgacatagaaacagaattgcagctttgcaatgcaaggcattccaagtctgaggatgctactgaagatgatacaccaagcacctcagggaggcaaatatatgaaactgaatcatctggttcgtcttcaaaagtgcactgtagtttgtcaccattgccagcatatgaggctgcatttgattgggagaatgagaggtctttgatatttggccaaagggtgccagaaagtatacctgcaataagcaacagtggcttgaagataactgtcaaggtactatctttgtcattccaagctggattagtcgaacctttcagtggaacgatttgcttgtataacagagatagaagagagaggctgtcagaggacttctatttccatatgcttccaacagatatgcaggaccagggttccttggatcgtcgaggtgttttttcattggacgcaccttctccatcggtctgccttttgattcaattggaaaaggctgctactgaagaagggggagtaacaccttctgtttattctcgtaaagagcctgtgcacttagctgagaaagagaagcaaaagctgcaagtatggtctcgaatcatgccttataaagagtcatttgcatgggccatgattcctctgtttgaaagtaaccgtgcgggtggtcttagtgatgctgcttctcctagcagtcctctagcaccgagtttatcaggatcaagttctcaagatagtattgtggaccctatttcgaagcttgctttagatggaaaagtcaaccattactcaagtggaagctcagttattgtagagatatcaaacctaaacaaagtgaaggaaagctatatagaggactccctccaagacccaaaacggaaagtacataaaccagtgaaaggtgttttgagattagaagtggaaaaacttcatgatgaccataatgatgtggataacgcttctgaaggtggaagcatggccaatgatttgaatgatgctggtgacatcaataatggcagaagcaacagaagtagctttgatgggattcacagttctgtgaattctattgccattgccaaaaaagatgctcatcacaatggacacacttctaatgctgagaatgttgacaattttcaagcttttgactttcgggtgctgacccgaagtgagccattttcgcaactttttcattgcctctatgtgtacccattgactgttagcttgagccgcaaaagaaacctctttgttagagtggaactgagaaaggacgattctgacatcaggaagcctccattagaggctgttcatcctagggagcggaatacgatgctacagaagtggggccatacacagattgctgttggaacaagaatggcttcctaccatgatgaagttaaaatcagcctacctgctcttttgacaccccaacatcatcttgtgttcacatttttccatgtagatcttcaaatgaaacttgaagcaccgaaaccagtgatcattggatattctgtacttccactgtcgacacatattcagttactttcagatgtgtccttgccgattttgagagagctcgttccacattacctgcaggaaagtggaaaggagagaatggactatctggaagatgggaaaactgttttcaggttacgtttaaggctctgctcttcattgttcccaattaatgaaaggataagggacttttttgttgagtatgatcgccatactctacatacaagtcccccatggggttctgagcttcttgaggccataaatagtttgaaaaacgtcgaatctactgcattattacaatttctgcaaccaatacttaacatgttgcttcatcttattggtgatggcggtgagacccttcaggttgctgcatttcgagccatggttaacattttaacccgtgtgcagcaggagtcatcagatggggctgaaagaaatagattccttattaactatgttgattttgctttcgatgacttcggtgatcggcaagcccctgtgtatcctggtctgactactgtttggggaagtcttgctcggagtaaggcgaaaggtgaagatgtcccaccactgcaattgaaagaaggtgtcttcaggtgcatcatgcagctctttgattgccttctaactgaggttcatgagcgttgtaaaaagggtttaagcttggcaaaacgcttgaacagcacacttgctttcttttgctatgatcttttatcaattattgagcctcgccaagtttttgagctggtttcgttgtacatggacaagtttgcaggagtttgtcaatcagtccttcatgactgcaaattgacattcctgcagataatatgcgaccatgatctattcgttgagatgcctgggcgggatccttctgatagaaactatctctcgtcagttctcatccaagagatctttctgaccttagaccatgatgatttatctcaacgagcgaaggctgctcggattttggttgtccttatatgcaaacatgaatttgatgcacgctatcaaaaaagcgaagacaaattgtacattgctcagctgtattttcctcttatagggcagatccttgatgagatgcctgttttctataatctgaatgccattgaaaagcgtgaagtgctagttgtcattttgcaaattgtgaggaacttggatgatgcaactcttatcaaagcatggcaacaaagcattgctagaaccagattgttcttcaagcttcttgaagaatgtataatccatttcgagcacaacaaaacaggagacaacatgctacttggtgctagttctcggagcccagatgtcgagcatcctgcatccccaaagtactctgaacgattgtccccatcggtcaacacatatttgtcggaggcttcgaggcatgaaataaggcctcagggaacaccagaaaatggatacatgtggaacagggttagccctcaattaagttcccctaatcagccctattcattgagagaagcacttgctcaagcacaatcttcaagaatcgggtcaaccgccagggcattgagagagtctctacatccagtgctgagacaaaaaatggaactttgggaagaaaatctcagtactgccgtgagcctcgaagtgttgggaataactgagaagttttcagttgctgcaggcgctcgaagcatcactactgattacgcgaagctagattgtgtaacatcaatcttaatgggtcttttatctaggaaccaatccttggctttttggaaggctttccttcctgtggtctacaatatatttaatgttcatggtgcaacactaatggcaagggagaatgaccgcttcttgaagcaaattgcttttcatcttttgcggcttgctgttttccgaaacgattcgattagaaaaagagctgttgttgggctgcagattcttgttaggaactcattcaactatttcaaaaacactacaaggttaagggtcatgttgacaattactttgtccgagttgatgtccgacgtgcaagtaactcaaatgaaattcgatggttctcttgaagaaagtggtgaagctcggcgccttaggaaatcactggaggaaatggctgatgtgagaagcaaggatctgttaaaagattgtggcctccctgttactgcattggaggcggcccctgaaggctcctctgataataggtggtcttgggtagaggtgaaacatttgtctaaatgtctagtccaggcccttgatgctggtctggaacacgccctcctgggttctgtagtgactgtagacaggtatgcagctgccgagggtttctataaactagctatggcctatgcacccgttccagatcttcacattatgtggttgcttcatctgtgtgatgcacaccaggagatgcaatcatgggctgaagcagcacaatgtgcagttgctgtagctggcgtgatcatgcaggcacttgttggaaggaatgatgctgtgtggagcaaggagcatgttgcttcgctgcgcaagatttgccctattgtcaacactgatgtgagtgcagaagcatctgcagctgaagtcgagggatatggtgcatccaaattaacagtggactcagcggtcaaatatcttcaactagccaataaacttttcacacaagctgaactctaccatttttgtgcaagcattcaggaactcataattcctgtgtataaaagcagaagggcttatggacagctggccaaatgccacacatcgctcacaaacatctatgagtcaattcttgaacaggaggctagccctataccattcattgatgccacatactaccgagttggtttctatggtgagcgttttggcaagctcaataaaaaggagtatgtatttagagaaccacgggatgtacgtcttggtgatattatggagaagcttagtcatatatatgaggctaaaatagatggaagtcacactttacacataattccagactctagacaagtcaacgctgatgagttgcagcctggcttctgctatttacagatcactgctgttgatcctgtgatggaggatgaggacttgggtagcaggagggaaagaatattttctttatctactggtactgttcgtgcacgtgtttttgaccgttttcttttcgatacaccattcacaaaaaatggaaaaacacaaggtggtctagaagaccagtggaagaggcgcacagtgctccaaacagagggttcctttcccgctttggtgaaccgtctgccagttatcaaatctgaatctctggagttctctcctgtcgagaatgcgattggaatgatcgaaacaaggacagctgcattgagaaatgagctagaagaaccacggagttctgaaggtgatcaactcccaaggcttcagagcttgcaaaggatactccaaggaagtgtggctgtgcaggtcaacagtggggtattaagtgtgtgcactgcattcttatctggtgagccagcgactaggctcagatcccaagaactgcagcagctcatcgctgcattgcttgaattcatggctgtctgcaagcgtgcaatccgtgtgcatttcagattgataggggaagaagaccaggaattccacacccaacttgtcaatgggttccagtcactcaccgctgagctatctcactatatccctgctatactctccgagctatgatagaactgtagcaagccagaaattaggtagcatgtgaatggttgttcattcattcagttgcaggttcccaccaaatgtccatatttccattagctttggttgtatagttctaggaaccggaaattaactagtcttcgaagttctgtaccgtattgcagaaccgattcctgattttggagtgtaaagtctgtataatacctagtgttatctgttatgcaccagttatatgctgagttccttcttttttgcagtttgctactatgtcacaactagcggacattttgcacttgtattgtgatacatagtgcatatatatatatatatatatatatatatatatatataaaatgcacctgggtgcattttagtttgtggatgcacagacccaagacttcctgtctccgtcgctgcctcgcgcacagacccaag

SEQ ID NO: 1553 - DNA, 2353 bp, Zea Mays
catgcgtgcgacagcgagagcagccgctgcactgcacagtacgagtgcacagctgcactggcagaagggcacttcaaaagattttgaaaacctgcggaacaaattaataaacgaaccagtagaagccaaacgaaatctttgtatttcatacacttagcttttcccctcctttttcaaaaaaaaaaaccctctcccccaactccacctgcttcgttcgcttcccttcatccccactccaccaaaccctcgcgtcgctgggactgggagcagagtagagcacagcggagcagattagcagaaggtgtcgagtggaagcaaatggccaatgagtggccgcggtggtggtagcatcctcctcgccttttctccccgtctcccgcgttctggttgttgcagcgagcgggagcgggaggacacgtgctacccccgtcgcttctcgggcacgcctccctcactcggatctgggccgcgcgcgcgagatcctgagctccgggttggagagctcccgtgctccagctcaggtgacgtcgatggagcccgcggtggctacagcgggtgaagggcagcggttcaagcggattccgcggcaggcgtggtcggggaacctcgaactgggtcctctgcttaatgaaagcttagatcactggccacatctaaatgagctggtacagtgctacaaggctgattttgtgaaggatgactgcaaatatggacactatgagagtgttgcatcaccgtctttccaaaatcaaatttttgagggacctgatactgacatagaaacagaattgcagctttgcaatgcaaggcattccaagtctgaggatgctactgaagatgatacaccaagcacctcagggaggcaaatatatgaaactgaatcatctggttcgtcttcaaaagtgcactgtagtttgtcaccattgccagcatatgaggctgcatttgattgggagaatgagaggtctttgatatttggccaaagggtgccagaaagtatacctgcaataagcaacagtggcttgaagataactgtcaaggtactatctttgtcattccaagctggattagtcgaacctttcagtggaacgatttgcttgtataacagagatagaagagagaggctgtcagaggacttctatttccatatgcttccaacagatatgcaggaccagggttccttggatcgtcgaggtgttttttcattggacgcaccttctccatcggtctgccttttgattcaattggaaaaggctgctactgaagaagggggagtaacaccttctgtttattctcgtaaagagcctgtgcacttagctgagaaagagaagcaaaagctgcaagtatggtctcgaatcatgccttataaagagtcatttgcatgggccatgattcctctgtttgaaagtaaccgtgcgggtggtcttagtgatgctgcttctcctagcagtcctctagcaccgagtttatcaggatcaagttctcaagatagtattgtggaccctatttcgaagcttgctttagatggaaaagtcaaccattactcaagtggaagctcagttattgtagagatatcaaacctaaacaaagtgaaggaaagctatatagaggactccctccaagacccaaaacggaaagtacataaaccagtgaaaggtgttttgagattagaagtggaaaaacttcatgatgaccataatgatgtggataacgcttctgaaggtggaagcatggccaatgatttgaatgatgctggtgacatcaataatggcagaagcaacagaagtagctttgatgggattcacagttctgtgaattctattgccattgccaaaaaagatgctcatcacaatggacacacttctaatgctgagaatgttgacaattttcaagcttttgactttcgggtgctgacccgaagtgagccattttcgcaactttttcattgcctctatgtgtacccattgactgttagcttgagccgcaaaagaaacctctttgttagagtggaactgagaaaggacgattctgacatcaggaagcctccattagaggctgttcatcctagggagcggaatacgatgctacagaagtggggccatacacagattgctgttggaacaagaatggcttcctaccatgatgaagttaaaatcagcctacctgctcttttgacaccccaacatcatcttgtgttcacatttttccatgtagatcttcaaatgaaacttgaagcaccgaaaccagtgatcattggatattctgtacttccactgtcgacacatattcatatgcaaagatactgtggtgaattttggataagcaacagtacttggatttgttttatactaac

SEQ ID NO: 1554 - DNA, 6117 bp, Zea Mays
cacagctgcactggcagaagggcacttcaaaagattttgaaaacctgcggaacaaattaataaacgaaccagtagaagccaaacgaaatctttgtatttcatacacttagcttttcccctcctttttcaaaaaaaaaaaccctctcccccaactccacctgcttcgttcgcttcccttcatccccactccaccaaaccctcgcgtcgctgggactgggagcagagtagagcacagcggagcagattagcagaaggtgtcgagtggaagcaaatggccaatgagtggccgcggtggtggtagcatcctcctcgccttttctccccgtctcccgcgttctggttgttgcagcgagcgggagcgggaggacacgtgctacccccgtcgcttctcgggcacgcctccctcactcggatctgggccgcgcgcgcgagatcctgagctccgggttggagagctcccgtgctccagctcaggtgacgtcgatggagcccgcggtggctacagcgggtgaagggcagcggttcaagcggattccgcggcaggcgtggtcggggaacctcgaactgggtcctctgcttaatgaaagcttagatcactggccacatctaaatgagctggtacagtgctacaaggctgattttgtgaaggatgactgcaaatatggacactatgagagtgttgcatcaccgtctttccaaaatcaaatttttgagggacctgatactgacatagaaacagaattgcagctttgcaatgcaaggcattccaagtctgaggatgctactgaagatgatacaccaagcacctcagggaggcaaatatatgaaactgaatcatctggttcgtcttcaaaagtgcactgtagtttgtcaccattgccagcatatgaggctgcatttgattgggagaatgagaggtctttgatatttggccaaagggtgccagaaagtatacctgcaataagcaacagtggcttgaagataactgtcaaggtactatctttgtcattccaagctggattagtcgaacctttcagtggaacgatttgcttgtataacagagatagaagagagaggctgtcagaggacttctatttccatatgcttccaacagatatgcaggaccagggttccttggatcgtcgaggtgttttttcattggacgcaccttctccatcggtctgccttttgattcaattggaaaaggctgctactgaagaagggggagtaacaccttctgtttattctcgtaaagagcctgtgcacttagctgagaaagagaagcaaaagctgcaagtatggtctcgaatcatgccttataaagagtcatttgcatgggccatgattcctctgtttgaaagtaaccgtgcgggtggtcttagtgatgctgcttctcctagcagtcctctagcaccgagtttatcaggatcaagttctcaagatagtattgtggaccctatttcgaagcttgctttagatggaaaagtcaaccattactcaagtggaagctcagttattgtagagatatcaaacctaaacaaagtgaaggaaagctatatagaggactccctccaagacccaaaacggaaagtacataaaccagtgaaaggtgttttgagattagaagtggaaaaacttcatgatgaccataatgatgtggataacgcttctgaaggtggaagcatggccaatgatttgaatgatgctggtgacatcaataatggcagaagcaacagaagtagctttgatgggattcacagttctgtgaattctattgccattgccaaaaaagatgctcatcacaatggacacacttctaatgctgagaatgttgacaattttcaagcttttgactttcgggtgctgacccgaagtgagccattttcgcaactttttcattgcctctatgtgtacccattgactgttagcttgagccgcaaaagaaacctctttgttagagtggaactgagaaaggacgattctgacatcaggaagcctccattagaggtgatcattggatattctgtacttccactgtcgacacatattcagttactttcagatgtgtccttgccgattttgagagagctcgttccacattacctgcaggaaagtggaaaggagagaatggactatctggaagatgggaaaactgttttcaggttacgtttaaggctctgctcttcattgttcccaattaatgaaaggataagggacttttttgttgagtatgatcgccatactctacatacaagtcccccatggggttctgagcttcttgaggccataaatagtttgaaaaacgtcgaatctactgcattattacaatttctgcaaccaatacttaacatgttgcttcatcttattggtgatggcggtgagacccttcaggttgctgcatttcgagccatggttaacattttaacccgtgtgcagcaggagtcatcagatggggctgaaagaaatagattccttattaactatgttgattttgctttcgatgacttcggtgatcggcaagcccctgtgtatcctggtctgactactgtttggggaagtcttgctcggagtaaggcgaaaggtgaagatgtcccaccactgcaattgaaagaaggtgtcttcaggtgcatcatgcagctctttgattgccttctaactgaggttcatgagcgttgtaaaaagggtttaagcttggcaaaacgcttgaacagcacacttgctttcttttgctatgatcttttatcaattattgagcctcgccaagtttttgagctggtttcgttgtacatggacaagtttgcaggagtttgtcaatcagtccttcatgactgcaaattgacattcctgcagataatatgcgaccatgatctattcgttgagatgcctgggcgggatccttctgatagaaactatctctcgtcagttctcatccaagagatctttctgaccttagaccatgatgatttatctcaacgagcgaaggctgctcggattttggttgtccttatatgcaaacatgaatttgatgcacgctatcaaaaaagcgaagacaaattgtacattgctcagctgtattttcctcttatagggcagatccttgatgagatgcctgttttctataatctgaatgccattgaaaagcgtgaagtgctagttgtcattttgcaaattgtgaggaacttggatgatgcaactcttatcaaagcatggcaacaaagcattgctagaaccagattgttcttcaagcttcttgaagaatgtataatccatttcgagcacaacaaaacaggagacaacatgctacttggtgctagttctcggagcccagatgtcgagcatcctgcatccccaaagtactctgaacgattgtccccatcggtcaacacatatttgtcggaggcttcgaggcatgaaataaggcctcagggaacaccagaaaatggatacatgtggaacagggttagccctcaattaagttcccctaatcagccctattcattgagagaagcacttgctcaagcacaatcttcaagaatcgggtcaaccgccagggcattgagagagtctctacatccagtgctgagacaaaaaatggaactttgggaagaaaatctcagtactgccgtgagcctcgaagtgttgggaataactgagaagttttcagttgctgcaggcgctcgaagcatcactactgattacgcgaagctagattgtgtaacatcaatcttaatgggtcttttatctaggaaccaatccttggctttttggaaggctttccttcctgtggtctacaatatatttaatgttcatggtgcaacactaatggcaagggagaatgaccgcttcttgaagcaaattgcttttcatcttttgcggcttgctgttttccgaaacgattcgattagaaaaagagctgttgttgggctgcagattcttgttaggaactcattcaactatttcaaaaacactacaaggttaagggtcatgttgacaattactttgtccgagttgatgtccgacgtgcaagtaactcaaatgaaattcgatggttctcttgaagaaagtggtgaagctcggcgccttaggaaatcactggaggaaatggctgatgtgagaagcaaggatctgttaaaagattgtggcctccctgttactgcattggaggcggcccctgaaggctcctctgataataggtggtcttgggtagaggtgaaacatttgtctaaatgtctagtccaggcccttgatgctggtctggaacacgccctcctgggttctgtagtgactgtagacaggtatgcagctgccgagggtttctataaactagctatggcctatgcacccgttccagatcttcacattatgtggttgcttcatctgtgtgatgcacaccaggagatgcaatcatgggctgaagcagcacaatgtgcagttgctgtagctggcgtgatcatgcaggcacttgttggaaggaatgatgctgtgtggagcaaggagcatgttgcttcgctgcgcaagatttgccctattgtcaacactgatgtgagtgcagaagcatctgcagctgaagtcgagggatatggtgcatccaaattaacagtggactcagcggtcaaatatcttcaactagccaataaacttttcacacaagctgaactctaccatttttgtgcaagcattcaggaactcataattcctgtgtataaaagcagaagggcttatggacagctggccaaatgccacacatcgctcacaaacatctatgagtcaattcttgaacaggaggctagccctataccattcattgatgccacatactaccgagttggtttctatggtgagcgttttggcaagctcaataaaaaggagtatgtatttagagaaccacgggatgtacgtcttggtgatattatggagaagcttagtcatatatatgaggctaaaatagatggaagtcacactttacacataattccagactctagacaagtcaacgctgatgagttgcagcctggcttctgctatttacagatcactgctgttgatcctgtgatggaggatgaggacttgggtagcaggagggaaagaatattttctttatctactggtactgttcgtgcacgtgtttttgaccgttttcttttcgatacaccattcacaaaaaatggaaaaacacaaggtggtctagaagaccagtggaagaggcgcacagtgctccaaacagagggttcctttcccgctttggtgaaccgtctgccagttatcaaatctgaatctctggagttctctcctgtcgagaatgcgattggaatgatcgaaacaaggacagctgcattgagaaatgagctagaagaaccacggagttctgaaggtgatcaactcccaaggcttcagagcttgcaaaggatactccaaggaagtgtggctgtgcaggtcaacagtggggtattaagtgtgtgcactgcattcttatctggtgagccagcgactaggctcagatcccaagaactgcagcagctcatcgctgcattgcttgaattcatggctgtctgcaagcgtgcaatccgtgtgcatttcagattgataggggaagaagaccaggaattccacacccaacttgtcaatgggttccagtcactcaccgctgagctatctcactatatccctgctatactctccgagctatgatagaactgtagcaagccagaaattaggtagcatgtgaatggttgttcattcattcagttgcaggttcccaccaaatgtccatatttccattagctttggttgtatagttctaggaaccggaaattaactagtcttcgaagttctgtaccgtattgcagaaccgattcctgattttggagtgtaaagtctgtataatacctagtgttatctgttatgcaccagttatatgctgagttccttcttttttgcagtttgctactatgtcacaactagcggacattttgcacttgtattgtgatacatagtgcatatatatatatatatatatatatatatatatatataaaatgcacctgggtgcattttagtttgtggatgcacagacccaagacttcctgtctccgtcgctgcctcgcgcacagacccaag

SEQ ID NO: 1555 - DNA, 2654 bp, Zea Mays
aagattttgaaaacctgcggaacaaattaataaacgaaccagtagaagccaaacgaaatctttgtatttcatacacttagcttttcccctcctttttcaaaaaaaaaaaccctctcccccaactccacctgcttcgttcgcttcccttcatccccactccaccaaaccctcgcgtcgctgggactgggagcagagtagagcacagcggagcagattagcagaaggtgtcgagtggaagcaaatggccaatgagtggccgcggtggtggtagcatcctcctcgccttttctccccgtctcccgcgttctggttgttgcagcgagcgggagcgggaggacacgtgctacccccgtcgcttctcgggcacgcctccctcactcggatctgggccgcgcgcgcgagatcctgagctccgggttggagagctcccgtgctccagctcaggtgacgtcgatggagcccgcggtggctacagcgggtgaagggcagcggttcaagcggattccgcggcaggcgtggtcggggaacctcgaactgggtcctctgcttaatgaaagcttagatcactggccacatctaaatgagctggtacagtgctacaaggctgattttgtgaaggatgactgcaaatatggacactatgagagtgttgcatcaccgtctttccaaaatcaaatttttgagggacctgatactgacatagaaacagaattgcagctttgcaatgcaaggcattccaagtctgaggatgctactgaagatgatacaccaagcacctcagggaggcaaatatatgaaactgaatcatctggttcgtcttcaaaagtgcactgtagtttgtcaccattgccagcatatgaggctgcatttgattgggagaatgagaggtctttgatatttggccaaagggtgccagaaagtatacctgcaataagcaacagtggcttgaagataactgtcaaggtactatctttgtcattccaagctggattagtcgaacctttcagtggaacgatttgcttgtataacagagatagaagagagaggctgtcagaggacttctatttccatatgcttccaacagatatgcaggttgaccagggttccttggatcgtcgaggtgttttttcattggacgcaccttctccatcggtctgccttttgattcaattggaaaaggctgctactgaagaagggggagtaacaccttctgtttattctcgtaaagagcctgtgcacttagctgagaaagagaagcaaaagctgcaagtatggtctcgaatcatgccttataaagagtcatttgcatgggccatgattcctctgtttgaaagtaaccgtgcgggtggtcttagtgatgctgcttctcctagcagtcctctagcaccgagtttatcaggatcaagttctcaagatagtattgtggaccctatttcgaagcttgctttagatggaaaagtcaaccattactcaagtggaagctcagttattgtagagatatcaaacctaaacaaagtgaaggaaagctatatagaggactccctccaagacccaaaacggaaagtacataaaccagtgaaaggtgttttgagattagaagtggaaaaacttcatgatgaccataatgatgtggataacgcttctgaaggtggaagcatggccaatgatttgaatgatgctggtgacatcaataatggcagaagcaacagaagtagctttgatgggattcacagttctgtgaattctattgccattgccaaaaaagatgctcatcacaatggacacacttctaatgctgagaatgttgacaattttcaagcttttgactttcgggtgctgacccgaagtgagccattttcgcaactttttcattgcctctatgtgtacccattgactgttagcttgagccgcaaaagaaacctctttgttagagtggaactgagaaaggacgattctgacatcaggaagcctccattagaggctgttcatcctagggagcggaatacgatgctacagaagtggggccatacacagattgctgttggaacaagaatggcttcctaccatgatgaagttaaaatcagcctacctgctcttttgacaccccaacatcatcttgtgttcacatttttccatgtagatcttcaaatgaaacttgaagcaccgaaaccagtgatcattggatattctgtacttccactgtcgacacatattcatatgcaaagatactgtggtgaattttggataagcaacagtacttggatttgttttatactaacagagcactgcagtgattcatgatttactaacacgggttactttcagatgtgtccttgccgattttgagagagctcgttccacattacctgcaggaaagtggaaaggagagaatggactatctggaagatgggaaaactgttttcaggttacgtttaaggctctgctcttcattgttcccaattaatgaaaggataagggacttttttgttgagtatgatcgccatactctacatacaagtcccccatggggttctgagcttcttgaggccataaatagtttgaaaaacgtcgaatctactgcattattacaatttctgcaaccaatacttaacatgttgcttcatcttattggtgatggcggtgagacccttcag

SEQ ID NO: 1556 - DNA, 2888 bp, Zea Mays
aagattttgaaaacctgcggaacaaattaataaacgaaccagtagaagccaaacgaaatctttgtatttcatacacttagcttttcccctcctttttcaaaaaaaaaaaccctctcccccaactccacctgcttcgttcgcttcccttcatccccactccaccaaaccctcgcgtcgctgggactgggagcagagtagagcacagcggagcagattagcagaaggtgtcgagtggaagcaaatggccaatgagtggccgcggtggtggtagcatcctcctcgccttttctccccgtctcccgcgttctggttgttgcagcgagcgggagcgggaggacacgtgctacccccgtcgcttctcgggcacgcctccctcactcggatctgggccgcgcgcgcgagatcctgagctccgggttggagagctcccgtgctccagctcaggtgacgtcgatggagcccgcggtggctacagcgggtgaagggcagcggttcaagcggattccgcggcaggcgtggtcggggaacctcgaactgggtcctctgcttaatgaaagcttagatcactggccacatctaaatgagctggtacagtgctacaaggctgattttgtgaaggatgactgcaaatatggacactatgagagtgttgcatcaccgtctttccaaaatcaaatttttgagggacctgatactgacatagaaacagaattgcagctttgcaatgcaaggcattccaagtctgaggatgctactgaagatgatacaccaagcacctcagggaggcaaatatatgaaactgaatcatctggttcgtcttcaaaagtgcactgtagtttgtcaccattgccagcatatgaggctgcatttgattgggagaatgagaggtctttgatatttggccaaagggtgccagaaagtatacctgcaataagcaacagtggcttgaagataactgtcaaggtactatctttgtcattccaagctggattagtcgaacctttcagtggaacgatttgcttgtataacagagatagaagagagaggctgtcagaggacttctatttccatatgcttccaacagatatgcaggttgaccagggttccttggatcgtcgaggtgttttttcattggacgcaccttctccatcggtctgccttttgattcaattggaaaaggctgctactgaagaagggggagtaacaccttctgtttattctcgtaaagagcctgtgcacttagctgagaaagagaagcaaaagctgcaagtatggtctcgaatcatgccttataaagagtcatttgcatgggccatgattcctctgtttgaaagtaaccgtgcgggtggtcttagtgatgctgcttctcctagcagtcctctagcaccgagtttatcaggatcaagttctcaagatagtattgtggaccctatttcgaagcttgctttagatggaaaagtcaaccattactcaagtggaagctcagttattgtagagatatcaaacctaaacaaagtgaaggaaagctatatagaggactccctccaagacccaaaacggaaagtacataaaccagtgaaaggtgttttgagattagaagtggaaaaacttcatgatgaccataatgatgtggataacgcttctgaaggtggaagcatggccaatgatttgaatgatgctggtgacatcaataatggcagaagcaacagaagtagctttgatgggattcacagttctgtgaattctattgccattgccaaaaaagatgctcatcacaatggacacacttctaatgctgagaatgttgacaattttcaagcttttgactttcgggtgctgacccgaagtgagccattttcgcaactttttcattgcctctatgtgtacccattgactgttagcttgagccgcaaaagaaacctctttgttagagtggaactgagaaaggacgattctgacatcaggaagcctccattagaggctgttcatcctagggagcggaatacgatgctacagaagtggggccatacacagattgctgttggaacaagaatggcttcctaccatgatgaagttaaaatcagcctacctgctcttttgacaccccaacatcatcttgtgttcacatttttccatgtagatcttcaaatgaaacttgaagcaccgaaaccagtgatcattggatattctgtacttccactgtcgacacatattcagttactttcagatgtgtccttgccgattttgagagagctcgttccacattacctgcaggaaagtggaaaggagagaatggactatctggaagatgggaaaactgttttcaggttacgtttaaggctctgctcttcattgttcccaattaatgaaaggataagggacttttttgttgagtatgatcgccatactctacatacaagtcccccatggggttctgagcttcttgaggccataaatagtttgaaaaacgtcgaatctactgcattattacaatttctgcaaccaatacttaacatgttgcttcatcttattggtgatggcggtgagacccttcaggttgctgcatttcgagccatggttaacattttaacccgatccgtagcttttaccacatagcaaaaactatgtacctacaactgatttccaatttggaacggatggagtaccaggctaccagctatccatgcggattggacttcttgaattcccattctttgacattaacaaggctaactatttgctggagaagataaaatcaagcctttggatcaagggtgtcattttactcgaaaccccatattatccatgtattttgtagaaggaaaaaaagtccaaattacccccctcacttatgtacattgttcacatgaccccctaaagtgtttttt

SEQ ID NO: 1557 - DNA, 6015 bp, Zea Mays
aagattttgaaaacctgcggaacaaattaataaacgaaccagtagaagccaaacgaaatctttgtatttcatacacttagcttttcccctcctttttcaaaaaaaaaaaccctctcccccaactccacctgcttcgttcgcttcccttcatccccactccaccaaaccctcgcgtcgctgggactgggagcagagtagagcacagcggagcagattagcagaaggtgtcgagtggaagcaaatggccaatgagtggccgcggtggtggtagcatcctcctcgccttttctccccgtctcccgcgttctggttgttgcagcgagcgggagcgggaggacacgtgctacccccgtcgcttctcgggcacgcctccctcactcggatctgggccgcgcgcgcgagatcctgagctccgggttggagagctcccgtgctccaggtgacgtcgatggagcccgcggtggctacagcgggtgaagggcagcggttcaagcggattccgcggcaggcgtggtcggggaacctcgaactgggtcctctgcttaatgaaagcttagatcactggccacatctaaatgagctggtacagtgctacaaggctgattttgtgaaggatgactgcaaatatggacactatgagagtgttgcatcaccgtctttccaaaatcaaatttttgagggacctgatactgacatagaaacagaattgcagctttgcaatgcaaggcattccaagtctgaggatgctactgaagatgatacaccaagcacctcagggaggcaaatatatgaaactgaatcatctggttcgtcttcaaaagtgcactgtagtttgtcaccattgccagcatatgaggctgcatttgattgggagaatgagaggtctttgatatttggccaaagggtgccagaaagtatacctgcaataagcaacagtggcttgaagataactgtcaaggtactatctttgtcattccaagctggattagtcgaacctttcagtggaacgatttgcttgtataacagagatagaagagagaggctgtcagaggacttctatttccatatgcttccaacagatatgcaggttgaccagggttccttggatcgtcgaggtgttttttcattggacgcaccttctccatcggtctgccttttgattcaattggaaaaggctgctactgaagaagggggagtaacaccttctgtttattctcgtaaagagcctgtgcacttagctgagaaagagaagcaaaagctgcaagtatggtctcgaatcatgccttataaagagtcatttgcatgggccatgattcctctgtttgaaagtaaccgtgcgggtggtcttagtgatgctgcttctcctagcagtcctctagcaccgagtttatcaggatcaagttctcaagatagtattgtggaccctatttcgaagcttgctttagatggaaaagtcaaccattactcaagtggaagctcagttattgtagagatatcaaacctaaacaaagtgaaggaaagctatatagaggactccctccaagacccaaaacggaaagtacataaaccagtgaaaggtgttttgagattagaagtggaaaaacttcatgatgaccataatgatgtggataacgcttctgaaggtggaagcatggccaatgatttgaatgatgctggtgacatcaataatggcagaagcaacagaagtagctttgatgggattcacagttctgtgaattctattgccattgccaaaaaagatgctcatcacaatggacacacttctaatgctgagaatgttgacaattttcaagcttttgactttcgggtgctgacccgaagtgagccattttcgcaactttttcattgcctctatgtgtacccattgactgttagcttgagccgcaaaagaaacctctttgttagagtggaactgagaaaggacgattctgacatcaggaagcctccattagaggtgatcattggatattctgtacttccactgtcgacacatattcagttactttcagatgtgtccttgccgattttgagagagctcgttccacattacctgcaggaaagtggaaaggagagaatggactatctggaagatgggaaaactgttttcaggttacgtttaaggctctgctcttcattgttcccaattaatgaaaggataagggacttttttgttgagtatgatcgccatactctacatacaagtcccccatggggttctgagcttcttgaggccataaatagtttgaaaaacgtcgaatctactgcattattacaatttctgcaaccaatacttaacatgttgcttcatcttattggtgatggcggtgagacccttcaggttgctgcatttcgagccatggttaacattttaacccgtgtgcagcaggagtcatcagatggggctgaaagaaatagattccttattaactatgttgattttgctttcgatgacttcggtgatcggcaagcccctgtgtatcctggtctgactactgtttggggaagtcttgctcggagtaaggcgaaaggttatagagttggtcctgtgtatgatgatgtgttggcaatggcttggttttttctggagcttattgtaaaatcaatgggattggaacaaaagttcgtcttctttctaccacaatcttccactaggtgaagatgtcccaccactgcaattgaaagaaggtgtcttcaggtgcatcatgcagctctttgattgccttctaactgaggttcatgagcgttgtaaaaagggtttaagcttggcaaaacgcttgaacagcacacttgctttcttttgctatgatcttttatcaattattgagcctcgccaagtttttgagctggtttcgttgtacatggacaagtttgcaggagtttgtcaatcagtccttcatgactgcaaattgacattcctgcagataatatgcgaccatgatctattcgttgagatgcctgggcgggatccttctgatagaaactatctctcgtcagttctcatccaagagatctttctgaccttagaccatgatgatttatctcaacgagcgaaggctgctcggattttggttgtccttatatgcaaacatgaatttgatgcacgctatcaaaaaagcgaagacaaattgtacattgctcagctgtattttcctcttatagggcagatccttgatgagatgcctgttttctataatctgaatgccattgaaaagcgtgaagtgctagttgtcattttgcaaattgtgaggaacttggatgatgcaactcttatcaaagcatggcaacaaagcattgctagaaccagattgttcttcaagcttcttgaagaatgtataatccatttcgagcacaacaaaacaggagacaacatgctacttggtgctagttctcggagcccagatgtcgagcatcctgcatccccaaagtactctgaacgattgtccccatcggtcaacacatatttgtcggaggcttcgaggcatgaaataaggcctcagggaacaccagaaaatggatacatgtggaacagggttagccctcaattaagttcccctaatcagccctattcattgagagaagcacttgctcaagcacaatcttcaagaatcgggtcaaccgccagggcattgagagagtctctacatccagtgctgagacaaaaaatggaactttgggaagaaaatctcagtactgccgtgagcctcgaagtgttgggaataactgagaagttttcagttgctgcaggcgctcgaagcatcactactgattacgcgaagctagattgtgtaacatcaatcttaatgggtcttttatctaggaaccaatccttggctttttggaaggctttccttcctgtggtctacaatatatttaatgttcatggtgcaacactaatggcaagggagaatgaccgcttcttgaagcaaattgcttttcatcttttgcggcttgctgttttccgaaacgattcgattagaaaaagagctgttgttgggctgcagattcttgttaggaactcattcaactatttcaaaaacactacaaggttaagggtcatgttgacaattactttgtccgagttgatgtccgacgtgcaagtaactcaaatgaaattcgatggttctcttgaagaaagtggtgaagctcggcgccttaggaaatcactggaggaaatggctgatgtgagaagcaaggatctgttaaaagattgtggcctccctgttactgcattggaggcggcccctgaaggctcctctgataataggtggtcttgggtagaggtgaaacatttgtctaaatgtctagtccaggcccttgatgctggtctggaacacgccctcctgggttctgtagtgactgtagacaggtatgcagctgccgagggtttctataaactagctatggcctatgcacccgttccagatcttcacattatgtggttgcttcatctgtgtgatgcacaccaggagatgcaatcatgggctgaagcagcacaatgtgcagttgctgtagctggcgtgatcatgcaggcacttgttggaaggaatgatgctgtgtggagcaaggagcatgttgcttcgctgcgcaagatttgccctattgtcaacactgatgtgagtgcagaagcatctgcagctgaagtcgagggatatggtgcatccaaattaacagtggactcagcggtcaaatatcttcaactagccaataaacttttcacacaagctgaactctaccatttttgtgcaagcattcaggaactcataattcctgtgtataaaagcagaagggcttatggacagctggccaaatgccacacatcgctcacaaacatctatgagtcaattcttgaacaggaggctagccctataccattcattgatgccacatactaccgagttggtttctatgatcactgctgttgatcctgtgatggaggatgaggacttgggtagcaggagggaaagaatattttctttatctactggtactgttcgtgcacgtgtttttgaccgttttcttttcgatacaccattcacaaaaaatggaaaaacacaaggtggtctagaagaccagtggaagaggcgcacagtgctccaaacagagggttcctttcccgctttggtgaaccgtctgccagttatcaaatctgaatctctggagttctctcctgtcgagaatgcgattggaatgatcgaaacaaggacagctgcattgagaaatgagctagaagaaccacggagttctgaaggtgatcaactcccaaggcttcagagcttgcaaaggatactccaaggaagtgtggctgtgcaggtcaacagtggggtattaagtgtgtgcactgcattcttatctggtgagccagcgactaggctcagatcccaagaactgcagcagctcatcgctgcattgcttgaattcatggctgtctgcaagcgtgcaatccgtgtgcatttcagattgataggggaagaagaccaggaattccacacccaacttgtcaatgggttccagtcactcaccgctgagctatctcactatatccctgctatactctccgagctatgatagaactgtagcaagccagaaattaggtagcatgtgaatggttgttcattcattcagttgcaggttcccaccaaatgtccatatttccattagctttggttgtatagttctaggaaccggaaattaactagtcttcgaagttctgtaccgtattgcagaaccgattcctgattttggagtgtaaagtctgtataatacctagtgttatctgttatgcaccagttatatgctgagttccttcttttttgcagtttgctactatgtcacaactagcggacattttgcacttgtattgtgatacatagtgcatatatatatatatatatatatatatatatatatataaaatgcacctgggtgcattttagtttgtggatgcacagacccaagacttcctgtctccgtcgctgcctcgcgcacagacccaag

SEQ ID NO: 1558 - DNA, 7594 bp, Zea Mays
aagattttgaaaacctgcggaacaaattaataaacgaaccagtagaagccaaacgaaatctttgtatttcatacacttagcttttcccctcctttttcaaaaaaaaaaaccctctcccccaactccacctgcttcgttcgcttcccttcatccccactccaccaaaccctcgcgtcgctgggactgggagcagagtagagcacagcggagcagattagcagaaggtgtcgagtggaagcaaatggccaatgagtggccgcggtggtggtagcatcctcctcgccttttctccccgtctcccgcgttctggttgttgcagcgagcgggagcgggaggacacgtgctacccccgtcgcttctcgggcacgcctccctcactcggatctgggccgcgcgcgcgagatcctgagctccgggttggagagctcccgtgctccagctcaggtgacgtcgatggagcccgcggtggctacagcgggtgaagggcagcggttcaagcggattccgcggcaggcgtggtcggggaacctcgaactgggtcctctgcttaatgaaagcttagatcactggccacatctaaatgagctggtacagtgctacaaggctgattttgtgaaggatgactgcaaatatggacactatgagagtgttgcatcaccgtctttccaaaatcaaatttttgagggacctgatactgacatagaaacagaattgcagctttgcaatgcaaggcattccaagtctgaggatgctactgaagatgatacaccaagcacctcagggaggcaaatatatgaaactgaatcatctggttcgtcttcaaaagtgcactgtagtttgtcaccattgccagcatatgaggctgcatttgattgggagaatgagaggtctttgatatttggccaaagggtgccagaaagtatacctgcaataagcaacagtggcttgaagataactgtcaaggtactatctttgtcattccaagctggattagtcgaacctttcagtggaacgatttgcttgtataacagagatagaagagagaggctgtcagaggacttctatttccatatgcttccaacagatatgcaggaccagggttccttggatcgtcgaggtgttttttcattggacgcaccttctccatcggtctgccttttgattcaattggaaaaggctgctactgaagaagggggagtaacaccttctgtttattctcgtaaagagcctgtgcacttagctgagaaagagaagcaaaagctgcaagtatggtctcgaatcatgccttataaagagtcatttgcatgggccatgattcctctgtttgaaagtaaccgtgcgggtggtcttagtgatgctgcttctcctagcagtcctctagcaccgagtttatcaggatcaagttctcaagatagtattgtggaccctatttcgaagcttgctttagatggaaaagtcaaccattactcaagtggaagctcagttattgtagagatatcaaacctaaacaaagtgaaggaaagctatatagaggactccctccaagacccaaaacggaaagtacataaaccagtgaaaggtgttttgagattagaagtggaaaaacttcatgatgaccataatgatgtggataacgcttctgaaggtggaagcatggccaatgatttgaatgatgctggtgacatcaataatggcagaagcaacagaagtagctttgatgggattcacagttctgtgaattctattgccattgccaaaaaagatgctcatcacaatggacacacttctaatgctgagaatgttgacaattttcaagcttttgactttcgggtgctgacccgaagtgagccattttcgcaactttttcattgcctctatgtgtacccattgactgttagcttgagccgcaaaagaaacctctttgttagagtggaactgagaaaggacgattctgacatcaggaagcctccattagaggctgttcatcctagggagcggaatacgatgctacagaagtggggccatacacagattgctgttggaacaagaatggcttcctaccatgatgaagttaaaatcagcctacctgctcttttgacaccccaacatcatcttgtgttcacatttttccatgtagatcttcaaatgaaacttgaagcaccgaaaccagtgatcattggatattctgtacttccactgtcgacacatattcagttactttcagatgtgtccttgccgattttgagagagctcgttccacattacctgcaggaaagtggaaaggagagaatggactatctggaagatgggaaaactgttttcaggttacgtttaaggctctgctcttcattgttcccaattaatgaaaggataagggacttttttgttgagtatgatcgccatactctacatacaagtcccccatggggttctgagcttcttgaggccataaatagtttgaaaaacgtcgaatctactgcattattacaatttctgcaaccaatacttaacatgttgcttcatcttattggtgatggcggtgagacccttcaggttgctgcatttcgagccatggttaacattttaacccgtgtgcagcaggagtcatcagatggggctgaaagaaatagattccttattaactatgttgattttgctttcgatgacttcggtgatcggcaagcccctgtgtatcctggtctgactactgtttggggaagtcttgctcggagtaaggagagctgcacatcaataatattaaagagaaaaaaggtccaaagtggacctagtacaagaagaccttatggaggccagaatttagagtacagaaacacacacacagtaaaaaaaactcagcagacacctcagcactagctaggcataaaactctaccacacagctagaacaggagctaatcgacctgaaggaaagacagagctttggtctccgttagagaccagaggatagcttcctctcttgctgcccgaaaggccaccaccagacttgtactgcagccatcgaacacgcacctgttcctatgcttccagataatccaagctcctaaaataaccaaagagttgaagtctttccttgctgcctcaatcactctggagcttctactcatccaccgtgtctcaaaagaatggtcttcctattggggacagaggccttgccaacatccaatcttcaagagctcaaaccagaattgtttggcaaagacgcagtcaaccagtaaatggttgattgattcagcaacctgatcacacaacaagcacctctccggatggtcaagacctcgctttgtgagtctatcagctgtccaacatctgtcatgctcaactaaccaaatgaaaaatttgcaccaggggcaggggaggctggcggcggctggagggagggaagacgaggaaactagaaaccctagctctgataccatgtagaatgggagtaaacctaaccctagcaggggttgggagatgtatttataataggaatagttgggcctaggcccattacagagggacgagagggtggaccctaatacagttctaacacttttgatctctagcctagcccaactagtttgggactaaaaggccttattgttattttacttgatttatcgattatttccatgtttaaattgtatctgctgcatagaagaccttgacagtgacagctgtcatattgcttataaaacatctcagatcttgaatgctgccatgttgccacacattgtttgatcacactgtattttgtaacttatgaaatctcgagaaattcacattgtattgatttttcaaatcaaaagggctacaagtaaaagggcaaactggggttaggcccagtgctatttttgcaatttctctattgttaacataattacatccttgtactgctcccactatttactcttttggcttttaggcgaaaggttatagagttggtcctgtgtatgatgatgtgttggcaatggcttggttttttctggagcttattgtaaaatcaatgggattggaacaaaagttcgtcttctttctaccacaatcttccactaggtgaagatgtcccaccactgcaattgaaagaaggtgtcttcaggtgcatcatgcagctctttgattgccttctaactgaggttcatgagcgttgtaaaaagggtttaagcttggcaaaacgcttgaacagcacacttgctttcttttgctatgatcttttatcaattattgagcctcgccaagtttttgagctggtttcgttgtacatggacaagtttgcaggagtttgtcaatcagtccttcatgactgcaaattgacattcctgcagataatatgcgaccatgatctattcgttgagatgcctgggcgggatccttctgatagaaactatctctcgtcagttctcatccaagagatctttctgaccttagaccatgatgatttatctcaacgagcgaaggctgctcggattttggttgtccttatatgcaaacatgaatttgatgcacgctatcaaaaaagcgaagacaaattgtacattgctcagctgtattttcctcttatagggcagatccttgatgagatgcctgttttctataatctgaatgccattgaaaagcgtgaagtgctagttgtcattttgcaaattgtgaggaacttggatgatgcaactcttatcaaagcatggcaacaaagcattgctagaaccagattgttcttcaagcttcttgaagaatgtataatccatttcgagcacaacaaaacaggagacaacatgctacttggtgctagttctcggagcccagatgtcgagcatcctgcatccccaaagtactctgaacgattgtccccatcggtcaacacatatttgtcggaggcttcgaggcatgaaataaggcctcagggaacaccagaaaatggatacatgtggaacagggttagccctcaattaagttcccctaatcagccctattcattgagagaagcacttgctcaagcacaatcttcaagaatcgggtcaaccgccagggcattgagagagtctctacatccagtgctgagacaaaaaatggaactttgggaagaaaatctcagtactgccgtgagcctcgaagtgttgggaataactgagaagttttcagttgctgcaggcgctcgaagcatcactactgattacgcgaagctagattgtgtaacatcaatcttaatgggtcttttatctaggaaccaatccttggctttttggaaggctttccttcctgtggtctacaatatatttaatgttcatggtgcaacactaatggcaagggagaatgaccgcttcttgaagcaaattgcttttcatcttttgcggcttgctgttttccgaaacgattcgattagaaaaagagctgttgttgggctgcagattcttgttaggaactcattcaactatttcaaaaacactacaaggttaagggtcatgttgacaattactttgtccgagttgatgtccgacgtgcaagtaactcaaatgaaattcgatggttctcttgaagaaagtggtgaagctcggcgccttaggaaatcactggaggaaatggctgatgtgagaagcaaggatctgttaaaagattgtggcctccctgttactgcattggaggcggcccctgaaggctcctctgataataggtggtcttgggtagaggtgaaacatttgtctaaatgtctagtccaggcccttgatgctggtctggaacacgccctcctgggttctgtagtgactgtagacaggtatgcagctgccgagggtttctataaactagctatggcctatgcacccgttccagatcttcacattatgtggttgcttcatctgtgtgatgcacaccaggagatgcaatcatgggctgaagcagcacaatgtgcagttgctgtagctggcgtgatcatgcaggcacttgttggaaggaatgatgctgtgtggagcaaggagcatgttgcttcgctgcgcaagatttgccctattgtcaacactgatgtgagtgcagaagcatctgcagctgaagtcgagggatatggtgcatccaaattaacagtggactcagcggtcaaatatcttcaactagccaataaacttttcacacaagctgaactctaccatttttgtgcaagcattcaggaactcataattcctgtgtataaaagcagaagggcttatggacagctggccaaatgccacacatcgctcacaaacatctatgagtcaattcttgaacaggaggctagccctataccattcattgatgccacatactaccgagttggtttctatggtgagcgttttggcaagctcaataaaaaggagtatgtatttagagaaccacgggatgtacgtcttggtgatattatggagaagcttagtcatatatatgaggctaaaatagatggaagtcacactttacacataattccagactctagacaagtcaacgctgatgagttgcagcctggcttctgctatttacagatcactgctgttgatcctgtgatggaggatgaggacttgggtagcaggagggaaagaatattttctttatctactggtactgttcgtgcacgtgtttttgaccgttttcttttcgatacaccattcacaaaaaatggaaaaacacaaggtggtctagaagaccagtggaagaggcgcacagtgctccaaacagagggttcctttcccgctttggtgaaccgtctgccagttatcaaatctgaatctctggagttctctcctgtcgagaatgcgattggaatgatcgaaacaaggacagctgcattgagaaatgagctagaagaaccacggagttctgaaggtgatcaactcccaaggcttcagagcttgcaaaggatactccaaggaagtgtggctgtgcaggtcaacagtggggtattaagtgtgtgcactgcattcttatctggtgagccagcgactaggctcagatcccaagaactgcagcagctcatcgctgcattgcttgaattcatggctgtctgcaagcgtgcaatccgtgtgcatttcagattgataggggaagaagaccaggaattccacacccaacttgtcaatgggttccagtcactcaccgctgagctatctcactatatccctgctatactctccgagctatgatagaactgtagcaagccagaaattaggtagcatgtgaatggttgttcattcattcagttgcaggttcccaccaaatgtccatatttccattagctttggttgtatagttctaggaaccggaaattaactagtcttcgaagttctgtaccgtattgcagaaccgattcctgattttggagtgtaaagtctgtataatacctagtgttatctgttatgcaccagttatatgctgagttccttcttttttgcagtttgctactatgtcacaactagcggacattttgcacttgtattgtgatacatagtgcatatatatatatatatatatatatatatatatatataaaatgcacctgggtgcattttagtttgtggatgcacagacccaagacttcctgtctccgtcgctgcctcgcgcacagacccaag

SEQ ID NO: 1559 - DNA, 6277 bp, Zea Mays
aagattttgaaaacctgcggaacaaattaataaacgaaccagtagaagccaaacgaaatctttgtatttcatacacttagcttttcccctcctttttcaaaaaaaaaaaccctctcccccaactccacctgcttcgttcgcttcccttcatccccactccaccaaaccctcgcgtcgctgggactgggagcagagtagagcacagcggagcagattagcagaaggtgtcgagtggaagcaaatggccaatgagtggccgcggtggtggtagcatcctcctcgccttttctccccgtctcccgcgttctggttgttgcagcgagcgggagcgggaggacacgtgctacccccgtcgcttctcgggcacgcctccctcactcggatctgggccgcgcgcgcgagatcctgagctccgggttggagagctcccgtgctccaggtgacgtcgatggagcccgcggtggctacagcgggtgaagggcagcggttcaagcggattccgcggcaggcgtggtcggggaacctcgaactgggtcctctgcttaatgaaagcttagatcactggccacatctaaatgagctggtacagtgctacaaggctgattttgtgaaggatgactgcaaatatggacactatgagagtgttgcatcaccgtctttccaaaatcaaatttttgagggacctgatactgacatagaaacagaattgcagctttgcaatgcaaggcattccaagtctgaggatgctactgaagatgatacaccaagcacctcagggaggcaaatatatgaaactgaatcatctggttcgtcttcaaaagtgcactgtagtttgtcaccattgccagcatatgaggctgcatttgattgggagaatgagaggtctttgatatttggccaaagggtgccagaaagtatacctgcaataagcaacagtggcttgaagataactgtcaaggtactatctttgtcattccaagctggattagtcgaacctttcagtggaacgatttgcttgtataacagagatagaagagagaggctgtcagaggacttctatttccatatgcttccaacagatatgcaggttgaccagggttccttggatcgtcgaggtgttttttcattggacgcaccttctccatcggtctgccttttgattcaattggaaaaggctgctactgaagaagggggagtaacaccttctgtttattctcgtaaagagcctgtgcacttagctgagaaagagaagcaaaagctgcaagtatggtctcgaatcatgccttataaagagtcatttgcatgggccatgattcctctgtttgaaagtaaccgtgcgggtggtcttagtgatgctgcttctcctagcagtcctctagcaccgagtttatcaggatcaagttctcaagatagtattgtggaccctatttcgaagcttgctttagatggaaaagtcaaccattactcaagtggaagctcagttattgtagagatatcaaacctaaacaaagtgaaggaaagctatatagaggactccctccaagacccaaaacggaaagtacataaaccagtgaaaggtgttttgagattagaagtggaaaaacttcatgatgaccataatgatgtggataacgcttctgaaggtggaagcatggccaatgatttgaatgatgctggtgacatcaataatggcagaagcaacagaagtagctttgatgggattcacagttctgtgaattctattgccattgccaaaaaagatgctcatcacaatggacacacttctaatgctgagaatgttgacaattttcaagcttttgactttcgggtgctgacccgaagtgagccattttcgcaactttttcattgcctctatgtgtacccattgactgttagcttgagccgcaaaagaaacctctttgttagagtggaactgagaaaggacgattctgacatcaggaagcctccattagaggctgttcatcctagggagcggaatacgatgctacagaagtggggccatacacagattgctgttggaacaagaatggcttcctaccatgatgaagttaaaatcagcctacctgctcttttgacaccccaacatcatcttgtgttcacatttttccatgtagatcttcaaatgaaacttgaagcaccgaaaccagtgatcattggatattctgtacttccactgtcgacacatattcagttactttcagatgtgtccttgccgattttgagagagctcgttccacattacctgcaggaaagtggaaaggagagaatggactatctggaagatgggaaaactgttttcaggttacgtttaaggctctgctcttcattgttcccaattaatgaaaggataagggacttttttgttgagtatgatcgccatactctacatacaagtcccccatggggttctgagcttcttgaggccataaatagtttgaaaaacgtcgaatctactgcattattacaatttctgcaaccaatacttaacatgttgcttcatcttattggtgatggcggtgagacccttcaggttgctgcatttcgagccatggttaacattttaacccgtgtgcagcaggagtcatcagatggggctgaaagaaatagattccttattaactatgttgattttgctttcgatgacttcggtgatcggcaagcccctgtgtatcctggtctgactactgtttggggaagtcttgctcggagtaaggcgaaaggtgaagatgtcccaccactgcaattgaaagaaggtgtcttcaggtgcatcatgcagctctttgattgccttctaactgaggttcatgagcgttgtaaaaagggtttaagcttggcaaaacgcttgaacagcacacttgctttcttttgctatgatcttttatcaattattgagcctcgccaagtttttgagctggtttcgttgtacatggacaagtttgcaggagtttgtcaatcagtccttcatgactgcaaattgacattcctgcagataatatgcgaccatgatctattcgttgagatgcctgggcgggatccttctgatagaaactatctctcgtcagttctcatccaagagatctttctgaccttagaccatgatgatttatctcaacgagcgaaggctgctcggattttggttgtccttatatgcaaacatgaatttgatgcacgctatcaaaaaagcgaagacaaattgtacattgctcagctgtattttcctcttatagggcagatccttgatgagatgcctgttttctataatctgaatgccattgaaaagcgtgaagtgctagttgtcattttgcaaattgtgaggaacttggatgatgcaactcttatcaaagcatggcaacaaagcattgctagaaccagattgttcttcaagcttcttgaagaatgtataatccatttcgagcacaacaaaacaggagacaacatgctacttggtgctagttctcggagcccagatgtcgagcatcctgcatccccaaagtactctgaacgattgtccccatcggtcaacacatatttgtcggaggcttcgaggcatgaaataaggcctcagggaacaccagaaaatggatacatgtggaacagggttagccctcaattaagttcccctaatcagccctattcattgagagaagcacttgctcaagcacaatcttcaagaatcgggtcaaccgccagggcattgagagagtctctacatccagtgctgagacaaaaaatggaactttgggaagaaaatctcagtactgccgtgagcctcgaagtgttgggaataactgagaagttttcagttgctgcaggcgctcgaagcatcactactgattacgcgaagctagattgtgtaacatcaatcttaatgggtcttttatctaggaaccaatccttggctttttggaaggctttccttcctgtggtctacaatatatttaatgttcatggtgcaacactaatggcaagggagaatgaccgcttcttgaagcaaattgcttttcatcttttgcggcttgctgttttccgaaacgattcgattagaaaaagagctgttgttgggctgcagattcttgttaggaactcattcaactatttcaaaaacactacaaggttaagggtcatgttgacaattactttgtccgagttgatgtccgacgtgcaagtaactcaaatgaaattcgatggttctcttgaagaaagtggtgaagctcggcgccttaggaaatcactggaggaaatggctgatgtgagaagcaaggatctgttaaaagattgtggcctccctgttactgcattggaggcggcccctgaaggctcctctgataataggtggtcttgggtagaggtgaaacatttgtctaaatgtctagtccaggcccttgatgctggtctggaacacgccctcctgggttctgtagtgactgtagacaggtatgcagctgccgagggtttctataaactagctatggcctatgcacccgttccagatcttcacattatgtggttgcttcatctgtgtgatgcacaccaggagatgcaatcatgggctgaagcagcacaatgtgcagttgctgtagctggcgtgatcatgcaggcacttgttggaaggaatgatgctgtgtggagcaaggagcatgttgcttcgctgcgcaagatttgccctattgtcaacactgatgtgagtgcagaagcatctgcagctgaagtcgagggatatggtgcatccaaattaacagtggactcagcggtcaaatatcttcaactagccaataaacttttcacacaagctgaactctaccatttttgtgcaagcattcaggaactcataattcctgtgtataaaagcagaagggcttatggacagctggccaaatgccacacatcgctcacaaacatctatgagtcaattcttgaacaggaggctagccctataccattcattgatgccacatactaccgagttggtttctatggtgagcgttttggcaagctcaataaaaaggagtatgtatttagagaaccacgggatgtacgtcttggtgatattatggagaagcttagtcatatatatgaggctaaaatagatggaagtcacactttacacataattccagactctagacaagtcaacgctgatgagttgcagcctggcttctgctatttacagatcactgctgttgatcctgtgatggaggatgaggacttgggtagcaggagggaaagaatattttctttatctactggtactgttcgtgcacgtgtttttgaccgttttcttttcgatacaccattcacaaaaaatggaaaaacacaaggtggtctagaagaccagtggaagaggcgcacagtgctccaaacagagggttcctttcccgctttggtgaaccgtctgccagttatcaaatctgaatctctggagttctctcctgtcgagaatgcgattggaatgatcgaaacaaggacagctgcattgagaaatgagctagaagaaccacggagttctgaaggtgatcaactcccaaggcttcagagcttgcaaaggatactccaaggaagtgtggctgtgcaggtcaacagtggggtattaagtgtgtgcactgcattcttatctggtgagccagcgactaggctcagatcccaagaactgcagcagctcatcgctgcattgcttgaattcatggctgtctgcaagcgtgcaatccgtgtgcatttcagattgataggggaagaagaccaggaattccacacccaacttgtcaatgggttccagtcactcaccgctgagctatctcactatatccctgctatactctccgagctatgatagaactgtagcaagccagaaattaggtagcatgtgaatggttgttcattcattcagttgcaggttcccaccaaatgtccatatttccattagctttggttgtatagttctaggaaccggaaattaactagtcttcgaagttctgtaccgtattgcagaaccgattcctgattttggagtgtaaagtctgtataatacctagtgttatctgttatgcaccagttatatgctgagttccttcttttttgcagtttgctactatgtcacaactagcggacattttgcacttgtattgtgatacatagtgcatatatatatatatatatatatatatatatatatataaaatgcacctgggtgcattttagtttgtggatgcacagacccaagacttcctgtctccgtcgctgcctcgcgcacagacccaag

SEQ ID NO: 1560 - DNA, 6171 bp, Zea Mays
aagattttgaaaacctgcggaacaaattaataaacgaaccagtagaagccaaacgaaatctttgtatttcatacacttagcttttcccctcctttttcaaaaaaaaaaaccctctcccccaactccacctgcttcgttcgcttcccttcatccccactccaccaaaccctcgcgtcgctgggactgggagcagagtagagcacagcggagcagattagcagaaggtgtcgagtggaagcaaatggccaatgagtggccgcggtggtggtagcatcctcctcgccttttctccccgtctcccgcgttctggttgttgcagcgagcgggagcgggaggacacgtgctacccccgtcgcttctcgggcacgcctccctcactcggatctgggccgcgcgcgcgagatcctgagctccgggttggagagctcccgtgctccagctcaggtgacgtcgatggagcccgcggtggctacagcgggtgaagggcagcggttcaagcggattccgcggcaggcgtggtcggggaacctcgaactgggtcctctgcttaatgaaagcttagatcactggccacatctaaatgagctggtacagtgctacaaggctgattttgtgaaggatgactgcaaatatggacactatgagagtgttgcatcaccgtctttccaaaatcaaatttttgagggacctgatactgacatagaaacagaattgcagctttgcaatgcaaggcattccaagtctgaggatgctactgaagatgatacaccaagcacctcagggaggcaaatatatgaaactgaatcatctggttcgtcttcaaaagtgcactgtagtttgtcaccattgccagcatatgaggctgcatttgattgggagaatgagaggtctttgatatttggccaaagggtgccagaaagtatacctgcaataagcaacagtggcttgaagataactgtcaaggtactatctttgtcattccaagctggattagtcgaacctttcagtggaacgatttgcttgtataacagagatagaagagagaggctgtcagaggacttctatttccatatgcttccaacagatatgcaggaccagggttccttggatcgtcgaggtgttttttcattggacgcaccttctccatcggtctgccttttgattcaattggaaaaggctgctactgaagaagggggagtaacaccttctgtttattctcgtaaagagcctgtgcacttagctgagaaagagaagcaaaagctgcaagtatggtctcgaatcatgccttataaagagtcatttgcatgggccatgattcctctgtttgaaagtaaccgtgcgggtggtcttagtgatgctgcttctcctagcagtcctctagcaccgagtttatcaggatcaagttctcaagatagtattgtggaccctatttcgaagcttgctttagatggaaaagtcaaccattactcaagtggaagctcagttattgtagagatatcaaacctaaacaaagtgaaggaaagctatatagaggactccctccaagacccaaaacggaaagtacataaaccagtgaaaggtgttttgagattagaagtggaaaaacttcatgatgaccataatgatgtggataacgcttctgaaggtggaagcatggccaatgatttgaatgatgctggtgacatcaataatggcagaagcaacagaagtagctttgatgggattcacagttctgtgaattctattgccattgccaaaaaagatgctcatcacaatggacacacttctaatgctgagaatgttgacaattttcaagcttttgactttcgggtgctgacccgaagtgagccattttcgcaactttttcattgcctctatgtgtacccattgactgttagcttgagccgcaaaagaaacctctttgttagagtggaactgagaaaggacgattctgacatcaggaagcctccattagaggctgttcatcctagggagcggaatacgatgctacagaagtggggccatacacagattgctgttggaacaagaatggcttcctaccatgatgaagttaaaatcagcctacctgctcttttgacaccccaacatcatcttgtgttcacatttttccatgtagatcttcaaatgaaacttgaagcaccgaaaccagtgatcattggatattctgtacttccactgtcgacacatattcagttactttcagatgtgtccttgccgattttgagagagctcgttccacattacctgcaggaaagtggaaaggagagaatggactatctggaagatgggaaaactgttttcaggttacgtttaaggctctgctcttcattgttcccaattaatgaaaggataagggacttttttgttgagtatgatcgccatactctacatacaagtcccccatggggttctgagcttcttgaggttgctgcatttcgagccatggttaacattttaacccgtgtgcagcaggagtcatcagatggggctgaaagaaatagattccttattaactatgttgattttgctttcgatgacttcggtgatcggcaagcccctgtgtatcctggtctgactactgtttggggaagtcttgctcggagtaaggcgaaaggtgaagatgtcccaccactgcaattgaaagaaggtgtcttcaggtgcatcatgcagctctttgattgccttctaactgaggttcatgagcgttgtaaaaagggtttaagcttggcaaaacgcttgaacagcacacttgctttcttttgctatgatcttttatcaattattgagcctcgccaagtttttgagctggtttcgttgtacatggacaagtttgcaggagtttgtcaatcagtccttcatgactgcaaattgacattcctgcagataatatgcgaccatgatctattcgttgagatgcctgggcgggatccttctgatagaaactatctctcgtcagttctcatccaagagatctttctgaccttagaccatgatgatttatctcaacgagcgaaggctgctcggattttggttgtccttatatgcaaacatgaatttgatgcacgctatcaaaaaagcgaagacaaattgtacattgctcagctgtattttcctcttatagggcagatccttgatgagatgcctgttttctataatctgaatgccattgaaaagcgtgaagtgctagttgtcattttgcaaattgtgaggaacttggatgatgcaactcttatcaaagcatggcaacaaagcattgctagaaccagattgttcttcaagcttcttgaagaatgtataatccatttcgagcacaacaaaacaggagacaacatgctacttggtgctagttctcggagcccagatgtcgagcatcctgcatccccaaagtactctgaacgattgtccccatcggtcaacacatatttgtcggaggcttcgaggcatgaaataaggcctcagggaacaccagaaaatggatacatgtggaacagggttagccctcaattaagttcccctaatcagccctattcattgagagaagcacttgctcaagcacaatcttcaagaatcgggtcaaccgccagggcattgagagagtctctacatccagtgctgagacaaaaaatggaactttgggaagaaaatctcagtactgccgtgagcctcgaagtgttgggaataactgagaagttttcagttgctgcaggcgctcgaagcatcactactgattacgcgaagctagattgtgtaacatcaatcttaatgggtcttttatctaggaaccaatccttggctttttggaaggctttccttcctgtggtctacaatatatttaatgttcatggtgcaacactaatggcaagggagaatgaccgcttcttgaagcaaattgcttttcatcttttgcggcttgctgttttccgaaacgattcgattagaaaaagagctgttgttgggctgcagattcttgttaggaactcattcaactatttcaaaaacactacaaggttaagggtcatgttgacaattactttgtccgagttgatgtccgacgtgcaagtaactcaaatgaaattcgatggttctcttgaagaaagtggtgaagctcggcgccttaggaaatcactggaggaaatggctgatgtgagaagcaaggatctgttaaaagattgtggcctccctgttactgcattggaggcggcccctgaaggctcctctgataataggtggtcttgggtagaggtgaaacatttgtctaaatgtctagtccaggcccttgatgctggtctggaacacgccctcctgggttctgtagtgactgtagacaggtatgcagctgccgagggtttctataaactagctatggcctatgcacccgttccagatcttcacattatgtggttgcttcatctgtgtgatgcacaccaggagatgcaatcatgggctgaagcagcacaatgtgcagttgctgtagctggcgtgatcatgcaggcacttgttggaaggaatgatgctgtgtggagcaaggagcatgttgcttcgctgcgcaagatttgccctattgtcaacactgatgtgagtgcagaagcatctgcagctgaagtcgagggatatggtgcatccaaattaacagtggactcagcggtcaaatatcttcaactagccaataaacttttcacacaagctgaactctaccatttttgtgcaagcattcaggaactcataattcctgtgtataaaagcagaagggcttatggacagctggccaaatgccacacatcgctcacaaacatctatgagtcaattcttgaacaggaggctagccctataccattcattgatgccacatactaccgagttggtttctatggtgagcgttttggcaagctcaataaaaaggagtatgtatttagagaaccacgggatgtacgtcttggtgatattatggagaagcttagtcatatatatgaggctaaaatagatggaagtcacactttacacataattccagactctagacaagtcaacgctgatgagttgcagcctggcttctgctatttacagatcactgctgttgatcctgtgatggaggatgaggacttgggtagcaggagggaaagaatattttctttatctactggtactgttcgtgcacgtgtttttgaccgttttcttttcgatacaccattcacaaaaaatggaaaaacacaaggtggtctagaagaccagtggaagaggcgcacagtgctccaaacagagggttcctttcccgctttggtgaaccgtctgccagttatcaaatctgaatctctggagttctctcctgtcgagaatgcgattggaatgatcgaaacaaggacagctgcattgagaaatgagctagaagaaccacggagttctgaaggtgatcaactcccaaggcttcagagcttgcaaaggatactccaaggaagtgtggctgtgcaggtcaacagtggggtattaagtgtgtgcactgcattcttatctggtgagccagcgactaggctcagatcccaagaactgcagcagctcatcgctgcattgcttgaattcatggctgtctgcaagcgtgcaatccgtgtgcatttcagattgataggggaagaagaccaggaattccacacccaacttgtcaatgggttccagtcactcaccgctgagctatctcactatatccctgctatactctccgagctatgatagaactgtagcaagccagaaattaggtagcatgtgaatggttgttcattcattcagttgcaggttcccaccaaatgtccatatttccattagctttggttgtatagttctaggaaccggaaattaactagtcttcgaagttctgtaccgtattgcagaaccgattcctgattttggagtgtaaagtctgtataatacctagtgttatctgttatgcaccagttatatgctgagttccttcttttttgcagtttgctactatgtcacaactagcggacattttgcacttgtattgtgatacatagtgcatatatatatatatatatatatatatatatatatataaaatgcacctgggtgcattttagtttgtggatgcacagacccaagacttcctgtctccgtcgctgcctcgcgcacagacccaag

SEQ ID NO: 1561 - DNA, 3436 bp, Zea Mays
tttctaccacaatcttccactaggtgaagatgtcccaccactgcaattgaaagaaggtgtcttcaggtgcatcatgcagctctttgattgccttctaactgaggttcatgagcgttgtaaaaagggtttaagcttggcaaaacgcttgaacagcacacttgctttcttttgctatgatcttttatcaattattgagcctcgccaagtttttgagctggtttcgttgtacatggacaagtttgcaggagtttgtcaatcagtccttcatgactgcaaattgacattcctgcagataatatgcgaccatgatctattcgttgagatgcctgggcgggatccttctgatagaaactatctctcgtcagttctcatccaagagatctttctgaccttagaccatgatgatttatctcaacgagcgaaggctgctcggattttggttgtccttatatgcaaacatgaatttgatgcacgctatcaaaaaagcgaagacaaattgtacattgctcagctgtattttcctcttatagggcagatccttgatgagatgcctgttttctataatctgaatgccattgaaaagcgtgaagtgctagttgtcattttgcaaattgtgaggaacttggatgatgcaactcttatcaaagcatggcaacaaagcattgctagaaccagattgttcttcaagcttcttgaagaatgtataatccatttcgagcacaacaaaacaggagacaacatgctacttggtgctagttctcggagcccagatgtcgagcatcctgcatccccaaagtactctgaacgattgtccccatcggtcaacacatatttgtcggaggcttcgaggcatgaaataaggcctcagggaacaccagaaaatggatacatgtggaacagggttagccctcaattaagttcccctaatcagccctattcattgagagaagcacttgctcaagcacaatcttcaagaatcgggtcaaccgccagggcattgagagagtctctacatccagtgctgagacaaaaaatggaactttgggaagaaaatctcagtactgccgtgagcctcgaagtgttgggaataactgagaagttttcagttgctgcaggcgctcgaagcatcactactgattacgcgaagctagattgtgtaacatcaatcttaatgggtcttttatctaggaaccaatccttggctttttggaaggctttccttcctgtggtctacaatatatttaatgttcatggtgcaacactaatggcaagggagaatgaccgcttcttgaagcaaattgcttttcatcttttgcggcttgctgttttccgaaacgattcgattagaaaaagagctgttgttgggctgcagattcttgttaggaactcattcaactatttcaaaaacactacaaggttaagggtcatgttgacaattactttgtccgagttgatgtccgacgtgcaagtaactcaaatgaaattcgatggttctcttgaagaaagtggtgaagctcggcgccttaggaaatcactggaggaaatggctgatgtgagaagcaaggatctgttaaaagattgtggcctccctgttactgcattggaggcggcccctgaaggctcctctgataataggtggtcttgggtagaggtgaaacatttgtctaaatgtctagtccaggcccttgatgctggtctggaacacgccctcctggagatgcaatcatgggctgaagcagcacaatgtgcagttgctgtagctggcgtgatcatgcaggcacttgttggaaggaatgatgctgtgtggagcaaggagcatgttgcttcgctgcgcaagatttgccctattgtcaacactgatgtgagtgcagaagcatctgcagctgaagtcgagggatatggtgcatccaaattaacagtggactcagcggtcaaatatcttcaactagccaataaacttttcacacaagctgaactctaccatttttgtgcaagcattcaggaactcataattcctgtgtataaaagcagaagggcttatggacagctggccaaatgccacacatcgctcacaaacatctatgagtcaattcttgaacaggaggctagccctataccattcattgatgccacatactaccgagttggtttctatggtgagcgttttggcaagctcaataaaaaggagtatgtatttagagaaccacgggatgtacgtcttggtgatattatggagaagcttagtcatatatatgaggctaaaatagatggaagtcacactttacacataattccagactctagacaagtcaacgctgatgagttgcagcctggcttctgctatttacagatcactgctgttgatcctgtgatggaggatgaggacttgggtagcaggagggaaagaatattttctttatctactggtactgttcgtgcacgtgtttttgaccgttttcttttcgatacaccattcacaaaaaatggaaaaacacaaggtggtctagaagaccagtggaagaggcgcacagtgctccaaacagagggttcctttcccgctttggtgaaccgtctgccagttatcaaatctgaatctctggagttctctcctgtcgagaatgcgattggaatgatcgaaacaaggacagctgcattgagaaatgagctagaagaaccacggagttctgaaggtgatcaactcccaaggcttcagagcttgcaaaggatactccaaggaagtgtggctgtgcaggtcaacagtggggtattaagtgtgtgcactgcattcttatctggtgagccagcgactaggctcagatcccaagaactgcagcagctcatcgctgcattgcttgaattcatggctgtctgcaagcgtgcaatccgtgtgcatttcagattgataggggaagaagaccaggaattccacacccaacttgtcaatgggttccagtcactcaccgctgagctatctcactatatccctgctatactctccgagctatgatagaactgtagcaagccagaaattaggtagcatgtgaatggttgttcattcattcagttgcaggttcccaccaaatgtccatatttccattagctttggttgtatagttctaggaaccggaaattaactagtcttcgaagttctgtaccgtattgcagaaccgattcctgattttggagtgtaaagtctgtataatacctagtgttatctgttatgcaccagttatatgctgagttccttcttttttgcagtttgctactatgtcacaactagcggacattttgcacttgtattgtgatacatagtgcatatatatatatatatatatatatatatatatatataaaatgcacctgggtgcattttagtttgtggatgcacagacccaagacttcctgtctccgtcgctgcctcgcgcacagacccaag

SEQ ID NO: 1562 - DNA, 3551 bp, Zea Mays
tctaccacaatcttccactaggtgaagatgtcccaccactgcaattgaaagaaggtgtcttcaggtgcatcatgcagctctttgattgccttctaactgaggttcatgagcgttgtaaaaagggtttaagcttggcaaaacgcttgaacagcacacttgctttcttttgctatgatcttttatcaattattgagcctcgccaagtttttgagctggtttcgttgtacatggacaagtttgcaggagtttgtcaatcagtccttcatgactgcaaattgacattcctgcagataatatgcgaccatgatctattcgttgagatgcctgggcgggatccttctgatagaaactatctctcgtcagttctcatccaagagatctttctgaccttagaccatgatgatttatctcaacgagcgaaggctgctcggattttggttgtccttatatgcaaacatgaatttgatgcacgctatcaaaaaagcgaagacaaattgtacattgctcagctgtattttcctcttatagggcagatccttgatgagatgcctgttttctataatctgaatgccattgaaaagcgtgaagtgctagttgtcattttgcaaattgtgaggaacttggatgatgcaactcttatcaaagcatggcaacaaagcattgctagaaccagattgttcttcaagcttcttgaagaatgtataatccatttcgagcacaacaaaacaggagacaacatgctacttggtgctagttctcggagcccagatgtcgagcatcctgcatccccaaagtactctgaacgattgtccccatcggtcaacacatatttgtcggaggcttcgaggcatgaaataaggggaacaccagaaaatggatacatgtggaacagggttagccctcaattaagttcccctaatcagccctattcattgagagaagcacttgctcaagcacaatcttcaagaatcgggtcaaccgccagggcattgagagagtctctacatccagtgctgagacaaaaaatggaactttgggaagaaaatctcagtactgccgtgagcctcgaagtgttgggaataactgagaagttttcagttgctgcaggcgctcgaagcatcactactgattacgcgaagctagattgtgtaacatcaatcttaatgggtcttttatctaggaaccaatccttggctttttggaaggctttccttcctgtggtctacaatatatttaatgttcatggtgcaacactaatggcaagggagaatgaccgcttcttgaagcaaattgcttttcatcttttgcggcttgctgttttccgaaacgattcgattagaaaaagagctgttgttgggctgcagattcttgttaggaactcattcaactatttcaaaaacactacaaggttaagggtcatgttgacaattactttgtccgagttgatgtccgacgtgcaagtaactcaaatgaaattcgatggttctcttgaagaaagtggtgaagctcggcgccttaggaaatcactggaggaaatggctgatgtgagaagcaaggatctgttaaaagattgtggcctccctgttactgcattggaggcggcccctgaaggctcctctgataataggtggtcttgggtagaggtgaaacatttgtctaaatgtctagtccaggcccttgatgctggtctggaacacgccctcctgggttctgtagtgactgtagacaggtatgcagctgccgagggtttctataaactagctatggcctatgcacccgttccagatcttcacattatgtggttgcttcatctgtgtgatgcacaccaggagatgcaatcatgggctgaagcagcacaatgtgcagttgctgtagctggcgtgatcatgcaggcacttgttggaaggaatgatgctgtgtggagcaaggagcatgttgcttcgctgcgcaagatttgccctattgtcaacactgatgtgagtgcagaagcatctgcagctgaagtcgagggatatggtgcatccaaattaacagtggactcagcggtcaaatatcttcaactagccaataaacttttcacacaagctgaactctaccatttttgtgcaagcattcaggaactcataattcctgtgtataaaagcagaagggcttatggacagctggccaaatgccacacatcgctcacaaacatctatgagtcaattcttgaacaggaggctagccctataccattcattgatgccacatactaccgagttggtttctatggtgagcgttttggcaagctcaataaaaaggagtatgtatttagagaaccacgggatgtacgtcttggtgatattatggagaagcttagtcatatatatgaggctaaaatagatggaagtcacactttacacataattccagactctagacaagtcaacgctgatgagttgcagcctggcttctgctatttacagatcactgctgttgatcctgtgatggaggatgaggacttgggtagcaggagggaaagaatattttctttatctactggtactgttcgtgcacgtgtttttgaccgttttcttttcgatacaccattcacaaaaaatggaaaaacacaaggtggtctagaagaccagtggaagaggcgcacagtgctccaaacagagggttcctttcccgctttggtgaaccgtctgccagttatcaaatctgaatctctggagttctctcctgtcgagaatgcgattggaatgatcgaaacaaggacagctgcattgagaaatgagctagaagaaccacggagttctgaaggtgatcaactcccaaggcttcagagcttgcaaaggatactccaaggaagtgtggctgtgcaggtcaacagtggggtattaagtgtgtgcactgcattcttatctggtgagccagcgactaggctcagatcccaagaactgcagcagctcatcgctgcattgcttgaattcatggctgtctgcaagcgtgcaatccgtgtgcatttcagattgataggggaagaagaccaggaattccacacccaacttgtcaatgggttccagtcactcaccgctgagctatctcactatatccctgctatactctccgagctatgatagaactgtagcaagccagaaattaggtagcatgtgaatggttgttcattcattcagttgcaggttcccaccaaatgtccatatttccattagctttggttgtatagttctaggaaccggaaattaactagtcttcgaagttctgtaccgtattgcagaaccgattcctgattttggagtgtaaagtctgtataatacctagtgttatctgttatgcaccagttatatgctgagttccttcttttttgcagtttgctactatgtcacaactagcggacattttgcacttgtattgtgatacatagtgcatatatatatatatatatatatatatatatatatataaaatgcacctgggtgcattttagtttgtggatgcacagacccaagacttcctgtctccgtcgctgcctcgcgcacagacccaag

SEQ ID NO: 1563 - DNA, 3474 bp, Zea Mays
ccacaatcttccactaggtgaagatgtcccaccactgcaattgaaagaaggtgtcttcaggtgcatcatgcagctctttgattgccttctaactgaggttcatgagcgttgtaaaaagggtttaagcttggcaaaacgcttgaacagcacacttgctttcttttgctatgatcttttatcaattattgagcctcgccaagtttttgagctggtttcgttgtacatggacaagtttgcaggagtttgtcaatcagtccttcatgactgcaaattgacattcctgcagataatatgcgaccatgatctattcgttgagatgcctgggcgggatccttctgatagaaactatctctcgtcagttctcatccaagagatctttctgaccttagaccatgatgatttatctcaacgagcgaaggctgctcggattttggttgtccttatatgcaaacatgaatttgatgcacgctatcaaaaaagcgaagacaaattgtacattgctcagctgtattttcctcttatagggcagatccttgatgagatgcctgttttctataatctgaatgccattgaaaagcgtgaagtgctagttgtcattttgcaaattgtgaggaacttggatgatgcaactcttatcaaagcatggcaacaaagcattgctagaaccagattgttcttcaagcttcttgaagaatgtataatccatttcgagcacaacaaaacaggagacaacatgctacttggtgctagttctcggagcccagatgtcgagcatcctgcatccccaaagtactctgaacgattgtccccatcggtcaacacatatttgtcggaggcttcgaggcatgaaataaggcctcagggaacaccagaaaatggatacatgtggaacagggttagccctcaattaagttcccctaatcagccctattcattgagagaagcacttgctcaagcacaatcttcaagaatcgggtcaaccgccagggcattgagagagtctctacatccagtgctgagacaaaaaatggaactttgggaagaaaatctcagtactgccgtgagcctcgaagtgttgggaataactgagaagttttcagttgctgcaggcgctcgaagcatcactactgattacgcgaagctagattgtgtaacatcaatcttaatgggtcttttatctaggaaccaatccttggctttttggaaggctttccttcctgtggtctacaatatatttaatgttcatggtgcaacactaatggcaagggagaatgaccgcttcttgaagcaaattgcttttcatcttttgcggcttgctgttttccgaaacgattcgattagaaaaagagctgttgttgggctgcagattcttgttaggaactcattcaactatttcaaaaacactacaaggttaagggtcatgttgacaattactttgtccgagttgatgtccgacgtgcaagtaactcaaatgaaattcgatggttctcttgaagaaagtggtgaagctcggcgccttaggaaatcactggaggaaatggctgatgtgagaagcaaggatctgttaaaagattgtggcctccctgttactgcattggaggcggcccctgaaggctcctctgataataggtggtcttgggtagaggtgaaacatttgtctaaatgtctagtccaggcccttgatgctggtctggaacacgccctcctgatcttcacattatgtggttgcttcatctgtgtgatgcacaccaggagatgcaatcatgggctgaagcagcacaatgtgcagttgctgtagctggcgtgatcatgcaggcacttgttggaaggaatgatgctgtgtggagcaaggagcatgttgcttcgctgcgcaagatttgccctattgtcaacactgatgtgagtgcagaagcatctgcagctgaagtcgagggatatggtgcatccaaattaacagtggactcagcggtcaaatatcttcaactagccaataaacttttcacacaagctgaactctaccatttttgtgcaagcattcaggaactcataattcctgtgtataaaagcagaagggcttatggacagctggccaaatgccacacatcgctcacaaacatctatgagtcaattcttgaacaggaggctagccctataccattcattgatgccacatactaccgagttggtttctatggtgagcgttttggcaagctcaataaaaaggagtatgtatttagagaaccacgggatgtacgtcttggtgatattatggagaagcttagtcatatatatgaggctaaaatagatggaagtcacactttacacataattccagactctagacaagtcaacgctgatgagttgcagcctggcttctgctatttacagatcactgctgttgatcctgtgatggaggatgaggacttgggtagcaggagggaaagaatattttctttatctactggtactgttcgtgcacgtgtttttgaccgttttcttttcgatacaccattcacaaaaaatggaaaaacacaaggtggtctagaagaccagtggaagaggcgcacagtgctccaaacagagggttcctttcccgctttggtgaaccgtctgccagttatcaaatctgaatctctggagttctctcctgtcgagaatgcgattggaatgatcgaaacaaggacagctgcattgagaaatgagctagaagaaccacggagttctgaaggtgatcaactcccaaggcttcagagcttgcaaaggatactccaaggaagtgtggctgtgcaggtcaacagtggggtattaagtgtgtgcactgcattcttatctggtgagccagcgactaggctcagatcccaagaactgcagcagctcatcgctgcattgcttgaattcatggctgtctgcaagcgtgcaatccgtgtgcatttcagattgataggggaagaagaccaggaattccacacccaacttgtcaatgggttccagtcactcaccgctgagctatctcactatatccctgctatactctccgagctatgatagaactgtagcaagccagaaattaggtagcatgtgaatggttgttcattcattcagttgcaggttcccaccaaatgtccatatttccattagctttggttgtatagttctaggaaccggaaattaactagtcttcgaagttctgtaccgtattgcagaaccgattcctgattttggagtgtaaagtctgtataatacctagtgttatctgttatgcaccagttatatgctgagttccttcttttttgcagtttgctactatgtcacaactagcggacattttgcacttgtattgtgatacatagtgcatatatatatatatatatatatatatatatatatataaaatgcacctgggtgcattttagtttgtggatgcacagacccaagacttcctgtctccgtcgctgcctcgcgcacagacccaag

SEQ ID NO: 1564 - DNA, 2378 bp, Zea Mays
cactgctttgcctgcaagtcttcaaagccccccaggccccagctcgacgctcgctaccctaccccgcaaggccgcaaccccgagcagagtcccaagcccaagaaaccaacccccgacgcgcgcgagacggcgagagagggagagataggtgtgcggcagtaatatagtgggtttgctctttgattggccgcggctaagcaccaaaccttggggaaatggagctgctcagtggtgcagtggcgcagcgggagcttggggaagcggaagcttgcgagcagccagagcactagccattacccagcgctaccatacactgacatatctatcgatctgatcgggctgctgctgagtgcagtgtgtgtacaaaaggccctgaaggcggtaagaccgagctgcacctgcactagaggtgaaggggtgtgagggagaagaaaagcgagtagcccgtgagctgctgcggtgcgagggagcccagggtttcgtctcgcccggccgcgcctggaccgtgccgacttcgctagcatgatgaaccccggctcgcgccagatttatctgaccttcccggccgacagcacgttccgcgaggaggacgtctccaactatttcagcatctacggtccagttcacgacgtgcgcatcccctaccagcagaagcgcatgttcgggttcgtcaccttcgtctacccagagacggtgaagctcatcctggccaagggcaacccgcacttcatctgcgacgcacgcgtgctcgtcaagccgtataaggagaagggcaaggtccccgacaagtacaggaagcagcagcaaggggacttctccggctgcacgacgcccactggcgggctggacgcccgagatccctttgatctgcaccaactcggcgcgaggatgctgcaacattcgaacagcgccaacgagctgctgttgcgccggaagctggaggagcagcagcaggctgccgaactgcagcacgccattgagctccagagccgccgcctcatgggtctccagctgctcgacctcaaggctcgcgcagctgcgacagcatcggcactgccaacaccaattgccaatgccttcgcgtccagccatcctttgagcaccatggcagtcgagtcgccactagagtctggagagcagctcaagctgagcagtgggtttgctctggatgggaagctcaacggtggcgacaaggaagaatctgcttgcgaggcgagccctgacgccgctgatagcgaccaaagtggagagcacaacttgccggacagcccatttgcgtcccctaccaagtctgccgcgctcgtgcacgacagtttcgccgccacggagcctgagaacaccgcgtcctgtgttgggagcaagatcgacggcggcagtaaccatctccgcccccctgcgctggaaatcccttcgcccagctcctacttcttccccatgcgcaggctgtcctccgatcacggagccatggggatgtaaagttcagcattggaagcgagtgataccccagcctaatcatagaatactagaagccaaggaaaagtgatgttggatatataggagaaaaaaaagagagttgagtgtcagcatagtgttagctcccactttcttttgttcttttagtccctacctttttagtggatagttctactaaaccacaagaggagaagatgccattagccttgattaagaaaacggcggcatatgcaatattatcgccagatataagtatatatatattatatatacaaataatcccctagtttctagtatatatatagtatctgtacttagtatttaacagtagcaggtaacgtcagcccaaagatttttactgtgacaaggtcctacaactacagccacctccactaggtttaccaaatgtgaggttaatccacagttctggtaccagccacagcgacagccacaggtcacatgtaataccagtacagctacagcctgacgcggacatttgtatgctagggcggcccagtgacaggaaaaagagcacatggccatggcagttgtctgtaagctatttttactgctactgctgcaagatcccaagctgggtcctcctatggatagagagaaagagacgtgtgtgcgtgtgttttgcttgtggccttgtatggctttgacacctactgcaaaatactactgttatatgattatatgttattgttgtgcctttgttcccatctgtttgagtggatcctagtgtagttgacacccctacagaaagaatggaagcaaagtgagtgctttgcccctccatttatctcccaccttttcagaatcggaaccgggtattggtatagctgttgttgtgagatggctgtcaggacattgactaatgattgttgctaatctattgaggg

SEQ ID NO: 1565 - DNA, 3349 bp, Zea Mays
agcccaagaaaccaacccccgacgcgcgcgagacggcgagagagggagagataggtgtgcggcagtaatatagtgggtttgctctttgattggccgcggctaagcaccaaaccttggggaaatggagctgctcagtggtgcagtggcgcagcgggagcttggggaagcggaagcttgcgagcagccagagcactagccattacccagcgctaccatacactgacatatctatcgatctgatcgggctgctgctgagtgcagtgtgtgtacaaaaggccctgaaggcggtaagaccgagctgcacctgcactagaggtgaaggggtgtgagggagaagaaaagcgagtagcccgtgagctgctgcggtgcgagggagcccagggtttcgtctcgtctggccctcttctcttggcgcggccatggacgcctacgaggccaccaaggtggtgttctcccggatccaagccctagacccggaccacgccgccaagatcatgggcctcctcctcatccaggaccatggcgagaaggagatgatccgcctcgccttcggccccgagtctctgctccacgctgtcatggccaaggcgcgcaaggacctcggcctgctcctcccggcctcgccgacctccgttgcggccgccggccacgcgccgttcctgcagctcccacgccagaactccgggcgcgcgggcgcgccgtcgccgctctcggtgtcctcgccgtcgtcatggagccacgcgcccgtgttctccaggagcaacagcacgagtaatggcaccgcggaggaggcggcgggggctggggaggagctgcccagtcccgtgaacggcggcgcggcgccgttctttcctcgtcaggccggcgacgcgctcctggacgacttgcagctgcaggagcagctcgcgttcctcaacgagggcggcgggaacccggcccaccagctcctggggttcgacggcggggagtgccggagccccggtcccggtgatgccgatgggatgttcgcgttcggcctcgggtggcacaacgggggcccagcgcaccgtaggagttcgtcagtcaacgagctctgccttggcggcggcggcggcggcggcgatggtttcggttggaagccctgcctctactacgcgcgcgggttctgcaagaacggcggcagctgcaggttcgtccacggcggcctctccgacgacgctgctgcgctcgctggcgccaagatggaggcagccgccgatcagcagcagcagtgccaggacttcctcatccgctccaagggccagcgcctcggccccgccgccttcccctactcccccaccggctccctcccaggctcgccctccgccgctagcaagtgcctcagcttcctgctgcagcaacagcagcagcagcacgacagagccgcggcggccgcgtctctgatgctgggcggcggcgacgaggcgcacaagttcatggcccggccgcgcctggaccgtgccgacttcgctagcatgatgaaccccggctcgcgccagatttatctgaccttcccggccgacagcacgttccgcgaggaggacgtctccaactatttcagcatctacggtccagttcacgacgtgcgcatcccctaccagcagaagcgcatgttcgggttcgtcaccttcgtctacccagagacggtgaagctcatcctggccaagggcaacccgcacttcatctgcgacgcacgcgtgctcgtcaagccgtataaggagaagggcaaggtccccgacaagtacaggaagcagcagcaaggggacttctccggctgcacgacgcccactggcgggctggacgcccgagatccctttgatctgcaccaactcggcgcgaggatgctgcaacattcgaacagcgccaacgagctgctgttgcgccggaagctggaggagcagcagcaggctgccgaactgcagcacgccattgagctccagagccgccgcctcatgggtctccagctgctcgacctcaaggctcgcgcagctgcgacagcatcggcactgccaacaccaattgccaatgccttcgcgtccagccatcctttgagcaccatggcagtcgagtcgccactagagtctggagagcagctcaagctgagcagtgggtttgctctggatgggaagctcaacggtggcgacaaggaagaatctgcttgcgaggcgagccctgacgccgctgatagcgaccaaagtggagagcacaacttgccggacagcccatttgcgtcccctaccaagtctgccgcgctcgtgcacgacagtttcgccgccacggagcctgagaacaccgcgtcctgtgttgggagcaagatcgacggcggcagtaaccatctccgcccccctgcgctggaaatcccttcgcccagctcctacttcttccccatgcgcaggctgtcctccgatcacggagccatggggatgtaaagttcagcattggaagcgagtgataccccagcctaatcatagaatactagaagccaaggaaaagtgatgttggatatataggagaaaaaaaagagagttgagtgtcagcatagtgttagctcccactttcttttgttcttttagtccctacctttttagtggatagttctactaaaccacaagaggagaagatgccattagccttgattaagaaaacggcggcatatgcaatattatcgccagatataagtatatatatattatatatacaaataatcccctagtttctagtatatatatagtatctgtacttagtatttaacagtagcaggtaacgtcagcccaaagatttttactgtgacaaggtcctacaactacagccacctccactaggtttaccaaatgtgaggttaatccacagttctggtaccagccacagcgacagccacaggtcacatgtaataccagtacagctacagcctgacgcggacatttgtatgctagggcggcccagtgacaggaaaaagagcacatggccatggcagttgtctgtaagctatttttactgctactgctgcaagatcccaagctgggtcctcctatggatagagagaaagagacgtgtgtgcgtgtgttttgcttgtggccttgtatggctttgacacctactgcaaaatactactgttatatgattatatgttattgttgtgcctttgttcccatctgtttgagtggatcctagtgtagttgacacccctacagaaagaatggaagcaaagtgagtgctttgcccctccatttatctcccaccttttcagaatcggaaccgggtattggtatagctgttgttgtgagatggctgtcaggacattgactaatgattgttgctaatctattgaggg

SEQ ID NO: 1566 - DNA, 1893 bp, Zea Mays
gcaggatcgtttcaattcaactgagatggcaaaacttctgctcggggaaaaacagctaagaacagtcgggcggtcgggccaggcggcgtgtgagcgtgtccgagatccacaggacgcaggacgctgccgatggcgaagccgaggaaaacccgcacctcggctccagatccgcccgtagccgccgttcggcttccgtggcacacaccggcgccggcggtccccacggccgttctgatctcgctcgctgccctcctcatccgcgtgctggtttccgtgggcccctactccggtcagggtgcggcgcctaagttcggcgactatgaggcgcagcggcactggatggagctcacactccatctcacgcccgccgactggtaccgcaacacctccgacaatgaccttgcctactggggcctggactacccgcccctctccgcctaccagagcctcctccacggccgcatcatcaacacctcactccccgaggccgtcgctctccgctcctcccgtggctacgaatctatggaatcgaagttgctgatgcggtggacggtgctgtcatcggatctgttggtgttcttcccatctgctttgtggtttgtgtgggcgtacatgaaacttggagtcggtattagtggagaggagagacgggaggggtggatgtggctgctagccttggtcctgatcagtccttgcttggtattgatcgatcatggccattttcagtataattgcattagccttggacttacgctcggagcaattgctggtgttttgtcgaagaatgagcttgttggtgcatctctcttcactctcgcaatcaatcacaaacagatgagcctgtactttgcaccagctttttttagccatcttctggggaagtgcctcaaacagaaatatcctattgtcgaagtaacaaaacttgctttcgtggtcttgggaacttttgctcttgtctggtggccatttttgcattcttatgaggctgtccaacagacttgtgaaacctgcttctcagttggtactgaacttatgaagtctgtaatatcaggttctctctcgattagctccatttgagagaggcatatatgaggattatgttgcaaacttctggtgtagtacttcagttattatcaagtggaagaaattgttcgcgataaagccattgaaacttatgagtctatctgctaccatactggctttcttgccttcattcgttcagcaagtcaagtctccaagtaatcttggcttcctttattctctgatgaacaactctttctctttctacctattctcataccaagttcatgagaaatcaattttgcttcctcttttacctgcaagtcttttagcactggaagaacctcggatgtacggatggttcgtgtactttgcccttttctcaatgtacccacttatctgccgtgatcagcttcttctacaatacatagctgttcttagcctattctttctgatatactactcacctggcggaagctacggaaagagatcaaacatttcatgcaaggcaaagttagttcttagcttgccatttttatgctcacttctacttcacattacctacctgcaaatagagcctcccaagaggtatcccttcctctttgatgcactgataatgttcgtctgtttttcacaatttgtcatcttagctgtgtacaccaactataagcaatggatgttggactcaaattctagatccataggtgtgaagaaggatctgtgattgaaaattttgactgctaattttacagagaaatccactgtccctttgtaaccttgtgtgtattcccttttaacattatttattgaatgaaatgcggtgcaaattcagacatttgtatacattcagaactggaaactactagaatttag

SEQ ID NO: 1567 - DNA, 1701 bp, Zea Mays
gcaggatcgtttcaattcaactgagatggcaaaacttctgctcggggaaaaacagctaagaacagtcgggcggtcgggccaggcggcgtgtgagcgtgtccgagatccacaggacgcaggacgctgccgatggcgaagccgaggaaaacccgcacctcggctccagatccgcccgtagccgccgttcggcttccgtggcacacaccggcgccggcggtccccacggccgttctgatctcgctcgctgccctcctcatccgcgtgctggtttccgtgggcccctactccggtcagggtgcggcgcctaagttcggcgactatgaggcgcagcggcactggatggagctcacactccatctcacgcccgccgactggtaccgcaacacctccgacaatgaccttgcctactggggcctggactacccgcccctctccgcctaccagagcctcctccacggccgcatcatcaacacctcactccccgaggccgtcgctctccgctcctcccgtggctacgaatctatggaatcgaagttgctgatgcggtggacggtgctgtcatcggatctgttggtgttcttcccatctgctttgtggtttgtgtgggcgtacatgaaacttggagtcggtattagtggagaggagagacgggaggggtggatgtggctgctagccttggtcctgatcagtccttgcttggtattgatcgatcatggccattttcagtataattgcattagccttggacttacgctcggagcaattgctggtgttttgtcgaagaatgagcttgttggtgcatctctcttcactctcgcaatcaatcacaaacagatgagcctgtactttgcaccagctttttttagccatcttctggggaagtgcctcaaacagaaatatcctattgtcgaagtaacaaaacttgctttcgtggtcttgggaacttttgctcttgtctggtggccatttttgcattcttatgaggctgtccaacaggttctctctcgattagctccatttgagagaggcatatatgaggattatgttgcaaacttctggtgtagtacttcagttattatcaagtggaagaaattgttcgcgataaagccattgaaacttatgagtctatctgctaccatactggctttcttgccttcattcgttcagcaagtcaagtctccaagtaatcttggcttcctttattctctgatgaacaactctttctctttctacctattctcataccaagttcatgagaaatcaattttgcttcctcttttacctgcaagtcttttagcactggaagaacctcggatgtacggatggttcgtgtactttgcccttttctcaatgtacccacttatctgccgtgatcagcttcttctacaatacatagctgttcttagcctattctttctgatatactactcacctggcggaagctacggaaagagatcaaacatttcatgcaaggcaaactgtgtacaccaactataagcaatggatgttggactcaaattctagatccataggtgtgaagaaggatctgtgattgaaaattttgactgctaattttacagagaaatccactgtccctttgtaaccttgtgtgtattcccttttaacattatttattgaatgaaatgcggtgcaaattcagacatttgtatacattcagaactggaaactactagaatttag

SEQ ID NO: 1568 - DNA, 1676 bp, Zea Mays
gcaggatcgtttcaattcaactgagatggcaaaacttctgctcggggaaaaacagctaagaacagtcgggcggtcgggccaggcggcgtgtgagcgtgtccgagatccacaggacgcaggacgctgccgatggcgaagccgaggaaaacccgcacctcggctccagatccgcccgtagccgccgttcggcttccgtggcacacaccggcgccggcggtccccacggccgttctgatctcgctcgctgccctcctcatccgcgtgctggtttccgtgggcccctactccggtcagggtgcggcgcctaagttcggcgactatgaggcgcagcggcactggatggagctcacactccatctcacgcccgccgactggtaccgcaacacctccgacaatgaccttgcctactggggcctggactacccgcccctctccgcctaccagagcctcctccacggccgcatcatcaacacctcactccccgaggccgtcgctctccgctcctcccgtggctacgaatctatggaatcgaagttgctgatgcggtggacggtgctgtcatcggatctgttggtgttcttcccatctgctttgtggtttgtgtgggcgtacatgaaacttggagtcggtattagtggagaggagagacgggaggggtggatgtggctgctagccttggtcctgatcagtccttgcttggtattgatcgatcatggccattttcagtataattgcattagccttggacttacgctcggagcaattgctggtgttttgtcgaagaatgagcttgttggtgcatctctcttcactctcgcaatcaatcacaaacaggttctctctcgattagctccatttgagagaggcatatatgaggattatgttgcaaacttctggtgtagtacttcagttattatcaagtggaagaaattgttcgcgataaagccattgaaacttatgagtctatctgctaccatactggctttcttgccttcattcgttcagcaagtcaagtctccaagtaatcttggcttcctttattctctgatgaacaactctttctctttctacctattctcataccaagttcatgagaaatcaattttgcttcctcttttacctgcaagtcttttagcactggaagaacctcggatgtacggatggttcgtgtactttgcccttttctcaatgtacccacttatctgccgtgatcagcttcttctacaatacatagctgttcttagcctattctttctgatatactactcacctggcggaagctacggaaagagatcaaacatttcatgcaaggcaaagttagttcttagcttgccatttttatgctcacttctacttcacattacctacctgcaaatagagcctcccaagaggtatcccttcctctttgatgcactgataatgttcgtctgtttttcacaatttgtcatcttagctgtgtacaccaactataagcaatggatgttggactcaaattctagatccataggtgtgaagaaggatctgtgattgaaaattttgactgctaattttacagagaaatccactgtccctttgtaaccttgtgtgtattcccttttaacattatttattgaatgaaatgcggtgcaaattcagacatttgtatacattcagaactggaaactactagaatttag

SEQ ID NO: 1569 - DNA, 2730 bp, Zea Mays
gcaggatcgtttcaattcaactgagatggcaaaacttctgctcggggaaaaacagctaagaacagtcgggcggtcgggccaggcggcgtgtgagcgtgtccgagatccacaggacgcaggacgctgccgatggcgaagccgaggaaaacccgcacctcggctccagatccgcccgtagccgccgttcggcttccgtggcacacaccggcgccggcggtccccacggccgttctgatctcgctcgctgccctcctcatccgcgtgctggtttccgtgggcccctactccggtcagggtgcggcgcctaagttcggcgactatgaggcgcagcggcactggatggagctcacactccatctcacgcccgccgactggtaccgcaacacctccgacaatgaccttgcctactggggcctggactacccgcccctctccgcctaccagagcctcctccacggccgcatcatcaacacctcactccccgaggccgtcgctctccgctcctcccgtggctacgaatctatggaatcttgctgatgcggtggacggtgctgtcatcggatctgttggtgttcttcccatctgctttgtggtttgtgtgggcgtacatgaaacttggagtcggtattagtggagaggagagacgggaggggtggatgtggctgctagccttggtcctgatcagtccttgcttggtattgatcgatcatggccattttcagtataattgcattagccttggacttacgctcggagcaattgctggtgttttgtcgaagaatgagcttgttggtgcatctctcttcactctcgcaatcaatcacaaacaggtttgcctcatgtctagaaaattgtgttcattcggtcattcataaactttgttaccatacatgcacaatcaatcatcctggagaattctatgtttttataaggccacgtgtttccaattacacaatgttgtgaaatagtagttcctatggtggatacttccttacttagatcaggaggttgtcactgttaatacaaagcagaccatatgatccaactgaaaaccgtgtcaacaaccagccaaattgttaattttattctttaccttttatgtttgagtcctagtaaacagtgattgacaatagactgttaagatgtgatgctggcctgtggactacctagtacctactatttttttatacattttatcctgaaataatagttaatacaatatgctatcgtaaggcatgcatatgtattggtgcagtattagttctcaaatgttgattcatacatcgtacttactggattttcagctcactcaaattggcaatagcaattgagttgggaagtgggcatcattacatcctgccaattgttttgatgaaatcatgggaaagctacaatgagacacacgcacagttgcacacatacccaatctatacatgaactttagtttattataatgtttacgacccttccaagtgactaatctaggacactttatgcccattaatacaaagagtttgttggatatggtttcgagttctaatatccaatgaccacagtcagtcagtcacaaagtttatgggaagacatggttgagatacgtggtcgccgaacatggcaggctacttgtgagagatttttacacttcaagttcaaaatgaacccgcgaacctgatgagcctgtactttgcaccagctttttttagccatcttctggggaagtgcctcaaacagaaatatcctattgtcgaagtaacaaaacttgctttcgtggtcttgggaacttttgctcttgtctggtggccatttttgcattcttatgaggctgtccaacagacttgtgaaacctgcttctcagttggtactgaacttatgaagtctgtaatatcaggttctctctcgattagctccatttgagagaggcatatatgaggattatgttgcaaacttctggtgtagtacttcagttattatcaagtggaagaaattgttcgcgataaagccattgaaacttatgagtctatctgctaccatactggctttcttgccttcattcgttcagcaagtcaagtctccaagtaatcttggcttcctttattctctgatgaacaactctttctctttctacctattctcataccaagttcatgagaaatcaattttgcttcctcttttacctgcaagtcttttagcactggaagaacctcggatgtacggatggttcgtgtactttgcccttttctcaatgtacccacttatctgccgtgatcagcttcttctacaatacatagctgttcttagcctattctttctgatatactactcacctggcggaagctacggaaagagatcaaacatttcatgcaaggcaaagttagttcttagcttgccatttttatgctcacttctacttcacattacctacctgcaaatagagcctcccaagaggtatcccttcctctttgatgcactgataatgttcgtctgtttttcacaatttgtcatcttagctgtgtacaccaactataagcaatggatgttggactcaaattctagatccataggtgtgaagaaggatctgtgattgaaaattttgactgctaattttacagagaaatccactgtccctttgtaaccttgtgtgtattcccttttaacattatttattgaatgaaatgcggtgcaaattcagacatttgtatacattcagaactggaaactactagaatttag

SEQ ID NO: 1570 - DNA, 2542 bp, Zea Mays
gcaggatcgtttcaattcaactgagatggcaaaacttctgctcggggaaaaacagctaagaacagtcgggcggtcgggccaggcggcgtgtgagcgtgtccgagatccacaggacgcaggacgctgccgatggcgaagccgaggaaaacccgcacctcggctccagatccgcccgtagccgccgttcggcttccgtggcacacaccggcgccggcggtccccacggccgttctgatctcgctcgctgccctcctcatccgcgtgctggtttccgtgggcccctactccggtcagggtgcggcgcctaagttcggcgactatgaggcgcagcggcactggatggagctcacactccatctcacgcccgccgactggtaccgcaacacctccgacaatgaccttgcctactggggcctggactacccgcccctctccgcctaccagagcctcctccacggccgcatcatcaacacctcactccccgaggccgtcgctctccgctcctcccgtggctacgaatctatggaatcgaagttgctgatgcggtggacggtgctgtcatcggatctgttggtgttcttcccatctgctttgtggtttgtgtgggcgtacatgaaacttggagtcggtattagtggagaggagagacgggaggggtggatgtggctgctagccttggtcctgatcagtccttgcttggtattgatcgatcatggccattttcagtataattgcattagccttggacttacgctcggagcaattgctggtgttttgtcgaagaatgagcttgttggtgcatctctcttcactctcgcaatcaatcacaaacaggtttgcctcatgtctagaaaattgtgttcattcggtcattcataaactttgttaccatacatgcacaatcaatcatcctggagaattctatgtttttataaggccacgtgtttccaattacacaatgttgtgaaatagtagttcctatggtggatacttccttacttagatcaggaggttgtcactgttaatacaaagcagaccatatgatccaactgaaaaccgtgtcaacaaccagccaaattgttaattttattctttaccttttatgtttgagtcctagtaaacagtgattgacaatagactgttaagatgtgatgctggcctgtggactacctagtacctactatttttttatacattttatcctgaaataatagttaatacaatatgctatcgtaaggcatgcatatgtattggtgcagtattagttctcaaatgttgattcatacatcgtacttactggattttcagctcactcaaattggcaatagcaattgagttgggaagtgggcatcattacatcctgccaattgttttgatgaaatcatgggaaagctacaatgagacacacgcacagttgcacacatacccaatctatacatgaactttagtttattataatgtttacgacccttccaagtgactaatctaggacactttatgcccattaatacaaagagtttgttggatatggtttcgagttctaatatccaatgaccacagtcagtcagtcacaaagtttatgggaagacatggttgagatacgtggtcgccgaacatggcaggctacttgtgagagatttttacacttcaagttcaaaatgaacccgcgaacctgatgagcctgtactttgcaccagctttttttagccatcttctggggaagtgcctcaaacagaaatatcctattgtcgaagtaacaaaacttgctttcgtggtcttgggaacttttgctcttgtctggtggccatttttgcattcttatgaggctgtccaacaggttctctctcgattagctccatttgagagaggcatatatgaggattatgttgcaaacttctggtgtagtacttcagttattatcaagtggaagaaattgttcgcgataaagccattgaaacttatgagtctatctgctaccatactggctttcttgccttcattcgttcagcaagtcaagtctccaagtaatcttggcttcctttattctctgatgaacaactctttctctttctacctattctcataccaagttcatgagaaatcaattttgcttcctcttttacctgcaagtcttttagcactggaagaacctcggatgtacggatggttcgtgtactttgcccttttctcaatgtacccacttatctgccgtgatcagcttcttctacaatacatagctgttcttagcctattctttctgatatactactcacctggcggaagctacggaaagagatcaaacatttcatgcaaggcaaactgtgtacaccaactataagcaatggatgttggactcaaattctagatccataggtgtgaagaaggatctgtgattgaaaattttgactgctaattttacagagaaatccactgtccctttgtaaccttgtgtgtattcccttttaacattatttattgaatgaaatgcggtgcaaattcagacatttgtatacattcagaactggaaactactagaatttag

SEQ ID NO: 1571 - DNA, 1922 bp, Zea Mays
aggggaaaccgctgtagacagtcccgggcaactggtgggtgtcgtcctcctctttgcgcagcagagtaatggattaatgcattaagcaaggtaatgaaatgtaccaaaagtgacttatggaaaagaaacagagcttgttcactgctctgaatgaggaactttaatctgatgcagtctcaaaagagcagagttttgggagcaatgtcatcctctttgcctattctgccaaatcctttgaaagggagcttctcaaggcctcataacccccagcatattcctatgttgaggcagctgcctgatgactctatgcccttgtgtattgacacacatcagtctgctagtttgcacccaagagctggtgttatcggggtaccatattcaggctacactgctagtccacttgattctgtgtctaaccttgatagccagacaatggctgcaccctttatttctcagtcatccaattttgaagctctccagtctctatctaataataccccagaaacacacactaaggcagcctggttcacatcttctatggatgtttcaccactcaacacagataatattgctgcttctgatgttaatcaaatccagagtatacgtcctgctatgacatctgatgagagtgctacacaaaacgattggtgggcagatataatgaatgatgattggaaagatattcttgacgcaacagctactgattcccactcaaaagccatgattcaaatttccaactcagctacatcactacctgcagtaaatcagtcagcttcatctcatagtagggagatttgtcctgttgctagtcctcccaatagcagcaatgcttcagttgccaaacaacggatgagatggaccccagaactccatgaatgttttgtagatgctgtaaatcagcttggcggtagcgaaaaagctactcctaagggtgtgctaaagcttatgaaagttgatggtttgactatatatcatgtcaaaagccacctgcagaagtaccgcacagcccgctataaaccagacctgtcagaaggtacatcggaaaaaaggacagccactgaagagctggtcctggacctgaaaacgagcatggatcttactgaagcactgcgccttcagatggaagtccagaaacggcttcatgaacagcttgagattcagcgaaaattgcagttgcggattgaagagcaaggaaagtatctgcagatgatgtttgaaaagcagagtcaatcgagcacggagaaagtccaggatccatcctcaagggatacaacagctaaaccgtcatctaatcagagccagtctacaaacaaggattgtggtgcaaccatggacccaaatggaacaggaggcatcgtacggactgcagaactgggagaacgttcgtctgaattaggtgtaaaacagaaactcgtagagatcgaagaatctggtaccgaagtagccacaggcgacagatctaagatctcccaagagaagcggcgcaaactgcaagatagttaacatatcggttgcactattcagacatagctgttcaaaccgtttgcttggtgaaaaattggtaatctgtgtgtcgaattcgactattgatccgtgagtccattggtgagttgtaccgctcttcagttagccatatatatttataaaggatccaaaggaggaccaaaggagaacttcctggcagccgtctttataacattagcaataagagctatccccgaagttatggggtaaaataaggtcttgaaatttagctttgtttctgaattcctccttttcttttgtttgggttgaagtggtcaccgagtcgatgtagatgaccacatgaatgaatttatcggaagcaagctagtgctgttccctattggcatagaaaccaaatattgaaacacgaacactgtttgatggtgcaaacttttaga

SEQ ID NO: 1572 - DNA, 1985 bp, Zea Mays
aggggaaaccgctgtagacagtcccgggcaactggtgggtgtcgtcctcctctttgcgcagcaggcttgcaccggggaacctggcctgcctcattgtggagactccacagttcacatgacagttgagagtaatggattaatgcattaagcaaggtaatgaaatgtaccaaaagtgacttatggaaaagaaacagagcttgttcactgctctgaatgaggaactttaatctgatgcagtctcaaaagagcagagttttgggagcaatgtcatcctctttgcctattctgccaaatcctttgaaagggagcttctcaaggcctcataacccccagcatattcctatgttgaggcagctgcctgatgactctatgcccttgtgtattgacacacatcagtctgctagtttgcacccaagagctggtgttatcggggtaccatattcaggctacactgctagtccacttgattctgtgtctaaccttgatagccagacaatggctgcaccctttatttctcagtcatccaattttgaagctctccagtctctatctaataataccccagaaacacacactaaggcagcctggttcacatcttctatggatgtttcaccactcaacacagataatattgctgcttctgatgttaatcaaatccagagtatacgtcctgctatgacatctgatgagagtgctacacaaaacgattggtgggcagatataatgaatgatgattggaaagatattcttgacgcaacagctactgattcccactcaaaagccatgattcaaatttccaactcagctacatcactacctgcagtaaatcagtcagcttcatctcatagtagggagatttgtcctgttgctagtcctcccaatagcagcaatgcttcagttgccaaacaacggatgagatggaccccagaactccatgaatgttttgtagatgctgtaaatcagcttggcggtagcgaaaaagctactcctaagggtgtgctaaagcttatgaaagttgatggtttgactatatatcatgtcaaaagccacctgcagaagtaccgcacagcccgctataaaccagacctgtcagaaggtacatcggaaaaaaggacagccactgaagagctggtcctggacctgaaaacgagcatggatcttactgaagcactgcgccttcagatggaagtccagaaacggcttcatgaacagcttgagattcagcgaaaattgcagttgcggattgaagagcaaggaaagtatctgcagatgatgtttgaaaagcagagtcaatcgagcacggagaaagtccaggatccatcctcaagggatacaacagctaaaccgtcatctaatcagagccagtctacaaacaaggattgtggtgcaaccatggacccaaatggaacaggaggcatcgtacggactgcagaactgggagaacgttcgtctgaattaggtgtaaaacagaaactcgtagagatcgaagaatctggtaccgaagtagccacaggcgacagatctaagatctcccaagagaagcggcgcaaactgcaagatagttaacatatcggttgcactattcagacatagctgttcaaaccgtttgcttggtgaaaaattggtaatctgtgtgtcgaattcgactattgatccgtgagtccattggtgagttgtaccgctcttcagttagccatatatatttataaaggatccaaaggaggaccaaaggagaacttcctggcagccgtctttataacattagcaataagagctatccccgaagttatggggtaaaataaggtcttgaaatttagctttgtttctgaattcctccttttcttttgtttgggttgaagtggtcaccgagtcgatgtagatgaccacatgaatgaatttatcggaagcaagctagtgctgttccctattggcatagaaaccaaatattgaaacacgaacactgtttgatggtgcaaacttttaga

SEQ ID NO: 1573 - DNA, 2364 bp, Zea Mays
aggggaaaccgctgtagacagtcccgggcaactggtgggtgtcgtcctcctctttgcgcagcaggaagctaaaccaaaaagctagctgtttgtttcagcttctggctttttacaccgagaagctggtgagaagctcaaacaaacagggaagaatctcctctgaggaagccgtgagtggagctgtatcaaactggcctttaggtgctgtggttggtcactgcacccaggaggctgggaaggaggaaagggataattgattcaatctctgtttggcttctaaaagtactattcctaggttggcaatgacatctgatgggaaataacaaacctccaaacttagccgtgaagccaaacaacatgctaccaagccaaaaaaaaattctaagcaaactgagatattcaagcatcacacctgtacttggccttatggctctgacgtacaggcttgcaccggggaacctggcctgcctcattgtggagactccacagttcacatgacagttgagagtaatggattaatgcattaagcaaggtaatgaaatgtaccaaaagtgacttatggaaaagaaacagagcttgttcactgctctgaatgaggaactttaatctgatgcagtctcaaaagagcagagttttgggagcaatgtcatcctctttgcctattctgccaaatcctttgaaagggagcttctcaaggcctcataacccccagcatattcctatgttgaggcagctgcctgatgactctatgcccttgtgtattgacacacatcagtctgctagtttgcacccaagagctggtgttatcggggtaccatattcaggctacactgctagtccacttgattctgtgtctaaccttgatagccagacaatggctgcaccctttatttctcagtcatccaattttgaagctctccagtctctatctaataataccccagaaacacacactaaggcagcctggttcacatcttctatggatgtttcaccactcaacacagataatattgctgcttctgatgttaatcaaatccagagtatacgtcctgctatgacatctgatgagagtgctacacaaaacgattggtgggcagatataatgaatgatgattggaaagatattcttgacgcaacagctactgattcccactcaaaagccatgattcaaatttccaactcagctacatcactacctgcagtaaatcagtcagcttcatctcatagtagggagatttgtcctgttgctagtcctcccaatagcagcaatgcttcagttgccaaacaacggatgagatggaccccagaactccatgaatgttttgtagatgctgtaaatcagcttggcggtagcgaaaaagctactcctaagggtgtgctaaagcttatgaaagttgatggtttgactatatatcatgtcaaaagccacctgcagaagtaccgcacagcccgctataaaccagacctgtcagaaggtacatcggaaaaaaggacagccactgaagagctggtcctggacctgaaaacgagcatggatcttactgaagcactgcgccttcagatggaagtccagaaacggcttcatgaacagcttgagattcagcgaaaattgcagttgcggattgaagagcaaggaaagtatctgcagatgatgtttgaaaagcagagtcaatcgagcacggagaaagtccaggatccatcctcaagggatacaacagctaaaccgtcatctaatcagagccagtctacaaacaaggattgtggtgcaaccatggacccaaatggaacaggaggcatcgtacggactgcagaactgggagaacgttcgtctgaattaggtgtaaaacagaaactcgtagagatcgaagaatctggtaccgaagtagccacaggcgacagatctaagatctcccaagagaagcggcgcaaactgcaagatagttaacatatcggttgcactattcagacatagctgttcaaaccgtttgcttggtgaaaaattggtaatctgtgtgtcgaattcgactattgatccgtgagtccattggtgagttgtaccgctcttcagttagccatatatatttataaaggatccaaaggaggaccaaaggagaacttcctggcagccgtctttataacattagcaataagagctatccccgaagttatggggtaaaataaggtcttgaaatttagctttgtttctgaattcctccttttcttttgtttgggttgaagtggtcaccgagtcgatgtagatgaccacatgaatgaatttatcggaagcaagctagtgctgttccctattggcatagaaaccaaatattgaaacacgaacactgtttgatggtgcaaacttttaga

SEQ ID NO: 1574 - DNA, 1838 bp, Zea Mays
ccacagttcacatgacagttgagagtaatggattaatgcattaagcaaggtaatgaaatgtaccaaaagtgacttatggaaaagaaacagagcttgttcactgctctgaatgaggaactttaatctgatgcagtctcaaaagagcagagttttgggagcaatgtcatcctctttgcctattctgccaaatcctttgaaagggagcttctcaaggcctcataacccccagcatattcctatgttgaggcagctgcctgatgactctatgcccttgtgtattgacacacatcagtctgctagtttgcacccaagagctggtgttatcggggtaccatattcaggctacactgctagtccacttgattctgtgtctaaccttgatagccagacaatggctgcaccctttatttctcagtcatccaattttgaagctctccagtctctatctaataataccccagaaacacacactaaggcagcctggttcacatcttctatggatgtttcaccactcaacacagataatattgctgcttctgatgttaatcaaatccagagtatacgtcctgctatgacatctgatgagagtgctacacaaaacgattggtgggcagatataatgaatgatgattggaaagatattcttgacgcaacagctactgattcccactcaaaataaatcagtcagcttcatctcatagtagggagatttgtcctgttgctagtcctcccaatagcagcaatgcttcagttgccaaacaacggatgagatggaccccagaactccatgaatgttttgtagatgctgtaaatcagcttggcggtagcgaaaaagctactcctaagggtgtgctaaagcttatgaaagttgatggtttgactatatatcatgtcaaaagccacctgcagaagtaccgcacagcccgctataaaccagacctgtcagaaggtacatcggaaaaaaggacagccactgaagagctggtcctggacctgaaaacgagcatggatcttactgaagcactgcgccttcagatggaagtccagaaacggcttcatgaacagcttgagattcagcgaaaattgcagttgcggattgaagagcaaggaaagtatctgcagatgatgtttgaaaagcagagtcaatcgagcacggagaaagtccaggatccatcctcaagggatacaacagctaaaccgtcatctaatcagagccagtctacaaacaaggattgtggtgcaaccatggacccaaatggaacaggaggcatcgtacggactgcagaactgggagaacgttcgtctgaattaggtgtaaaacagaaactcgtagagatcgaagaatctggtaccgaagtagccacaggcgacagatctaagatctcccaagagaagcggcgcaaactgcaagatagttaacatatcggttgcactattcagacatagctgttcaaaccgtttgcttggtgaaaaattggtaatctgtgtgtcgaattcgactattgatccgtgagtccattggtgagttgtaccgctcttcagttagccatatatatttataaaggatccaaaggaggaccaaaggagaacttcctggcagccgtctttataacattagcaataagagctatccccgaagttatggggtaaaataaggtcttgaaatttagctttgtttctgaattcctccttttcttttgtttgggttgaagtggtcaccgagtcgatgtagatgaccacatgaatgaatttatcggaagcaagctagtgctgttccctattggcatagaaaccaaatattgaaacacgaacactgtttgatggtgcaaacttttaga

SEQ ID NO: 1575 - DNA, 746 bp, Zea Mays
ataacccgtcagtccctcggatctagtccgataaagccactcatctaggatcgaataccactagctcactcgaaggtgaggcacagagaaatacaataaagcataataccacaaatttaataagtattaatagtgattacattatcgaagtttcaaaagcattaacaatagtttttagtgcagcggaaataactaacggagaaaaccgagtatcatggcgaagcctggccacgctactcctcctggtcctctcctgcggaagcagtaacccactcgaccgtctatcccggtggcagggatgaaggctaagtcacaccatcaaccaaatcaaggaggtacctgcaaaaattatgccacaagcaaggctgagtatactaatactcagctagagttacccggtgtgaggagtctactcctctatctctagaccatgaagctgtttggctgaggggtttggtttgccaaaagcactagctgagtctaaaaacaagttttagcttttcaagttctagaataataatttaaactagatgagagcatatctattcatacatggtatcaaacattatatcaatcaacatcttttgccagtaatctcattttcacttattactcaatgcagtacaatggatcaagcagtctcattagctgcgagaagcagacgattcgaatcgagttttaaaaccttgcaaggtaaacctaaacacacgacatgtcagggcactccgtccccacacatgtcaacc

SEQ ID NO: 1576 - DNA, 3247 bp, Zea Mays
ctcaggtcgcatgagggataaagtccgcgcccggcttcactcaggtactaggtttaccggttaccatatttcccgacatgtgtttagtacattcaaacgcttgacacaggtatccgcacgttaatccttgttccaattttgtctcatagacaacgcatccccatggatctgtgtccatagaccatcatcattctgttatcaaaatggatacaaccaattcctgacctcgcgcgagtgctagaaaaatcactcgacttctaccgagatcctgatttagcatagcagctactcgacctagcatactagtatccatctcaaaaggaatcctgagttcatgcaactagggtttcaggcaactcctacacttaagtgcacagtacaagcctacaagcattaagtgtagtaaaataacatatataaacggttatgcataaaaccggggcttgcctttaatttaacacttagatagtgtttgctgggggggtactcgcttggcgagcatccactggttaagtccatccttccttgggtcgtccaccgactgcaccttttggttggcaccacatcacttgcacgatcatcctctctcggtcataaatgagatgcaagatgcatatgtatgattatgatgaaaaataccacaagatatacaaagacacaatagcgagctaacattaatttagaagacaccgtaaaccaccacacgttagcgttagttatctacacgtcatcgggcatacgtagtcgctaccactggaaagaagacggcgcttactttacttaaccaatacaaacatgaccacacaagcatgagcacaagtgtttaccacgtttactttaatcatccattagttacttaatcgtcaagttagttatgtacctaagttcgctactactgatatatagatagacttggttgaaaaggaactagacgcttaattgggctttaaaattattcactaggcaaacacttatcagaccctcactaattaggttcactaacttagcgagacatatacttgttacttatataattaggcccaattgtattagttatactatcattactgcgggttcaaccaatcatcaaacaagaaaaacagccaactcgagccaaacacaacatagcagagcagccaccaaacataacaaaatcaggacagcagcatagcagtcactcattttaatcataactcttcaaatatgaatctaaaaatagcaaactaggactttctggaaagcttaaaaagtgttctacaattttggtattttcatctcaacctgactcaatacttaacagggtcaaaacgtgctaatacaacaactctgtccagatttggacagattcagacttgcaacttcaaaaattcacaactaaagattcagacatccaaacaaagtgattttagactttctggaaagataattaaatgttctacaatttatttataaacatcactgactagtttaacatgtattaagggtaaaatacactatgaaggttgtgctgtccaaaactggacagattcagtcttcacactttaaacatccataacttaatcttcagaccaccaaaaagagtgatccaagactttttggaaagcttagcaaaagtactacacaacttttataatcaccaagaagtgattctatgttgaactgaatcaaacaattcagttttcgaaatctgttctaacagtggacagaacacagcaactagtttgtaaaattcataactcttaaactgtcaagcctatgtttatgaaattttaacacaagcaagataagaaaagcatctacaactttactataatgaccataaacatattgtaacattaaattaggcaaacaatgcagtttctgaaatctgtacagaacttggacagattcagttactgaatttgtaaaaagcatagctcctaaacgatcagacttatgcctgtcaaattttaacaccagtaagataataaagttatctaccacttttctatagcacatatctacagaaaacaccatttggttcatcaaacatacagcacggggaaatcactgtgtgcagtccaaaacagcaattaataatttcagctcctatttactttaagaattgccgcgttctagagactcaaaccaatttaacactttaccatttgttagcgttaaattaatcgaatgatgactaataagtagacttactaattttatacaagttatttcgtgcgccagaattaccatacacaatcagcaaacacattcaccataataatcaaccctggtataaatgtgtatatcaattgcgcccttcacacactaatttgtattttcacttagacatcacatgagcaccactaattttacccgcgaccataaccatgcgcatttggactacaacaagcaatttaccgtgattacgagcttaaccaagtcatctaacaattcggctaactagagcaacgacatagccgctaaataacatacacgtcagcttgcctattatcgccgcaatccgagacacaacatatactacaacatttttataaacgcacagattcacaagtatattcgcacaccgaccaaatcatataaatcgtaaactaccagtctccaactcgcaatcaccatgcatttacttcccaatcatgaacatatatatgtttatcatacgaacagagcatttcaataattattctaaaacaattaactccattacacaacttgtaccacaaacctacttgacttacttgaagtgtctactcgaatttgtgagcacaatcacacactatatgcgaagcataatttaacgaacgcataatacgcatcgactcgactcgacttataaatatagtgaaagtgacgactactttggcatgtcaccacctctctatataagccaaaataatttctactctcgactaagagttctaagtattaaacatattattactttccacgcgcaaataaacctcaacttaacactagtgacaccgatggatttttactaaactcatcacgcgcgtaacctcgtctcacatacaaccatatagtggcgtgcactcaagacataccgattaacttaacggcattagagtgctccgacaaacccacacttcaaatctacttgtcacataatttatttttcgacccactctaacctacaccacgatgaatacataaaatatatttaacatagactaactcattagccgctgcggaaattaccaagcatgctttacgctttattaaatttacc

SEQ ID NO: 1577 - DNA, 548 bp, Zea Mays
cccacacttcaaatctacttgtcacataatttatttttcgacccactctaacctacaccacgatgaatacataaaatatatttaacatagactaactcattagccgctgcggaaattaccaagcatgctttacgctttattaaatttaccacaactagcgcactactttacgacgaattattttaacaaacaattaatagttccgcaaactaccctcgcgacacgtaaatgaaccatcgcagtcacacatgttcaacaccaatatacaccatatcatatgcatgccatcaactgaatcatattaatagtaaattgtaaatccgtcaacctgtcaaacttggattcgagtcacgcatgccgttcacggtttaggcgcttcaccgaaccatgcgtcgcgcgaggcgccgcggcatcatctagctgcgattaacatcactcaacggttcaaacatttttatcaagcacttgagataaaaaacaatgggatacgagtgaggggctcaccaaggattttgacgatacgcaagcgctgcgcaaatccggcgaag

SEQ ID NO: 1578 - DNA, 627 bp, Zea Mays
ggcaccaatttcaattaaggcgcctcaatccatcaatgatcattcctgttacgtgagtgtgatgctctctcttacttggaacctcaccaccacacgtgaccaacgttgtctactgcattatccttcgaacttaactaaaccccgctaactgcagaaaaacccatccatcgagctcacaagttcaatgaacagatggtgctggatctactctgtcaaaattgatggctagtgactgcttcccagttcccaggtttttctcaagtgttggtcctcttagtatatagtacagcagtagactgaaatctactgtcaaaaatgattcggctcccaagctcaagcacactatggacttacattgcactcgtccatgaatctctcgtctcgtgtaagaaacctcttccagtacttcctataatctggtatacccaactcaagccaaggtttcatatttccattataatgcaacgatgcagaattctgaacaagttcttctttaattccatagtcatatccaagtccagataaaatcaatctctcatcaagtggatatagaagatgctggaacgacaacaaacttataggcaaagctgaagctcgtagtgaggcctcgtcatcattgttcccaaa

SEQ ID NO: 1579 - DNA, 2183 bp, Zea Mays
cgctcgttcgttacacctgtacagtgtacatatcatgggttaacacctcgattcgcgccgagagccttccagagcaaagaagccggccaccaacaaaacccgacccgacgacgacgagcaagtagctgccagaacccagcacagctctacccaccaattctgattctggaagacagacagtagtcgatcgcatcgcatcgcatggcgacgaggccggcagcggaggagaagccgtgggagctggcggcgcacccgcggctgcccaagggcaggacggtggccgtggtggtgctggacggctggggcgaggcggcgcccgaccccttcaactgcatccacgtcgccgacacgcccacgctcgacgccctcaagaaggcagctccggagagatggaggctcatcaaggcgcacgggacggcggtggggctgccgacggacgacgacatggggaacagcgaggtcggccacaatgcgctcggagcgggacagatatacgcgcagggcgcgaaactggtcgatctggcgctgggttccgggaagatatacgagggcgaaggtttcaagtacatccagcagtccttccaggacggcactctgcacctcatcggcctgctcagcgacggaggcgtgcactccaggttcgaccagctgcagctgctgctccaaggtgctagcgagcgcggggcgaagaggatacgtgtgcacgtcctcacggatgggcgggacgtggcggacggcagcagcgtcaggttcgtggagatgcttgaggaggacctcgctaggcttcgggagaagggcgtcgatgcgagaatagcgtctggcggtggcaggatgtatgtgacgatggaccgttacgagaacgactggcaggtcgtgaagcgaggctgggacgcgcacgtcctgggcgaagccccgcacaggttcaggagcgcgctcgaggccctgaggaagctgagggaggaggaccccaagaaggccagcgaccagtacctgccccccttcgtcgtagtcgacgggagcggggagccggtcggcccggtgcgggacggagacgccgtggtgacgttcaacttcagggccgaccggatggtgatgctcgccaaggcgctggagtacgagggcttcgacaggttcgaccgcgtcaggttccccaggacgcggtacgccggcatgctccagtacgacggcgagctcaagctcccgcgccactacctcgttgctcccccggagatccagaggacgtccggcgagtacttggcgcgcaacggcgtccgcacctacgcttgcagcgagacggtcaagtttgggcacgtcacttttttctggaacgggaatcggtctggttacttcgaccagaacctggaaaaatacgaggagattcccagcgatgccggcatccccttcaatgtccagccgaagatgaaggccttggaaatcgcgcagaaggcgagggacgccatcctgagccaaaaattcgatcaggtaagggtcaacattgcaaacggagatatggttggccatacaggagacatggaggcaaccattgttgggtgcaaggcagctgatgaggctgttaagatcatcctcgacgccgttgagcaagtgggcggcgttttcgtggtgactgccgaccacggcaacgccgaggacatggcgaaaagagacaagtctggagaaccactccgggacaaggacggcaaggtgcagaccctgacttcgcacacgctgaatccggtcccaatcgcgataggaggccccgggcttgcgcctggcgtcaggttccgtacagacctcgcaagtgccggcctcgccaatgttgcggcgacggtcatgaaccttcatgggtttcaggcacccgatcactatgagccaacgctgatccaagtcgtcgacgagtgatttccgctttgctggttgctgcgttgcagttttcagacattatctgaactaactcctaccacagttgtccggcatgtaatcgtactcaaactagactacctgggcaattacctgtgccaattaccgtgtcgaatgttcaaaaatgttttcgttaaggccttgttcgtttgtattacactcgtaattgttgtagctaatcaaagtttatataaattagagaaacaatccggataggaatcgttccgatttactaatccggcacaaatgaacaaggtaagtatttt

SEQ ID NO: 1580 - DNA, 1711 bp, Zea Mays
atcacaggttcaacaatattcaacattaaatggcaatatcatgccttcaaatcacacaaaacatagcattgattctacccgtgccctaatagagtttttacccatcgggagcaaattcattttatatgagacataaatctggacccacatgtcatatattagcgggttccctatcgggtagcgggtatggggcaacagagaacatacccacgcccaccatacccgatgggcataacaaatgacccaataaaatacccatgggtatcaaaatccgacatacccgtgccctaatagggtttttacctatcgggtttcgggtacccattgccatccctaatctcagcccgcccgcccgccccactctggagataaggctctccgcctccgcctcgcagcctcccttctatcctctccggcacgagccgtccagttcagttcacctcggtccgggaccgcgactacaccgacggcggcgcgtccgagcccagccgacgccgagccaatggtgactccagcgacattctccctccgccccagcgcgccccccgcgccgcctcgtgccgggctgccccgcgctcgggcctgtttcgcgcccgccatccgcacctccccttccgtcgccttttcctaccagcctcggcgcttcagtggcatccgccgcgccgtggccgtcgactccgagcagggctcccccgagtctccagagcaggagaagaagcccaagacgtactacttcctggtggcaaacgccaagttcatgctggacgaggaggagcatttccaggagcaactcgccgagaagctgcgcaactacgccgagcgcgacaaggagcaggacttctggctcgtcgtggagcccaagttcctcgacaggttccccaacatcaccaagcgcctcaagcgccccgccgtcgcgcttgtctccaccgacggcaactggatcacattcatgaagttaaggctagacagggtcttacaagaccagttcgacgcagaatcagttgaagaggcattggcttctaaccctgttgagttgaaatttgagaagcctgagaaatggacagctccgtaccctaaatatgggtttggatggtgggaacccttcttgcctccaaagttcagcaatggtacggcatagagataagcagcaatccctatgaggcatgtaagattactcccctgttataacacgaggcactactacttgctcagtctaccagaccagaataaagacctctgtgccacgaagcacgaacaaatggacaatgccaatcacaatagtaaggacggactaacctgaacggttattatgggtccgtttggtttctttagtctcgagactaaagtttagttaggagactaaagtttagtccctattctgtttggttctaggactaaaagtattcaaaacacattaaataaatcataagaagactaaaatatcctttagcattctcctgtcattagtgcaactgaaataaaggaagaataaaaagtgtaatttatatggtttagtctcttttagtcacccttgaaggattagagacaaacaatttagtccatgttttagtcccaccgattgacaatttagggactgaaattgagagactaatctttagtccctcaaaccaaatggggcctatgaagtacaattgtttatccctataatatggtgactactaatatcttgggtgaaaacctacagatcgag

SEQ ID NO: 1581 - DNA, 1695 bp, Zea Mays
atcacaggttcaacaatattcaacattaaatggcaatatcatgccttcaaatcacacaaaacatagcattgattctacccgtgccctaatagagtttttacccatcgggagcaaattcattttatatgagacataaatctggacccacatgtcatatattagcgggttccctatcgggtagcgggtatggggcaacagagaacatacccacgcccaccatacccgatgggcataacaaatgacccaataaaatacccatgggtatcaaaatccgacatacccgtgccctaatagggtttttacctatcgggtttcgggtacccattgccatccctaatctcagcccgcccgcccgccccactctggagataaggctctccgcctccgcctcgcagcctcccttctatcctctccggcacgagccgtccagttcagttcacctcggtccgggaccgcgactacaccgacggcggcgcgtccgagcccagccgacgccgagccaatggtgactccagcgacattctccctccgccccagcgcgccccccgcgccgcctcgtgccgggctgccccgcgctcgggcctgtttcgcgcccgccatccgcacctccccttccgtcgccttttcctaccagcctcggcgcttcagtggcatccgccgcgccgtggccgtcgactccgagcagggctcccccgagtctccagagcaggagaagaagcccaagacgtactacttcctggtggcaaacgccaagttcatgctggacgaggaggagcatttccaggagcaactcgccgagaagctgcgcaactacgccgagcgcgacaaggagcaggacttctggctcgtcgtggagcccaagttcctcgacaggttccccaacatcaccaagcgcctcaagcgccccgccgtcgcgcttgtctccaccgacggcaactggatcacattcatgaagttaaggctagacagggtcttacaagaccagttcgacgcagaatcagttgaagaggcattggcttctaaccctgttgagttgaaatttgagaagcctgagaaatggacagctccgtaccctaaatatgggtttggatggtgggaacccttcttgcctccaaagttcagcaatggtacggcatagagataagcagcaatccctatgaggcatgttataacacgaggcactactacttgctcagtctaccagaccagaataaagacctctgtgccacgaagcacgaacaaatggacaatgccaatcacaatagtaaggacggactaacctgaacggttattatgggtccgtttggtttctttagtctcgagactaaagtttagttaggagactaaagtttagtccctattctgtttggttctaggactaaaagtattcaaaacacattaaataaatcataagaagactaaaatatcctttagcattctcctgtcattagtgcaactgaaataaaggaagaataaaaagtgtaatttatatggtttagtctcttttagtcacccttgaaggattagagacaaacaatttagtccatgttttagtcccaccgattgacaatttagggactgaaattgagagactaatctttagtccctcaaaccaaatggggcctatgaagtacaattgtttatccctataatatggtgactactaatatcttgggtgaaaacctacagatcgag

SEQ ID NO: 1582 - DNA, 658 bp, Zea Mays
agcagggctcccccgagtctccagagcagaagcccaagacgtactacttcctggtggcaaacgccaagttcatgctggacgaggaggagcatttccaggagcaactcgccgagaagctgcgcaactacgccgagcgcgacaaggagcaggacttctggctcgtcgtggagcccaagttcctcgacaggttccccaacatcaccaagcgcctcaagcgccccgccgtcgcgcttgtctccaccgacggcaactggatcacattcatgaagttaaggctagacagggtcttacaagaccagttcgacgcagaatcagttgaagaggcattggcttctaaccctgttgagttgaaatttgagaagcctgagaaatggacagctccgtaccctaaatatgggtttggatggtgggaacccttcttgcctccaaagttcagcaatggtacggcatagagataagcagcaatccctatgaggcatgtaagattactcccctgtaagtgatgaatgtaattttaattttgatgatgaggatgtagtacttgaggttgtaccagtacagttagttgaattagttgcacagtttttgtaataccaaataatcagctgttttattttatttgagaaagtcgcggttctgttatgactgatggcatatt

SEQ ID NO: 1583 - DNA, 2889 bp, Zea Mays
gtacaatataaacatatagaaagaggttagtgccgactggcagcaacatgaatccttacacgacacggaaggaaaccaaaagaaaagaggaggaaaactggaaaagacccaattctccacggccagagggagtccaactccgcctccagcactcacgcttcgtctgctgaccctacccatcgcggccgccgccggctcgccgctgctgccaggcgctatgcggccttgctcccgcatactcgcggcgcgtcacttcgtccgcagcttccggttcgatccctcccaaactacctcccccgctgccggatttcgtcggctgaccggagccaacaggccgttcgtgccgaaacctctctttggcattctcctcggaggcttcagatcgaactgtggcgtactgcctgggaaaggggtccccttgggcagcctcggcagcttcctgccggactctgcctaccagctgcacggcgcgcggcttcaacgagatacgagaggtaatgcattctccacatccgccaatgctgtgacagttaagaagccagttggtgacaaggtccagaaagatgcatcaaaaaaggatattgatgaggagattgctgattctcagatattgaaaaaccttgggaagtacttattgttgaatgacagccctgacttccgctttagggttgccttgtcgttggtcctgttagttggtgcaaaggttataaatgttcaagtgcctttcttgtttaagctagctatcgactggcttgcagcccttggtggtgctgaagcttccctggcatcattcactgaaactaatgccaccctattggctctatttgcaagcccagcagctgttctgataggatatggaatcgcacgatcaggagtatcagcctgtacagaactgcgaaacgctgtattttctaaagtgactttgagagcaatccgttcagtatccagaaaggtattttctcacttgcatgagcttgatcttcgatatcatctaagccggcaaactggtgctataaatcgcgtaattgatcgaggaagccgtgcaataaattacatcctcacagtcatggtgtttaatgtcgtgcccacgatactagagattggtatggtgtcaagcatacttgcctacaaatttggttcaacttttgcttggatcacttcagtttcagttgctacttatattgctttcactttggctgtcacacagtggcggactaagttcaggatggccatgaataaagctgataatgcttctagtacggtggcagttgactctcttctcaattatgagactgtgaaatacttcaacaatgaacaatttgaagttgagaagtacgacaaatatttaaggaattatgaggatgctgcattgaagacccaaagtagtcttgcctacctgaactttggccaaaatgttatctttagctcagctttatctacagcaatggttttgagctcatatggaataatgagtggtgctctgactgtgggtgatttggtcatggttaatgggcttttattccagctttcattacctctgaacttccttgggagtgtgtatcgagaatctagacaaagcctcattgacatgaagtcaatgtttcagttgcttgaggaaaaacctgcaataaaggatgagcctcatgcacaacctttgcagttcaagggagggtgcattgaattcgagaatgttcattttgggtatgtaccagaaaggaagattcttgatggtgccactttcaccgtacctgcaggaaagagtgtggccattgttggaactagcggaagcgggaaatcaactattcttagacttcttttcagattctttgattcgacttcaggatctatacgaattgacgggcaagatatccgaggagtgacactggggagccttcgaaaatgtctaggtgtggtacctcaggacacagtactttttaatgacacgattaagcataatatacagtatgggcggttatcagcaaaagatgaggaggtctttgatgctgcccgacgtgctgctattcatgatacaattatgaacttcccagacaagtatgacaccgtagtaggagaacgaggattgaagttaagcggcggggagaaacaacgagtgtcaatagcccgtgtattcttgaaggagccttccattctgttatgtgatgaagcaactagtgctcttgacagcactactgaagcatcaattttgaattctctgaaatccttatcttccgatcgaacatcaatctttattgctcatcgactcacaactgcaatgcagtgtgatcagataattgttttggaggatgggaaggtagtagaacaaggaccacatgattttcttctgtcacagggtgggcgatacgcagaattgtggtatcagcagaacagcactgacgccatggattctgctgcagctagcgtagaggtttgattgaccatgtttaccttttccttctgcaaggggaaaagaagggaaaacacaatcataaccgtgagagagagggatggagccaacttgtctgccttgtaattagaggtaggttttttggttcgggggggaggggggggggggggggggcataaacgtacagttccattttcaagatagccgggaggattttccccccttttgagattgtatagacgatccctgcatgttatgataaccgtaacgtttctgtagcataagggataaagcccagtaagggcctgtttgtttcgcatggaataaagggtagaataaatctggcttggattcctttaataattactataatttttggagatttagaattaattctggtctgttccagtagaaacgaacgggccctaaatattcagttgcctcaggcgtactaccgtttcaatataaatgctcccatgattgct

SEQ ID NO: 1584 - DNA, 3069 bp, Zea Mays
gcaaaaaaaagatttccttgcagcatatgtcagcgcaaccacagcatttcgtcgagcggctggcgtacctgcgcgaacacggagctgtagaacacgggcggccgacggggaggtggctccgcttccgccggagcatcctgccgagtatccgcgcatgcctcctcgcccgcccgccgcggggagcgccatgctgtttgttggcctcggatccccttaatcgcggagcatcgacgtcgatgagagatccgcgagcggtcgcggaggatgaaggtgcgcgccgcgggatggaaggaaaccaaaagaaaagaggaggaaaactggaaaagacccaattctccacggccagagggagtccaactccgcctccagcactcacgcttcgtctgctgaccctacccatcgcggccgccgccggctcgccgctgctgccaggcgctatgcggccttgctcccgcatactcgcggcgcgtcacttcgtccgcagcttccggttcgatccctcccaaactacctcccccgctgccggatttcgtcggctgaccggagccaacaggccgttcgtgccgaaacctctctttggcattctcctcggaggcttcagatcgaactgtggcgtactgcctgggaaaggggtccccttgggcagcctcggcagcttcctgccggactctgcctaccagctgcacggcgcgcggcttcaacgagatacgttaagaagccagttggtgacaaggtccagaaagatgcatcaaaaaaggatattgatgaggagattgctgattctcagatattgaaaaaccttgggaagtacttattgttgaatgacagccctgacttccgctttagggttgccttgtcgttggtcctgttagttggtgcaaaggttataaatgttcaagtgcctttcttgtttaagctagctatcgactggcttgcagcccttggtggtgctgaagcttccctggcatcattcactgaaactaatgccaccctattggctctatttgcaagcccagcagctgttctgataggatatggaatcgcacgatcaggagtatcagcctgtacagaactgcgaaacgctgtattttctaaagtgactttgagagcaatccgttcagtatccagaaaggtattttctcacttgcatgagcttgatcttcgatatcatctaagccggcaaactggtgctataaatcgcgtaattgatcgaggaagccgtgcaataaattacatcctcacagtcatggtgtttaatgtcgtgcccacgatactagagattggtatggtgtcaagcatacttgcctacaaatttggttcaacttttgcttggatcacttcagtttcagttgctacttatattgctttcactttggctgtcacacagtggcggactaagttcaggatggccatgaataaagctgataatgcttctagtacggtggcagttgactctcttctcaattatgagactgtgaaatacttcaacaatgaacaatttgaagttgagaagtacgacaaatatttaaggaattatgaggatgctgcattgaagacccaaagtagtcttgcctacctgaactttggccaaaatgttatctttagctcagctttatctacagcaatggttttgagctcatatggaataatgagtggtgctctgactgtgggtgatttggtcatggttaatgggcttttattccagctttcattacctctgaacttccttgggagtgtgtatcgagaatctagacaaagcctcattgacatgaagtcaatgtttcagttgcttgaggaaaaacctgcaataaaggatgagcctcatgcacaacctttgcagttcaagggagggtgcattgaattcgagaatgttcattttgggtatgtaccagaaaggaagattcttgatggtgccactttcaccgtacctgcaggaaagagtgtggccattgttggaactagcggaagcgggaaatcaactattcttagacttcttttcagattctttgattcgacttcaggatctatacgaattgacgggcaagatatccgaggagtgacactggggagccttcgaaaatgtctaggtgtggtacctcaggacacagtactttttaatgacacgattaagcataatatacagtatgggcggttatcagcaaaagatgaggaggtctttgatgctgcccgacgtgctgctattcatgatacaattatgaacttcccagacaagtatgacaccgtagtaggagaacgaggattgaagttaagcggcggggagaaacaacgagtgtcaatagcccgtgtattcttgaaggagccttccattctgttatgtgatgaagcaactagtgctcttgacagcactactgaagcatcaattttgaattctctgaaatccttatcttccgatcgaacatcaatctttattgctcatcgactcacaactgcaatgcagtgtgatcagataattgttttggaggatgggaaggtagtagaacaaggaccacatgattttcttctgtcacagggtgggcgatacgcagaattgtggtatcagcagaacagcactgacgccatggattctgctgcagctagcgtagaggtttgattgaccatgtttaccttttccttctgcaaggggaaaagaagggaaaacacaatcataaccgtgagagagagggatggagccaacttgtctgccttgtaattagaggtaggttttttggttcgggggggaggggggggggggggggggcataaacgtacagttccattttcaagatagccgggaggattttccccccttttgagattgtatagacgatccctgcatgttatgataaccgtaacgtttctgtagcataagggataaagcccagtaagggcctgtttgtttcgcatggaataaagggtagaataaatctggcttggattcctttaataattactataatttttggagatttagaattaattctggtctgttccagtagaaacgaacgggccctaaatattcagttgcctcaggcgtactaccgtttcaatataaatgctcccatgattgct

SEQ ID NO: 1585 - DNA, 3124 bp, Zea Mays
gcaaaaaaaagatttccttgcagcatatgtcagcgcaaccacagcatttcgtcgagcggctggcgtacctgcgcgaacacggagctgtagaacacgggcggccgacggggaggtggctccgcttccgccggagcatcctgccgagtatccgcgcatgcctcctcgcccgcccgccgcggggagcgccatgctgtttgttggcctcggatccccttaatcgcggagcatcgacgtcgatgagagatccgcgagcggtcgcggaggatgaaggtgcgcgccgcgggatggaaggtgagcgccgcggggatcgcggctgcgggatgagtggctgtgcggaggatggaaggcggaggatgaaggtgcgcgctgcgggatggaagaaaagaggaggaaaactggaaaagacccaattctccacggccagagggagtccaactccgcctccagcactcacgcttcgtctgctgaccctacccatcgcggccgccgccggctcgccgctgctgccaggcgctatgcggccttgctcccgcatactcgcggcgcgtcacttcgtccgcagcttccggccgttcgtgccgaaacctctctttggcattctcctcggaggcttcagatcgaactgtggcgtactgcctgggaaaggggtccccttgggcagcctcggcagcttcctgccggactctgcctaccagctgcacggcgcgcggcttcaacgagatacgagaggtaatgcattctccacatccgccaatgctgtgacagttaagaagccagttggtgacaaggtccagaaagatgcatcaaaaaaggatattgatgaggagattgctgattctcagatattgaaaaaccttgggaagtacttattgttgaatgacagccctgacttccgctttagggttgccttgtcgttggtcctgttagttggtgcaaaggttataaatgttcaagtgcctttcttgtttaagctagctatcgactggcttgcagcccttggtggtgctgaagcttccctggcatcattcactgaaactaatgccaccctattggctctatttgcaagcccagcagctgttctgataggatatggaatcgcacgatcaggagtatcagcctgtacagaactgcgaaacgctgtattttctaaagtgactttgagagcaatccgttcagtatccagaaaggtattttctcacttgcatgagcttgatcttcgatatcatctaagccggcaaactggtgctataaatcgcgtaattgatcgaggaagccgtgcaataaattacatcctcacagtcatggtgtttaatgtcgtgcccacgatactagagattggtatggtgtcaagcatacttgcctacaaatttggttcaacttttgcttggatcacttcagtttcagttgctacttatattgctttcactttggctgtcacacagtggcggactaagttcaggatggccatgaataaagctgataatgcttctagtacggtggcagttgactctcttctcaattatgagactgtgaaatacttcaacaatgaacaatttgaagttgagaagtacgacaaatatttaaggaattatgaggatgctgcattgaagacccaaagtagtcttgcctacctgaactttggccaaaatgttatctttagctcagctttatctacagcaatggttttgagctcatatggaataatgagtggtgctctgactgtgggtgatttggtcatggttaatgggcttttattccagctttcattacctctgaacttccttgggagtgtgtatcgagaatctagacaaagcctcattgacatgaagtcaatgtttcagttgcttgaggaaaaacctgcaataaaggatgagcctcatgcacaacctttgcagttcaagggagggtgcattgaattcgagaatgttcattttgggtatgtaccagaaaggaagattcttgatggtgccactttcaccgtacctgcaggaaagagtgtggccattgttggaactagcggaagcgggaaatcaactattcttagacttcttttcagattctttgattcgacttcaggatctatacgaattgacgggcaagatatccgaggagtgacactggggagccttcgaaaatgtctaggtgtggtacctcaggacacagtactttttaatgacacgattaagcataatatacagtatgggcggttatcagcaaaagatgaggaggtctttgatgctgcccgacgtgctgctattcatgatacaattatgaacttcccagacaagtatgacaccgtagtaggagaacgaggattgaagttaagcggcggggagaaacaacgagtgtcaatagcccgtgtattcttgaaggagccttccattctgttatgtgatgaagcaactagtgctcttgacagcactactgaagcatcaattttgaattctctgaaatccttatcttccgatcgaacatcaatctttattgctcatcgactcacaactgcaatgcagtgtgatcagataattgttttggaggatgggaaggtagtagaacaaggaccacatgattttcttctgtcacagggtgggcgatacgcagaattgtggtatcagcagaacagcactgacgccatggattctgctgcagctagcgtagaggtttgattgaccatgtttaccttttccttctgcaaggggaaaagaagggaaaacacaatcataaccgtgagagagagggatggagccaacttgtctgccttgtaattagaggtaggttttttggttcgggggggaggggggggggggggggggcataaacgtacagttccattttcaagatagccgggaggattttccccccttttgagattgtatagacgatccctgcatgttatgataaccgtaacgtttctgtagcataagggataaagcccagtaagggcctgtttgtttcgcatggaataaagggtagaataaatctggcttggattcctttaataattactataatttttggagatttagaattaattctggtctgttccagtagaaacgaacgggccctaaatattcagttgcctcaggcgtactaccgtttcaatataaatgctcccatgattgct

SEQ ID NO: 1586 - DNA, 3253 bp, Zea Mays
gcaaaaaaaagatttccttgcagcatatgtcagcgcaaccacagcatttcgtcgagcggctggcgtacctgcgcgaacacggagctgtagaacacgggcggccgacggggaggtggctccgcttccgccggagcatcctgccgagtatccgcgcatgcctcctcgcccgcccgccgcggggagcgccatgctgtttgttggcctcggatccccttaatcgcggagcatcgacgtcgatgagagatccgcgagcggtcgcggaggatgaaggtgcgcgccgcgggatggaaggtgagcgccgcggggatcgcggctgcgggatgagtggctgtgcggaggatggaaggcggaggatgaaggtgcgcgctgcgggatggaaggtgagcgccgcggggatcgcggctgcgggatgagtggctgcgcggaggatggaaggaaaccaaaagaaaagaggaggaaaactggaaaagacccaattctccacggccagagggagtccaactccgcctccagcactcacgcttcgtctgctgaccctacccatcgcggccgccgccggctcgccgctgctgccaggcgctatgcggccttgctcccgcatactcgcggcgcgtcacttcgtccgcagcttccggttcgatccctcccaaactacctcccccgctgccggatttcgtcggctgaccggagccaacaggccgttcgtgccgaaacctctctttggcattctcctcggaggcttcagatcgaactgtggcgtactgcctgggaaaggggtccccttgggcagcctcggcagcttcctgccggactctgcctaccagctgcacggcgcgcggcttcaacgagatacgagaggtaatgcattctccacatccgccaatgctgtgacagttaagaagccagttggtgacaaggtccagaaagatgcatcaaaaaaggatattgatgaggagattgctgattctcagatattgaaaaaccttgggaagtacttattgttgaatgacagccctgacttccgctttagggttgccttgtcgttggtcctgttagttggtgcaaaggttataaatgttcaagtgcctttcttgtttaagctagctatcgactggcttgcagcccttggtggtgctgaagcttccctggcatcattcactgaaactaatgccaccctattggctctatttgcaagcccagcagctgttctgataggatatggaatcgcacgatcaggagtatcagcctgtacagaactgcgaaacgctgtattttctaaagtgactttgagagcaatccgttcagtatccagaaaggtattttctcacttgcatgagcttgatcttcgatatcatctaagccggcaaactggtgctataaatcgcgtaattgatcgaggaagccgtgcaataaattacatcctcacagtcatggtgtttaatgtcgtgcccacgatactagagattggtatggtgtcaagcatacttgcctacaaatttggttcaacttttgcttggatcacttcagtttcagttgctacttatattgctttcactttggctgtcacacagtggcggactaagttcaggatggccatgaataaagctgataatgcttctagtacggtggcagttgactctcttctcaattatgagactgtgaaatacttcaacaatgaacaatttgaagttgagaagtacgacaaatatttaaggaattatgaggatgctgcattgaagacccaaagtagtcttgcctacctgaactttggccaaaatgttatctttagctcagctttatctacagcaatggttttgagctcatatggaataatgagtggtgctctgactgtgggtgatttggtcatggttaatgggcttttattccagctttcattacctctgaacttccttgggagtgtgtatcgagaatctagacaaagcctcattgacatgaagtcaatgtttcagttgcttgaggaaaaacctgcaataaaggatgagcctcatgcacaacctttgcagttcaagggagggtgcattgaattcgagaatgttcattttgggtatgtaccagaaaggaagattcttgatggtgccactttcaccgtacctgcaggaaagagtgtggccattgttggaactagcggaagcgggaaatcaactattcttagacttcttttcagattctttgattcgacttcaggatctatacgaattgacgggcaagatatccgaggagtgacactggggagccttcgaaaatgtctaggtgtggtacctcaggacacagtactttttaatgacacgattaagcataatatacagtatgggcggttatcagcaaaagatgaggaggtctttgatgctgcccgacgtgctgctattcatgatacaattatgaacttcccagacaagtatgacaccgtagtaggagaacgaggattgaagttaagcggcggggagaaacaacgagtgtcaatagcccgtgtattcttgaaggagccttccattctgttatgtgatgaagcaactagtgctcttgacagcactactgaagcatcaattttgaattctctgaaatccttatcttccgatcgaacatcaatctttattgctcatcgactcacaactgcaatgcagtgtgatcagataattgttttggaggatgggaaggtagtagaacaaggaccacatgattttcttctgtcacagggtgggcgatacgcagaattgtggtatcagcagaacagcactgacgccatggattctgctgcagctagcgtagaggtttgattgaccatgtttaccttttccttctgcaaggggaaaagaagggaaaacacaatcataaccgtgagagagagggatggagccaacttgtctgccttgtaattagaggtaggttttttggttcgggggggaggggggggggggggggggcataaacgtacagttccattttcaagatagccgggaggattttccccccttttgagattgtatagacgatccctgcatgttatgataaccgtaacgtttctgtagcataagggataaagcccagtaagggcctgtttgtttcgcatggaataaagggtagaataaatctggcttggattcctttaataattactataatttttggagatttagaattaattctggtctgttccagtagaaacgaacgggccctaaatattcagttgcctcaggcgtactaccgtttcaatataaatgctcccatgattgct

SEQ ID NO: 1587 - DNA, 3098 bp, Zea Mays
gcaaaaaaaagatttccttgcagcatatgtcagcgcaaccacagcatttcgtcgagcggctggcgtacctgcgcgaacacggagctgtagaacacgggcggccgacggggaggtggctccgcttccgccggagcatcctgccgagtatccgcgcatgcctcctcgcccgcccgccgcggggagcgccatgctgtttgttggcctcggatccccttaatcgcggagcatcgacgtcgatgagagatccgcgagcggtcgcggaggatgaaggtgcgcgccgcgggatggaagaaaagaggaggaaaactggaaaagacccaattctccacggccagagggagtccaactccgcctccagcactcacgcttcgtctgctgaccctacccatcgcggccgccgccggctcgccgctgctgccaggcgctatgcggccttgctcccgcatactcgcggcgcgtcacttcgtccgcagcttccggttcgatccctcccaaactacctcccccgctgccggatttcgtcggctgaccggagccaacaggccgttcgtgccgaaacctctctttggcattctcctcggaggcttcagatcgaactgtggcgtactgcctgggaaaggggtccccttgggcagcctcggcagcttcctgccggactctgcctaccagctgcacggcgcgcggcttcaacgagatacgagaggtaatgcattctccacatccgccaatgctgtgacagttaagaagccagttggtgacaaggtccagaaagatgcatcaaaaaaggatattgatgaggagattgctgattctcagatattgaaaaaccttgggaagtacttattgttgaatgacagccctgacttccgctttagggttgccttgtcgttggtcctgttagttggtgcaaaggttataaatgttcaagtgcctttcttgtttaagctagctatcgactggcttgcagcccttggtggtgctgaagcttccctggcatcattcactgaaactaatgccaccctattggctctatttgcaagcccagcagctgttctgataggatatggaatcgcacgatcaggagtatcagcctgtacagaactgcgaaacgctgtattttctaaagtgactttgagagcaatccgttcagtatccagaaaggtattttctcacttgcatgagcttgatcttcgatatcatctaagccggcaaactggtgctataaatcgcgtaattgatcgaggaagccgtgcaataaattacatcctcacagtcatggtgtttaatgtcgtgcccacgatactagagattggtatggtgtcaagcatacttgcctacaaatttggttcaacttttgcttggatcacttcagtttcagttgctacttatattgctttcactttggctgtcacacagtggcggactaagttcaggatggccatgaataaagctgataatgcttctagtacggtggcagttgactctcttctcaattatgagactgtgaaatacttcaacaatgaacaatttgaagttgagaagtacgacaaatatttaaggaattatgaggatgctgcattgaagacccaaagtagtcttgcctacctgaactttggccaaaatgttatctttagctcagctttatctacagcaatggttttgagctcatatggaataatgagtggtgctctgactgtgggtgatttggtcatggttaatgggcttttattccagctttcattacctctgaacttccttgggagtgtgtatcgagaatctagacaaagcctcattgacatgaagtcaatgtttcagttgcttgaggaaaaacctgcaataaaggatgagcctcatgcacaacctttgcagttcaagggagggtgcattgaattcgagaatgttcattttgggtatgtaccagaaaggaagattcttgatggtgccactttcaccgtacctgcaggaaagagtgtggccattgttggaactagcggaagcgggaaatcaactattcttagacttcttttcagattctttgattcgacttcaggatctatacgaattgacgggcaagatatccgaggagtgacactggggagccttcgaaaatgtctaggtgtggtacctcaggacacagtactttttaatgacacgattaagcataatatacagtatgggcggttatcagcaaaagatgaggaggtctttgatgctgcccgacgtgctgctattcatgatacaattatgaacttcccagacaagtatgacaccgtagtaggagaacgaggattgaagttaagcggcggggagaaacaacgagtgtcaatagcccgtgtattcttgaaggagccttccattctgttatgtgatgaagcaactagtgctcttgacagcactactgaagcatcaattttgaattctctgaaatccttatcttccgatcgaacatcaatctttattgctcatcgactcacaactgcaatgcagtgtgatcagataattgttttggaggatgggaaggtagtagaacaaggaccacatgattttcttctgtcacagggtgggcgatacgcagaattgtggtatcagcagaacagcactgacgccatggattctgctgcagctagcgtagaggtttgattgaccatgtttaccttttccttctgcaaggggaaaagaagggaaaacacaatcataaccgtgagagagagggatggagccaacttgtctgccttgtaattagaggtaggttttttggttcgggggggaggggggggggggggggggcataaacgtacagttccattttcaagatagccgggaggattttccccccttttgagattgtatagacgatccctgcatgttatgataaccgtaacgtttctgtagcataagggataaagcccagtaagggcctgtttgtttcgcatggaataaagggtagaataaatctggcttggattcctttaataattactataatttttggagatttagaattaattctggtctgttccagtagaaacgaacgggccctaaatattcagttgcctcaggcgtactaccgtttcaatataaatgctcccatgattgct

SEQ ID NO: 1588 - DNA, 3267 bp, Zea Mays
gcaaaaaaaagatttccttgcagcatatgtcagcgcaaccacagcatttcgtcgagcggctggcgtacctgcgcgaacacggagctgtagaacacgggcggccgacggggaggtggctccgcttccgccggagcatcctgccgagtatccgcgcatgcctcctcgcccgcccgccgcggggagcgccatgctgtttgttggcctcggatccccttaatcgcggagcatcgacgtcgatgagagatccgcgagcggtcgcggaggatgaaggtgcgcgccgcgggatggaaggtgagcgccgcggggatcgcggctgcgggatgagtggctgtgcggaggatggaaggcggaggatgaaggtgcgcgctgcgggatggaaggtgagcgccgcggggatcgcggctgcgggatgagtggctgcgcggaggatggaaggaaaccaaaagaaaagaggaggaaaactggaaaagacccaattctccacggccagagggagtccaactccgcctccagcactcacgcttcgtctgctgaccctacccatcgcggccgccgccggctcgccgctgctgccaggcgctatgcggccttgctcccgcatactcgcggcgcgtcacttcgtccgcagcttccggttcgatccctcccaaactacctcccccgctgccggatttcgtcggctgaccggagccaacaggccgttcgtgccgaaacctctctttggcattctcctcggaggcttcagatcgaactgtggcgtactgcctgggaaaggggtccccttgggcagcctcggcagcttcctgccggactctgcctaccagctgcacggcgcgcggcttcaacgagatacgagaggtaatgcattctccacatccgccaatgctgtgacagttaagaagccagttggtgacaaggtccagaaagatgcatcaaaaaaggatattgatgaggagattgctgattctcagatattgaaaaaccttgggaagtacttattgttgaatgacagccctgacttccgctttagggttgccttgtcgttggtcctgttagttggtgcaaaggttataaatgttcaagtgcctttcttgtttaagctagctatcgactggcttgcagcccttggtggtgctgaagcttccctggcatcattcactgaaactaatgccaccctattggctctatttgcaagcccagcagctgttctgataggatatggaatcgcacgatcaggagtatcagcctgtacagaactgcgaaacgctgtattttctaaagtgactttgagagcaatccgttcagtatccagaaaggtattttctcacttgcatgagcttgatcttcgatatcatctaagccggcaaactggtgctataaatcgcgtaattgatcgaggaagccgtgcaataaattacatcctcacagtcatggtgtttaatgtcgtgcccacgatactagagattggtatggtgtcaagcatacttgcctacaaatttggttcaacttttgcttggatcacttcagtttcagttgctacttatattgctttcactttggctgtcacacagtggcggactaagttcaggatggccatgaataaagctgataatgcttctagtacggtggcagttgactctcttctcaattatgagactgtgaaatacttcaacaatgaacaatttgaagttgagaagtacgacaaatatttaaggaattatgaggatgctgcattgaagacccaaagtagtcttgcctacctgaactttggccaaaatgttatctttagctcagctttatctacagcaatggttttgagctcatatggaataatgagtggtgctctgactgtgggtgatttggtcatggttaatgggcttttattccagctttcattacctctgaacttccttgggagtgtgtatcgagaatctagacaaagcctcattgacatgaagtcaatgtttcagttgcttgaggaaaaacctgcaataaaggatgagcctcatgcacaacctttgcagttcaagggagggtgcattgaattcgagaatgttcattttgggtatgtaccagaaaggaagattcttgatggtgccactttcaccgtacctgcaggaaagagtgtggccattgttggaactagcggaagcgggaaatcaactattcttagacttcttttcagattctttgattcgacttcaggatctgtaagaatatagaaatacgaattgacgggcaagatatccgaggagtgacactggggagccttcgaaaatgtctaggtgtggtacctcaggacacagtactttttaatgacacgattaagcataatatacagtatgggcggttatcagcaaaagatgaggaggtctttgatgctgcccgacgtgctgctattcatgatacaattatgaacttcccagacaagtatgacaccgtagtaggagaacgaggattgaagttaagcggcggggagaaacaacgagtgtcaatagcccgtgtattcttgaaggagccttccattctgttatgtgatgaagcaactagtgctcttgacagcactactgaagcatcaattttgaattctctgaaatccttatcttccgatcgaacatcaatctttattgctcatcgactcacaactgcaatgcagtgtgatcagataattgttttggaggatgggaaggtagtagaacaaggaccacatgattttcttctgtcacagggtgggcgatacgcagaattgtggtatcagcagaacagcactgacgccatggattctgctgcagctagcgtagaggtttgattgaccatgtttaccttttccttctgcaaggggaaaagaagggaaaacacaatcataaccgtgagagagagggatggagccaacttgtctgccttgtaattagaggtaggttttttggttcgggggggaggggggggggggggggggcataaacgtacagttccattttcaagatagccgggaggattttccccccttttgagattgtatagacgatccctgcatgttatgataaccgtaacgtttctgtagcataagggataaagcccagtaagggcctgtttgtttcgcatggaataaagggtagaataaatctggcttggattcctttaataattactataatttttggagatttagaattaattctggtctgttccagtagaaacgaacgggccctaaatattcagttgcctcaggcgtactaccgtttcaatataaatgctcccatgattgct

SEQ ID NO: 1589 - DNA, 3109 bp, Zea Mays
gcaaaaaaaagatttccttgcagcatatgtcagcgcaaccacagcatttcgtcgagcggctggcgtacctgcgcgaacacggagctgtagaacacgggcggccgacggggaggtggctccgcttccgccggagcatcctgccgagtatccgcgcatgcctcctcgcccgcccgccgcggggagcgccatgctgtttgttggcctcggatccccttaatcgcggagcatcgacgtcgatgagagatccgcgagcggtcgcggaggatgaaggtgcgcgccgcgggatggaaggaaaccaaaagaaaagaggaggaaaactggaaaagacccaattctccacggccagagggagtccaactccgcctccagcactcacgcttcgtctgctgaccctacccatcgcggccgccgccggctcgccgctgctgccaggcgctatgcggccttgctcccgcatactcgcggcgcgtcacttcgtccgcagcttccggttcgatccctcccaaactacctcccccgctgccggatttcgtcggctgaccggagccaacaggccgttcgtgccgaaacctctctttggcattctcctcggaggcttcagatcgaactgtggcgtactgcctgggaaaggggtccccttgggcagcctcggcagcttcctgccggactctgcctaccagctgcacggcgcgcggcttcaacgagatacgagaggtaatgcattctccacatccgccaatgctgtgacagttaagaagccagttggtgacaaggtccagaaagatgcatcaaaaaaggatattgatgaggagattgctgattctcagatattgaaaaaccttgggaagtacttattgttgaatgacagccctgacttccgctttagggttgccttgtcgttggtcctgttagttggtgcaaaggttataaatgttcaagtgcctttcttgtttaagctagctatcgactggcttgcagcccttggtggtgctgaagcttccctggcatcattcactgaaactaatgccaccctattggctctatttgcaagcccagcagctgttctgataggatatggaatcgcacgatcaggagtatcagcctgtacagaactgcgaaacgctgtattttctaaagtgactttgagagcaatccgttcagtatccagaaaggtattttctcacttgcatgagcttgatcttcgatatcatctaagccggcaaactggtgctataaatcgcgtaattgatcgaggaagccgtgcaataaattacatcctcacagtcatggtgtttaatgtcgtgcccacgatactagagattggtatggtgtcaagcatacttgcctacaaatttggttcaacttttgcttggatcacttcagtttcagttgctacttatattgctttcactttggctgtcacacagtggcggactaagttcaggatggccatgaataaagctgataatgcttctagtacggtggcagttgactctcttctcaattatgagactgtgaaatacttcaacaatgaacaatttgaagttgagaagtacgacaaatatttaaggaattatgaggatgctgcattgaagacccaaagtagtcttgcctacctgaactttggccaaaatgttatctttagctcagctttatctacagcaatggttttgagctcatatggaataatgagtggtgctctgactgtgggtgatttggtcatggttaatgggcttttattccagctttcattacctctgaacttccttgggagtgtgtatcgagaatctagacaaagcctcattgacatgaagtcaatgtttcagttgcttgaggaaaaacctgcaataaaggatgagcctcatgcacaacctttgcagttcaagggagggtgcattgaattcgagaatgttcattttgggtatgtaccagaaaggaagattcttgatggtgccactttcaccgtacctgcaggaaagagtgtggccattgttggaactagcggaagcgggaaatcaactattcttagacttcttttcagattctttgattcgacttcaggatctatacgaattgacgggcaagatatccgaggagtgacactggggagccttcgaaaatgtctaggtgtggtacctcaggacacagtactttttaatgacacgattaagcataatatacagtatgggcggttatcagcaaaagatgaggaggtctttgatgctgcccgacgtgctgctattcatgatacaattatgaacttcccagacaagtatgacaccgtagtaggagaacgaggattgaagttaagcggcggggagaaacaacgagtgtcaatagcccgtgtattcttgaaggagccttccattctgttatgtgatgaagcaactagtgctcttgacagcactactgaagcatcaattttgaattctctgaaatccttatcttccgatcgaacatcaatctttattgctcatcgactcacaactgcaatgcagtgtgatcagataattgttttggaggatgggaaggtagtagaacaaggaccacatgattttcttctgtcacagggtgggcgatacgcagaattgtggtatcagcagaacagcactgacgccatggattctgctgcagctagcgtagaggtttgattgaccatgtttaccttttccttctgcaaggggaaaagaagggaaaacacaatcataaccgtgagagagagggatggagccaacttgtctgccttgtaattagaggtaggttttttggttcgggggggaggggggggggggggggggcataaacgtacagttccattttcaagatagccgggaggattttccccccttttgagattgtatagacgatccctgcatgttatgataaccgtaacgtttctgtagcataagggataaagcccagtaagggcctgtttgtttcgcatggaataaagggtagaataaatctggcttggattcctttaataattactataatttttggagatttagaattaattctggtctgttccagtagaaacgaacgggccctaaatattcagttgcctcaggcgtactaccgtttcaatataaatgctcccatgattgct

SEQ ID NO: 1590 - DNA, 3088 bp, Zea Mays
gcaaaaaaaagatttccttgcagcatatgtcagcgcaaccacagcatttcgtcgagcggctggcgtacctgcgcgaacacggagctgtagaacacgggcggccgacggggaggtggctccgcttccgccggagcatcctgccgagtatccgcgcatgcctcctcgcccgcccgccgcggggagcgccatgctgtttgttggcctcggatccccttaatcgcggagcatcgacgtcgatgagagatccgcgagcggtcgcggaggatgaaggaaaccaaaagaaaagaggaggaaaactggaaaagacccaattctccacggccagagggagtccaactccgcctccagcactcacgcttcgtctgctgaccctacccatcgcggccgccgccggctcgccgctgctgccaggcgctatgcggccttgctcccgcatactcgcggcgcgtcacttcgtccgcagcttccggttcgatccctcccaaactacctcccccgctgccggatttcgtcggctgaccggagccaacaggccgttcgtgccgaaacctctctttggcattctcctcggaggcttcagatcgaactgtggcgtactgcctgggaaaggggtccccttgggcagcctcggcagcttcctgccggactctgcctaccagctgcacggcgcgcggcttcaacgagatacgagaggtaatgcattctccacatccgccaatgctgtgacagttaagaagccagttggtgacaaggtccagaaagatgcatcaaaaaaggatattgatgaggagattgctgattctcagatattgaaaaaccttgggaagtacttattgttgaatgacagccctgacttccgctttagggttgccttgtcgttggtcctgttagttggtgcaaaggttataaatgttcaagtgcctttcttgtttaagctagctatcgactggcttgcagcccttggtggtgctgaagcttccctggcatcattcactgaaactaatgccaccctattggctctatttgcaagcccagcagctgttctgataggatatggaatcgcacgatcaggagtatcagcctgtacagaactgcgaaacgctgtattttctaaagtgactttgagagcaatccgttcagtatccagaaaggtattttctcacttgcatgagcttgatcttcgatatcatctaagccggcaaactggtgctataaatcgcgtaattgatcgaggaagccgtgcaataaattacatcctcacagtcatggtgtttaatgtcgtgcccacgatactagagattggtatggtgtcaagcatacttgcctacaaatttggttcaacttttgcttggatcacttcagtttcagttgctacttatattgctttcactttggctgtcacacagtggcggactaagttcaggatggccatgaataaagctgataatgcttctagtacggtggcagttgactctcttctcaattatgagactgtgaaatacttcaacaatgaacaatttgaagttgagaagtacgacaaatatttaaggaattatgaggatgctgcattgaagacccaaagtagtcttgcctacctgaactttggccaaaatgttatctttagctcagctttatctacagcaatggttttgagctcatatggaataatgagtggtgctctgactgtgggtgatttggtcatggttaatgggcttttattccagctttcattacctctgaacttccttgggagtgtgtatcgagaatctagacaaagcctcattgacatgaagtcaatgtttcagttgcttgaggaaaaacctgcaataaaggatgagcctcatgcacaacctttgcagttcaagggagggtgcattgaattcgagaatgttcattttgggtatgtaccagaaaggaagattcttgatggtgccactttcaccgtacctgcaggaaagagtgtggccattgttggaactagcggaagcgggaaatcaactattcttagacttcttttcagattctttgattcgacttcaggatctatacgaattgacgggcaagatatccgaggagtgacactggggagccttcgaaaatgtctaggtgtggtacctcaggacacagtactttttaatgacacgattaagcataatatacagtatgggcggttatcagcaaaagatgaggaggtctttgatgctgcccgacgtgctgctattcatgatacaattatgaacttcccagacaagtatgacaccgtagtaggagaacgaggattgaagttaagcggcggggagaaacaacgagtgtcaatagcccgtgtattcttgaaggagccttccattctgttatgtgatgaagcaactagtgctcttgacagcactactgaagcatcaattttgaattctctgaaatccttatcttccgatcgaacatcaatctttattgctcatcgactcacaactgcaatgcagtgtgatcagataattgttttggaggatgggaaggtagtagaacaaggaccacatgattttcttctgtcacagggtgggcgatacgcagaattgtggtatcagcagaacagcactgacgccatggattctgctgcagctagcgtagaggtttgattgaccatgtttaccttttccttctgcaaggggaaaagaagggaaaacacaatcataaccgtgagagagagggatggagccaacttgtctgccttgtaattagaggtaggttttttggttcgggggggaggggggggggggggggggcataaacgtacagttccattttcaagatagccgggaggattttccccccttttgagattgtatagacgatccctgcatgttatgataaccgtaacgtttctgtagcataagggataaagcccagtaagggcctgtttgtttcgcatggaataaagggtagaataaatctggcttggattcctttaataattactataatttttggagatttagaattaattctggtctgttccagtagaaacgaacgggccctaaatattcagttgcctcaggcgtactaccgtttcaatataaatgctcccatgattgct

SEQ ID NO: 1591 - DNA, 3198 bp, Zea Mays
gcaaaaaaaagatttccttgcagcatatgtcagcgcaaccacagcatttcgtcgagcggctggcgtacctgcgcgaacacggagctgtagaacacgggcggccgacggggaggtggctccgcttccgccggagcatcctgccgagtatccgcgcatgcctcctcgcccgcccgccgcggggagcgccatgctgtttgttggcctcggatccccttaatcgcggagcatcgacgtcgatgagagatccgcgagcggtcgcggaggatgaaggtgcgcgccgcgggatggaaggtgagcgccgcggggatcgcggctgcgggatgagtggctgtgcggaggatggaaggcggaggatgaaggtgcgcgctgcgggatggaaggaaaccaaaagaaaagaggaggaaaactggaaaagacccaattctccacggccagagggagtccaactccgcctccagcactcacgcttcgtctgctgaccctacccatcgcggccgccgccggctcgccgctgctgccaggcgctatgcggccttgctcccgcatactcgcggcgcgtcacttcgtccgcagcttccggttcgatccctcccaaactacctcccccgctgccggatttcgtcggctgaccggagccaacaggccgttcgtgccgaaacctctctttggcattctcctcggaggcttcagatcgaactgtggcgtactgcctgggaaaggggtccccttgggcagcctcggcagcttcctgccggactctgcctaccagctgcacggcgcgcggcttcaacgagatacgagaggtaatgcattctccacatccgccaatgctgtgacagttaagaagccagttggtgacaaggtccagaaagatgcatcaaaaaaggatattgatgaggagattgctgattctcagatattgaaaaaccttgggaagtacttattgttgaatgacagccctgacttccgctttagggttgccttgtcgttggtcctgttagttggtgcaaaggttataaatgttcaagtgcctttcttgtttaagctagctatcgactggcttgcagcccttggtggtgctgaagcttccctggcatcattcactgaaactaatgccaccctattggctctatttgcaagcccagcagctgttctgataggatatggaatcgcacgatcaggagtatcagcctgtacagaactgcgaaacgctgtattttctaaagtgactttgagagcaatccgttcagtatccagaaaggtattttctcacttgcatgagcttgatcttcgatatcatctaagccggcaaactggtgctataaatcgcgtaattgatcgaggaagccgtgcaataaattacatcctcacagtcatggtgtttaatgtcgtgcccacgatactagagattggtatggtgtcaagcatacttgcctacaaatttggttcaacttttgcttggatcacttcagtttcagttgctacttatattgctttcactttggctgtcacacagtggcggactaagttcaggatggccatgaataaagctgataatgcttctagtacggtggcagttgactctcttctcaattatgagactgtgaaatacttcaacaatgaacaatttgaagttgagaagtacgacaaatatttaaggaattatgaggatgctgcattgaagacccaaagtagtcttgcctacctgaactttggccaaaatgttatctttagctcagctttatctacagcaatggttttgagctcatatggaataatgagtggtgctctgactgtgggtgatttggtcatggttaatgggcttttattccagctttcattacctctgaacttccttgggagtgtgtatcgagaatctagacaaagcctcattgacatgaagtcaatgtttcagttgcttgaggaaaaacctgcaataaaggatgagcctcatgcacaacctttgcagttcaagggagggtgcattgaattcgagaatgttcattttgggtatgtaccagaaaggaagattcttgatggtgccactttcaccgtacctgcaggaaagagtgtggccattgttggaactagcggaagcgggaaatcaactattcttagacttcttttcagattctttgattcgacttcaggatctatacgaattgacgggcaagatatccgaggagtgacactggggagccttcgaaaatgtctaggtgtggtacctcaggacacagtactttttaatgacacgattaagcataatatacagtatgggcggttatcagcaaaagatgaggaggtctttgatgctgcccgacgtgctgctattcatgatacaattatgaacttcccagacaagtatgacaccgtagtaggagaacgaggattgaagttaagcggcggggagaaacaacgagtgtcaatagcccgtgtattcttgaaggagccttccattctgttatgtgatgaagcaactagtgctcttgacagcactactgaagcatcaattttgaattctctgaaatccttatcttccgatcgaacatcaatctttattgctcatcgactcacaactgcaatgcagtgtgatcagataattgttttggaggatgggaaggtagtagaacaaggaccacatgattttcttctgtcacagggtgggcgatacgcagaattgtggtatcagcagaacagcactgacgccatggattctgctgcagctagcgtagaggtttgattgaccatgtttaccttttccttctgcaaggggaaaagaagggaaaacacaatcataaccgtgagagagagggatggagccaacttgtctgccttgtaattagaggtaggttttttggttcgggggggaggggggggggggggggggcataaacgtacagttccattttcaagatagccgggaggattttccccccttttgagattgtatagacgatccctgcatgttatgataaccgtaacgtttctgtagcataagggataaagcccagtaagggcctgtttgtttcgcatggaataaagggtagaataaatctggcttggattcctttaataattactataatttttggagatttagaattaattctggtctgttccagtagaaacgaacgggccctaaatattcagttgcctcaggcgtactaccgtttcaatataaatgctcccatgattgct

SEQ ID NO: 1592 - DNA, 854 bp, Zea Mays
aattctccacggccagagggagtccaactccgcctccagcactcacgcttcgtctgctgaccctacccatcgcggccgccgccggctcgccgctgctgccaggcgctatgcggccttgctcccgcatactcgcggcgcgtcacttcgtccgcagcttccggttcgatccctcccaaactacctcccccgctgccggatttcgtcggctgaccggagccaacaggccgttcgtgccgaaacctctctttggcattctcctcggaggcttcagatcgaactgtggcgtactgcctgggaaaggggtccccttgggcagcctcggcagcttcctgccggactctgcctaccagctgcacggcgcgcggcttcaacgagatacgagaggtaatgcattctccacatccgccaatgctgtgacagttaagaagccagttggtgacaaggtccagaaagatgcatcaaaaaaggatattgatgaggagattgctgattctcagatattgaaaaaccttgggaagtacttattgttgaatgacagccctgacttccgctttagggttgccttgtcgttggtcctgttagttggtgcaaaggttataaatgttcaagtgcctttcttgtttaagctagctatcgactggcttgcagcccttggtggtgctgaagcttccctggcatcattcactgaaactaatgccaccctattggctctatttgcaagcccagcagctgttctgataggatatggaatcgcacgatcaggagtatcagcctgtacagaactgcgaaacgctgtattttctaaagtgactttgagagcaatccgttcagtatccagaaagctgtccagataa

SEQ ID NO: 1593 - DNA, 2269 bp, Zea Mays
atgcagagaggtaatgcattctccacatccgccaatgctgtgacagttaagaagccagttggtgacaaggtccagaaagatgcatcaaaaaaggatattgatgaggagattgctgattctcagatattgaaaaaccttgggaagtacttattgttgaatgacagccctgacttccgctttagggttgccttgtcgttggtcctgttagttggtgcaaagctgttctgataggatatggaatcgcacgatcaggagtatcagcctgtacagaactgcgaaacgctgtattttctaaagtgactttgagagcaatccgttcagtatccagaaaggtattttctcacttgcatgagcttgatcttcgatatcatctaagccggcaaactggtgctataaatcgcgtaattgatcgaggaagccgtgcaataaattacatcctcacagtcatggtgtttaatgtcgtgcccacgatactagagattggtatggtgtcaagcatacttgcctacaaatttggttcaacttttgcttggatcacttcagtttcagttgctacttatattgctttcactttggctgtcacacagtggcggactaagttcaggatggccatgaataaagctgataatgcttctagtacggtggcagttgactctcttctcaattatgagactgtgaaatacttcaacaatgaacaatttgaagttgagaagtacgacaaatatttaaggaattatgaggatgctgcattgaagacccaaagtagtcttgcctacctgaactttggccaaaatgttatctttagctcagctttatctacagcaatggttttgagctcatatggaataatgagtggtgctctgactgtgggtgatttggtcatggttaatgggcttttattccagctttcattacctctgaacttccttgggagtgtgtatcgagaatctagacaaagcctcattgacatgaagtcaatgtttcagttgcttgaggaaaaacctgcaataaaggatgagcctcatgcacaacctttgcagttcaagggagggtgcattgaattcgagaatgttcattttgggtatgtaccagaaaggaagattcttgatggtgccactttcaccgtacctgcaggaaagagtgtggccattgttggaactagcggaagcgggaaatcaactattcttagacttcttttcagattctttgattcgacttcaggatctatacgaattgacgggcaagatatccgaggagtgacactggggagccttcgaaaatgtctaggtgtggtacctcaggacacagtactttttaatgacacgattaagcataatatacagtatgggcggttatcagcaaaagatgaggaggtctttgatgctgcccgacgtgctgctattcatgatacaattatgaacttcccagacaagtatgacaccgtagtaggagaacgaggattgaagttaagcggcggggagaaacaacgagtgtcaatagcccgtgtattcttgaaggagccttccattctgttatgtgatgaagcaactagtgctcttgacagcactactgaagcatcaattttgaattctctgaaatccttatcttccgatcgaacatcaatctttattgctcatcgactcacaactgcaatgcagtgtgatcagataattgttttggaggatgggaaggtagtagaacaaggaccacatgattttcttctgtcacagggtgggcgatacgcagaattgtggtatcagcagaacagcactgacgccatggattctgctgcagctagcgtagaggtttgattgaccatgtttaccttttccttctgcaaggggaaaagaagggaaaacacaatcataaccgtgagagagagggatggagccaacttgtctgccttgtaattagaggtaggttttttggttcgggggggaggggggggggggggggggcataaacgtacagttccattttcaagatagccgggaggattttccccccttttgagattgtatagacgatccctgcatgttatgataaccgtaacgtttctgtagcataagggataaagcccagtaagggcctgtttgtttcgcatggaataaagggtagaataaatctggcttggattcctttaataattactataatttttggagatttagaattaattctggtctgttccagtagaaacgaacgggccctaaatattcagttgcctcaggcgtactaccgtttcaatataaatgctcccatgattgct

SEQ ID NO: 1594 - DNA, 1750 bp, Zea Mays
agccggcaaactggtgctataaatcgcgtaattgatcgaggaagccgtgcaataaattacatcctcacagtcatggtgtttaatgtcgtgcccacgatactagagattggtatggtgtcaagcatacttgcctacaaatttggttcaacttttgcttggatcacttcagtttcagttgctacttatattgctttcactttggctgtcacacagattatgaggatgctgcattgaagacccaaagtagtcttgcctacctgaactttggccaaaatgttatctttagctcagctttatctacagcaatggttttgagctcatatggaataatgagtggtgctctgactgtgggtgatttggtcatggttaatgggcttttattccagctttcattacctctgaacttccttgggagtgtgtatcgagaatctagacaaagcctcattgacatgaagtcaatgtttcagttgcttgaggaaaaacctgcaataaaggatgagcctcatgcacaacctttgcagttcaagggagggtgcattgaattcgagaatgttcattttgggtatgtaccagaaaggaagattcttgatggtgccactttcaccgtacctgcaggaaagagtgtggccattgttggaactagcggaagcgggaaatcaactattcttagacttcttttcagattctttgattcgacttcaggatctatacgaattgacgggcaagatatccgaggagtgacactggggagccttcgaaaatgtctaggtgtggtacctcaggacacagtactttttaatgacacgattaagcataatatacagtatgggcggttatcagcaaaagatgaggaggtctttgatgctgcccgacgtgctgctattcatgatacaattatgaacttcccagacaagtatgacaccgtagtaggagaacgaggattgaagttaagcggcggggagaaacaacgagtgtcaatagcccgtgtattcttgaaggagccttccattctgttatgtgatgaagcaactagtgctcttgacagcactactgaagcatcaattttgaattctctgaaatccttatcttccgatcgaacatcaatctttattgctcatcgactcacaactgcaatgcagtgtgatcagataattgttttggaggatgggaaggtagtagaacaaggaccacatgattttcttctgtcacagggtgggcgatacgcagaattgtggtatcagcagaacagcactgacgccatggattctgctgcagctagcgtagaggtttgattgaccatgtttaccttttccttctgcaaggggaaaagaagggaaaacacaatcataaccgtgagagagagggatggagccaacttgtctgccttgtaattagaggtaggttttttggttcgggggggaggggggggggggggggggcataaacgtacagttccattttcaagatagccgggaggattttccccccttttgagattgtatagacgatccctgcatgttatgataaccgtaacgtttctgtagcataagggataaagcccagtaagggcctgtttgtttcgcatggaataaagggtagaataaatctggcttggattcctttaataattactataatttttggagatttagaattaattctggtctgttccagtagaaacgaacgggccctaaatattcagttgcctcaggcgtactaccgtttcaatataaatgctcccatgattgct

SEQ ID NO: 1595 - DNA, 1118 bp, Zea Mays
aaacccttgaatattggtgggaaatcaactattcttagacttcttttcagattctttgattcgacttcaggatctatacgaattgacgggcaagatatccgaggagtgacactggggagccttcgaaaatgtctaggtgtggtacctcaggacacagtactttttaatgacacgattaagcataatatacagtatgggcggttatcagcaaaagatgaggaggtctttgatgctgcccgacgtgctgctattcatgatacaattatgaacttcccagacaagtatgacaccgtagtaggagaacgaggattgaagttaagcggcggggagaaacaacgagtgtcaatagcccgtgtattcttgaaggagccttccattctgttatgtgatgaagcaactagtgctcttgacagcactactgaagcatcaattttgaattctctgaaatccttatcttccgatcgaacatcaatctttattgctcatcgactcacaactgcaatgcagtgtgatcagataattgttttggaggatgggaaggtagtagaacaaggaccacatgattttcttctgtcacagggtgggcgatacgcagaattgtggtatcagcagaacagcactgacgccatggattctgctgcagctagcgtagaggtttgattgaccatgtttaccttttccttctgcaaggggaaaagaagggaaaacacaatcataaccgtgagagagagggatggagccaacttgtctgccttgtaattagaggtaggttttttggttcgggggggaggggggggggggggggggcataaacgtacagttccattttcaagatagccgggaggattttccccccttttgagattgtatagacgatccctgcatgttatgataaccgtaacgtttctgtagcataagggataaagcccagtaagggcctgtttgtttcgcatggaataaagggtagaataaatctggcttggattcctttaataattactataatttttggagatttagaattaattctggtctgttccagtagaaacgaacgggccctaaatattcagttgcctcaggcgtactaccgtttcaatataaatgctcccatgattgct

SEQ ID NO: 1596 - DNA, 1947 bp, Zea Mays
ctccggtccatcactcctcacagcttgtgctgcattgctcctgtctataataatctgtcacaccaaaactgcaggctttaaaaggcccagacgcattccgggcgcctctacagcccaattaaaaacctcatttcttctctccaggaaagagggattctatttcaggacgaacggacacagatgcatggatgcacgtgatcagctaccagctgtagtagaattgaaaccctctctcctctacctcgcgacgtagtagtcagtgcacacagaaggtggatgcagatagatgcattgcattgtcaccatcgtagcacctccctctctctctccccttttcgttccgaggaaggaagcaccacagggccagcagagatgtctggaaaagggaagaggcgaagcgctagattgttgaagctggaagagcagaagaacgacggcggcgccgtctgcttccttgacccctggcagatcatccggaacagcatttccggtccgagcgcgcgagggaaaaggaaaaggaatgaaggaatccagccgcagggagaagcttcttgcagccgccaggagccactgtatgcaggaaacagcaatagcttaccaagccaaacctcggtaggacagatcatcgagtatatccttgacgagttggagatgagagacaggcatgagctgtttgcaatgccagacgacatccaggtgactgattatgcagagctggtgagcaggcccggtgacttcgcgacactgagacagaagaacagggatggcatgtacacggcactggagcaattcgagaacgatgtttacatggtgttccagaaagcgataacgatgaacagccaggacaccgtgcctttcagagagggcatggcgctgctggatcaagccaagctggtgttcatgtccctgaggagcaaccagatgttctcggagtcggagctcgcggcgtggcgccagaggcacgcggaccagatgcagcagccgatcacgccggagggaagagagggcggcggcaggggaccaccacgtcacacggctgctgcgccgctgttgcagccgtccgccgccacgccgaggaagaggagcgccgccgagacgaagaagcaggaggacgcccgcaccggcgggaacgctacggggaaccagagagggaggccgcgcggcgccagggagaccaaggccacggcgcccacgccgccgggaaagagggcgagaaaagcagcaacggcgggctttaacggcggccgcggtctggtggctcgaagaaggctcacttacaatgacgaagctgctgccgatcaaggctggcgggagatagcggcgacgccggtcttccaaggccggcacgttacactcagagaccagccgcaggagcagacgttccgaggcagcctgcagcgcttcgtgcggcacgcggggctgaaggcgcgcgtggccgccgagttcaggagcctcgagtgcgtcgcgcgggccaggcactgccccgtcccgcagtgctggaacggcttcgctcccagcgccggtttcctcccgccgtcgccccggcctccgggcgccgccgccgcggagccggggacgtcgtcagatcagcaggcggcggcgccggagtgcaagctggagacggacgaggtgctcaagctcttcgtgctcatgggcacgcccgctgcgttcttgagcagagccaagaaaatgttcggccaagatgagccagagaaaagcgcgcaaccggccaaggctgccgacgacgcccgggcgcgcgctggcgctgcaacgacggccgagactgggcacgggaagaagagcagcgcgagcgagccatcggccgccgcgtgcgggccgttcgcgccgcccaagttggtccccggccggctgggcttcggccagttcgccgcctcttcagcacgtccgttcaagctgaactccaagccttcggcgtcaaatgattcc

SEQ ID NO: 1597 - DNA, 925 bp, Zea Mays
gcaatttcataacctgggtgacgacgtttctgatggcgatctgagagatcgtgatcgtgactggaggacccgtccagccttttccttttgtcagtgaatctgaatgttcagccgtccacgtcactgagcactacatgttctaacgctcggctagtacgtactgtctgtactaaagatagaccgagtggtggaagctgaatgtatgtgtgcagtgtgcacctcatgatgagcctctcgtacccggagaagccttgcgcttccaggttggccgccgtgcacgagcccagcgtctcctcgtccctcccggagaggaggaagaccttgaagcccttgtccagcagcgtcgtgaacagcccgagcaccggatgtatccccgggcacgcctccctgctcgcccaagcccggaacgccagcgggtcgtacgcaccgaactgcttggcctcgtagtagagcaggttggagaggcaggtatcgtcgatgtcgaagacccaggcgtcgaggccgtcggcgtcggcggccaccccgtcggcgtaggcgcgcgcctgctctgccacgccggccacgtcccgctggtactggccccgggtcatgtacccgctgacgtacccgacgcactgcgggggcaccgtgcgccacccgcgggcgttgttggcctccaccatgacgcgccagctgaggcacccggcgtcgtcggacgcctggcccggccagagacactgcctcgcgacgacggcggcggcgctgaggaacaggtgcggcagcagggcgaggagcgcgagccgccgccacggggcgatgcggaccgtcagcatgtctatcgatcgatcaggttttaattcacagacgtacccgcgcccactgcaagcattgttcgtaaactggcagtgagacacaaggctagatatatattacatgcttgcttgcc

SEQ ID NO: 1598 - DNA, 2231 bp, Zea Mays
cctcgttttaaaaacgctccccatggtgagtctctctcagcagcagcactcagcacacagagtccgcctacgccgcggctccggcgcccgcatccgtctcaggagtcccttctccccgcgggtggagacatcttgatcgtttctgagattaaactgatgatgctgatgctcgtttagttatcttggtttggagatatatcagatatgggtgatcggaatcatggacgctctctccctctactgctctatctacatcttttgctgccaatacttccgtttgctatggcagatatagcctccgagaagcaagcactctttgcttttgcctctgcagtctaccatggcaacaagctgaattggagccaaaatatcccagtgtgctcatggcatggtgtgacatgctcactggatcgatcatgtatattggcccttagggtgccaggtgctggtttgattggtaccattcctgctgatactcttggcaggcttgtgtccctccaagttttaagcatgaggtctaaccgtttgagtggaagccttccgtacgatgttgtctcacttccttatttacaagccatatttgttcagcacaacgaattgtcaggagacttgcctccatttctctctccaaaccttaatacccttgatctctcttacaactcctttacaggacaaatcccatcaggtttgcagaatcttaccaaattgtctgtcttgaatttagcagaaaattccctgtccgggccgattccggatctcaaacttcctagcctaagacagctaaatctgagcaacaatgaactgaatgtgccttcaccaccaaaattaccaaatcatgagaagaaggctggcaatggcttggtaatcgtggctgttgctgggagctttgtcatatttctgctagctgctgtgatgttcactatgtgcatttcaaagaggaaggagaagaaagacgaagcgggttacaacggtaaggttactgatggtggaagggttgagaagcgcaaagaggatctcagcagcggcgtccaaatggcgcataagaacaagttagttttcttggagggatgcagttacaactttgacttggaggacttgctgagagcttctgctgaagttctcgggaaagggagctatggaactgcctacaaggctatactcgaggatggctctactgtggtagtcaagaggctaaaggatgtcgtggcagggaagaaagaatttgagcagcagatggagctcatagggagggtaggtaaacatgcaaacatcgcgcctattcgtgcttactactactcgaaggatgagaagcttgttgtttatgagtatattggtagaggcagcttctcagctctgttgcatggtatcaagggcgtgtgtgagaagaccccattagattggaacacaaggatgaagattatactcggaacagcacgcggcctcgagcacatccattcagaaggcggctccaggctcgcacacggcaacatcaagtcaaccaacgttctgctcgacggagaccacaacccttacgtctcagactacgggctgagctcgttgacgagccttccgatcaccacttcccgagctgtcgctggctaccgagctcaggagaccttcgaatcgaggaagttcacccacaagtccgacgtgtacggtttcggcgtcctcctcatggagacgctgacgggcaaggccccgcttcagtcacagggtcaggacgacgccgtcgacctaccgaggtgggtgcattcggtggtccgcgaggagtggaccgctgaggtgtttgacgtccagctgatgaagtatcccaacatagaagacgagctggtccagatgctccgtatcgccatggcgtgcacggcgtggtctcccgaccggcgtccgacgatggcgcaggtggttaggatggtggaggagctccggcactctgcttccgggagtcgcgctctctccgttggcagtcccaaggaatccagtcctctgtcagcctgaattgtggttctgattcagaattcgtgtatccatgacatcgatgatcgatggtatcctgcatgtggttcacggtgcacacgttgtctgcctcgtcagatacttcgtactgctgtaactttggttcaatggaatgcttaagaaacaaggtcggaataggcgaatagctattttcgtctttcacctattgattttgtccttgcatacaaaaaaaagaatagacagaaaacagaaaagaa

SEQ ID NO: 1599 - DNA, 2146 bp, Zea Mays
actgaactcggccctgaacgcatttatgtccggttagacatcttgatcgtttctgagattaaactgatgatgctgatgctcgtttagttatcttggtttggagatatatcagatatgggtgatcggaatcatggacgctctctccctctactgctctatctacatcttttgctgccaatacttccgtttgctatggcagatatagcctccgagaagcaagcactctttgcttttgcctctgcagtctaccatggcaacaagctgaattggagccaaaatatcccagtgtgctcatggcatggtgtgacatgctcactggatcgatcatgtatattggcccttagggtgccaggtgctggtttgattggtaccattcctgctgatactcttggcaggcttgtgtccctccaagttttaagcatgaggtctaaccgtttgagtggaagccttccgtacgatgttgtctcacttccttatttacaagccatatttgttcagcacaacgaattgtcaggagacttgcctccatttctctctccaaaccttaatacccttgatctctcttacaactcctttacaggacaaatcccatcaggtttgcagaatcttaccaaattgtctgtcttgaatttagcagaaaattccctgtccgggccgattccggatctcaaacttcctagcctaagacagctaaatctgagcaacaatgaactgaatggttcgattcctccctttttccaaatcttctcaaatagttccttcctagggaactctggattgtgtggaccgccgctaactgaatgttcttttctatcttcaccaacaccgtcgcaagtgccttcaccaccaaaattaccaaatcatgagaagaaggctggcaatggcttggtaatcgtggctgttgctgggagctttgtcatatttctgctagctgctgtgatgttcactatgtgcatttcaaagaggaaggagaagaaagacgaagcgggttacaacggtaaggttactgatggtggaagggttgagaagcgcaaagaggatctcagcagcggcgtccaaatggcgcataagaacaagttagttttcttggagggatgcagttacaactttgacttggaggacttgctgagagcttctgctgaagttctcgggaaagggagctatggaactgcctacaaggctatactcgaggatggctctactgtggtagtcaagaggctaaaggatgtcgtggcagggaagaaagaatttgagcagcagatggagctcatagggagggtatcaagggcgtgtgtgagaagaccccattagattggaacacaaggatgaagattatactcggaacagcacgcggcctcgagcacatccattcagaaggcggctccaggctcgcacacggcaacatcaagtcaaccaacgttctgctcgacggagaccacaacccttacgtctcagactacgggctgagctcgttgacgagccttccgatcaccacttcccgagctgtcgctggctaccgagctcaggagaccttcgaatcgaggaagttcacccacaagtccgacgtgtacggtttcggcgtcctcctcatggagacgctgacgggcaaggccccgcttcagtcacagggtcaggacgacgccgtcgacctaccgaggtgggtgcattcggtggtccgcgaggagtggaccgctgaggtgtttgacgtccagctgatgaagtatcccaacatagaagacgagctggtccagatgctccgtatcgccatggcgtgcacggcgtggtctcccgaccggcgtccgacgatggcgcaggtggttaggatggtggaggagctccggcactctgcttccgggagtcgcgctctctccgttggcagtcccaaggaatccagtcctctgtcagcctgaattgtggttctgattcagaattcgtgtatccatgacatcgatgatcgatggtatcctgcatgtggttcacggtgcacacgttgtctgcctcgtcagatacttcgtactgctgtaactttggttcaatggaatgcttaagaaacaaggtcggaataggcgaatagctattttcgtctttcacctattgattttgtccttgcatacaaaaaaaagaatagacagaaaacagaaaagaa

SEQ ID NO: 1600 - DNA, 2245 bp, Zea Mays
atggagttgattattacttggccgacatcttgatcgtttctgagattaaactgatgatgctgatgctcgtttagttatcttggtttggagatatatcagatatgggtgatcggaatcatggacgctctctccctctactgctctatctacatcttttgctgccaatacttccgtttgctatggcagatatagcctccgagaagcaagcactctttgcttttgcctctgcagtctaccatggcaacaagctgaattggagccaaaatatcccagtgtgctcatggcatggtgtgacatgctcactggatcgatcatgtatattggcccttagggtgccaggtgctggtttgattggtaccattcctgctgatactcttggcaggcttgtgtccctccaagttttaagcatgaggtctaaccgtttgagtggaagccttccgtacgatgttgtctcacttccttatttacaagccatatttgttcagcacaacgaattgtcaggagacttgcctccatttctctctccaaaccttaatacccttgatctctcttacaactcctttacaggacaaatcccatcaggtttgcagaatcttaccaaattgtctgtcttgaatttagcagaaaattccctgtccgggccgattccggatctcaaacttcctagcctaagacagctaaatctgagcaacaatgaactgaatggttcgattcctccctttttccaaatcttctcaaatagttccttcctagggaactctggattgtgtggaccgccgctaactgaatgttcttttctatcttcaccaacaccgtcgcaagtgccttcaccaccaaaattaccaaatcatgagaagaaggctggcaatggcttggtaatcgtggctgttgctgggagctttgtcatatttctgctagctgctgtgatgttcactatgtgcatttcaaagaggaaggagaagaaagacgaagcgggttacaacggtaaggttactgatggtggaagggttgagaagcgcaaagaggatctcagcagcggcgtccaaatggcgcataagaacaagttagttttcttggagggatgcagttacaactttgacttggaggacttgctgagagcttctgctgaagttctcgggaaagggagctatggaactgcctacaaggctatactcgaggatggctctactgtggtagtcaagaggctaaaggatgtcgtggcagggaagaaagaatttgagcagcagatggagctcatagggagggtaggtaaacatgcaaacatcgcgcctattcgtgcttactactactcgaaggatgagaagcttgttgtttatgagtatattggtagaggcagcttctcagctctgttgcatggtatcaagggcgtgtgtgagaagaccccattagattggaacacaaggatgaagattatactcggaacagcacgcggcctcgagcacatccattcagaaggcggctccaggctcgcacacggcaacatcaagtcaaccaacgttctgctcgacggagaccacaacccttacgtctcagactacgggctgagctcgttgacgagccttccgatcaccacttcccgagctgtcgctggctaccgagctcaggagaccttcgaatcgaggaagttcacccacaagtccgacgtgtacggtttcggcgtcctcctcatggagacgctgacgggcaaggccccgcttcagtcacagggtcaggacgacgccgtcgacctaccgaggtgggtgcattcggtggtccgcgaggagtggaccgctgaggtgtttgacgtccagctgatgaagtatcccaacatagaagacgagctggtccagatgctccgtatcgccatggcgtgcacggcgtggtctcccgaccggcgtccgacgatggcgcaggtggttaggatggtggaggagctccggcactctgcttccgggagtcgcgctctctccgttggcagtcccaaggaatccagtcctctgtcagcctgaattgtggttctgattcagaattcgtgtatccatgacatcgatgatcgatggtatcctgcatgtggttcacggtgcacacgttgtctgcctcgtcagatacttcgtactgctgtaactttggttcaatggaatgcttaagaaacaaggtcggaataggcgaatagctattttcgtctttcacctattgattttgtccttgcatacaaaaaaaagaatagacagaaaacagaaaagaa

SEQ ID NO: 1601 - DNA, 2295 bp, Zea Mays
aagaacattgctattttttatggcatgaattagttcaaataagattttggtggcctgaggcctcttgtggtgggacatcttgatcgtttctgagattaaactgatgatgctgatgctcgtttagttatcttggtttggagatatatcagatatgggtgatcggaatcatggacgctctctccctctactgctctatctacatcttttgctgccaatacttccgtttgctatggcagatatagcctccgagaagcaagcactctttgcttttgcctctgcagtctaccatggcaacaagctgaattggagccaaaatatcccagtgtgctcatggcatggtgtgacatgctcactggatcgatcatgtatattggcccttagggtgccaggtgctggtttgattggtaccattcctgctgatactcttggcaggcttgtgtccctccaagttttaagcatgaggtctaaccgtttgagtggaagccttccgtacgatgttgtctcacttccttatttacaagccatatttgttcagcacaacgaattgtcaggagacttgcctccatttctctctccaaaccttaatacccttgatctctcttacaactcctttacaggacaaatcccatcaggtttgcagaatcttaccaaattgtctgtcttgaatttagcagaaaattccctgtccgggccgattccggatctcaaacttcctagcctaagacagctaaatctgagcaacaatgaactgaatggttcgattcctccctttttccaaatcttctcaaatagttccttcctagggaactctggattgtgtggaccgccgctaactgaatgttcttttctatcttcaccaacaccgtcgcaagtgccttcaccaccaaaattaccaaatcatgagaagaaggctggcaatggcttggtaatcgtggctgttgctgggagctttgtcatatttctgctagctgctgtgatgttcactatgtgcatttcaaagaggaaggagaagaaagacgaagcgggttacaacggtaaggttactgatggtggaagggttgagaagcgcaaagaggatctcagcagcggcgtccaaatggcgcataagaacaagttagttttcttggagggatgcagttacaactttgacttggaggacttgctgagagcttctgctgaagttctcgggaaagggagctatggaactgcctacaaggctatactcgaggatggctctactgtggtagtcaagaggctaaaggatgtcgtggcagggaagaaagaatttgagcagcagatggagctcatagggagggtaggtaaacatgcaaacatcgcgcctattcgtgcttactactactcgaaggatgagaagcttgttgtttatgagtatattggtagaggcagcttctcagctctgttgcatggtatcaagggcgtgtgtgagaagaccccattagattggaacacaaggatgaagattatactcggaacagcacgcggcctcgagcacatccattcagaaggcggctccaggctcgcacacggcaacatcaagtcaaccaacgttctgctcgacggagaccacaacccttacgtctcagactacgggctgagctcgttgacgagccttccgatcaccacttcccgagctgtcgctggctaccgagctcaggagaccttcgaatcgaggaagttcacccacaagtccgacgtgtacggtttcggcgtcctcctcatggagacgctgacgggcaaggccccgcttcagtcacagggtcaggacgacgccgtcgacctaccgaggtgggtgcattcggtggtccgcgaggagtggaccgctgaggtgtttgacgtccagctgatgaagtatcccaacatagaagacgagctggtccagatgctccgtatcgccatggcgtgcacggcgtggtctcccgaccggcgtccgacgatggcgcaggtggttaggatggtggaggagctccggcactctgcttccgggagtcgcgctctctccgttggcagtcccaaggaatccagtcctctgtcagcctgaattgtggttctgattcagaattcgtgtatccatgacatcgatgatcgatggtatcctgcatgtggttcacggtgcacacgttgtctgcctcgtcagatacttcgtactgctgtaactttggttcaatggaatgcttaagaaacaaggtcggaataggcgaatagctattttcgtctttcacctattgattttgtccttgcatacaaaaaaaagaatagacagaaaacagaaaagaa

SEQ ID NO: 1602 - DNA, 132 bp, Zea Mays
taaatgcaggtccaatgtttcgagtgcacatgatgattggaaaaaaaaacagctagcttatgcacacagcttcaaacttcatgagatcataaatcacacaaatctcccacttgcagcaaactacaacacctc

SEQ ID NO: 1603 - DNA, 2581 bp, Zea Mays
attttgtgtaggtcagctttctttgcttaatgagtggccgaaccttttccttatatatcaaatatatgtgcttggacatggtagatgttcaaacttttgcgtcctccactacagaaattatacatagtagtacaacttgtaaggtttgtagttacaagttctcactgctaggagctacacttctgatgactttttaggtttcgtttttttggtcgaacacacaggagagttgtatatcattgcattaaggagaagaaagcataagaatacaacccacacacatactgtgtaactacaaaagaatttatttggaactgttaagttttctcaatgggtaagaaaattgtttgttcccactaaaaaaatacatgatccttttttttgtttattttgtaccatataattgaaggcatcgtataccatcactctttgaccaatttttattagttttgctcgcgtcaattcattatgttaccttagctttgtttgtagtttcgtaaatatccaattttcttcgattcgttgaatgattttatgccaatgtttcccatgttcttgttttagtttctaatatcaaaaacttagttcatttacaaatggatgcaaaggattcatatgatggaggaaaggagcaactcatattcctgttggcagcctcgactgctttttccactgtactttttcacccgtttggtcattggtacttaaattattccactccctgcttcttgccttgttggttaaatgggataacacatggtttctagcattacatttctgttatttactcagtaatccacactaagttaacaccttttgaactttcctaattatgtctattggcacacaaaatgattgcaaggataatttaagtaagtcataattatcttacattaacaatttgtaaaccttattatgattaaaacatagtacaaacagtggatgttaacttagtaaataaggtaaattgagggctatcattgcttgctgaaccttataaaatgaggtgtagttttattttatcctattcttggtgcaggcatcacaaggtcatatgctagcaactttgatatagatttatttactctcctagaagaaagaggccaagatgtttgagatttcagtgcttcatttaacttccaacttgtgttgtcttagcttactatggcattaacccactactctcctgaattgtctaactaaaatatttttacgagtccaccatatatttttgttaaatattacaatattcaccgtgggttatgtgatgtgtcacttcttccacctcattcactgtgattgtcatgtgatatgtatcatgtattcatggtaaatgcattttatgctacaagcacttgtgattttgctaactatatccaattatgcaatccatagtcctttgtaacagtataggtttatgccaaacaagacattagttgaatgatatgttcaaactatggaaatgcttttctctttttgctctaacaatttacatttacaaaaaatatccttctgttagtgccttgatgtgtgggatggattcctttgtcttgactcctgagtatagtgtgtttctgactctcatttgtcagttttgttgaattttatgctcataacttgagaaacttttattttaagtgtacactgttttattttttaatgttgttcgactgattactgcaaggaaccttgtggagttattgaatatgcttgcttgatggattgaagatccaaactcgaatgccttctaacttcatatcccacgagtctatgattacttgtggcttgttgaagatggcatgaagatattgtttatggcaaaggcatctcagttgataccttgatttggtcttctaggttgataagcatgcacttggtggggtacaaatatctggttaattcattcagttgccactgtttataactgtagaaggatataagtttttttatatgaattcacaactcatgtttgaatcgtggcactcagttcattttgacaaaggttgaagtccactacaaacaaaaaatgtgaattcagcagttgaaaaatgtctgttgtgtaagcacatggtgaagtaattccttcaaagaaaatattttttgtgacttattcttttctgagttcacttccagtcatcaccatttgtgccatatatgttctaaaacaaggctcttataggtaaccaatattgtccacttgatacaagcagcagaaaattattgaggtgatgtgcatgtttcgtataaatgaggttcagaagccaaatacatcagtatgccttgatttctaagccacaactgaaactgagggcgggcttatctcaataaattctaagctacagttataaacaaggcttatatagggcgtgttatgcaattagttttcttcgcttcattctatacttcacactgaacatagagagaggcttgttctgtaaacctactaatccaggactcgtgagagcgagaaagcaaggatgccatgaatacagtatttgtgtggcaacaatattagacattgtactctttcttttcaaataataactcattctcttctttttaaattataagtcattccaat

SEQ ID NO: 1604 - DNA, 1874 bp, Zea Mays
taagaaaattgtttgttcccactaaaaaaatacatgatccttttttttgtttattttgtaccatataattgaaggcatcgtataccatcactctttgaccaatttttattagttttgctcgcgtcaattcattatgttaccttagctttgtttgtagtttcgtaaatatccaattttcttcgattcgttgaatgattttatgccaatgtttcccatgttcttgttttagtttctaatatcaaaaacttagttcatttacaaatggatgcaaaggattcatatgatggaggaaaggagcaactcatattcctgttggcagcctcgactgctttttccactgtactttttcacccgtttggtcattggtacttaaattattccactccctgcttcttgccttgttggttaaatgggataacacatggtttctagcattacatttctgttatttactcagtaatccacactaagttaacaccttttgaactttcctaattatgtctattggcacacaaaatgattgcaaggataatttaagtaagtcataattatcttacattaacaatttgtaaaccttattatgattaaaacatagtacaaacagtggatgttaacttagtaaataaggtaaattgagggctatcattgcttgctgaaccttataaaatgaggtgtagttttattttatcctattcttggtgcaggcatcacaaggtcatatgctagcaactttgatatagatttatttactctcctagaagaaagaggccaagatgtttgagatttcagtgcttcatttaacttccaacttgtgttgtcttagcttactatggcattaacccactactctcctgaattgtctaactaaaatatttttacgagtccaccatatatttttgttaaatattacaatattcaccgtgggttatgtgatgtgtcacttcttccacctcattcactgtgattgtcatgtgatatgtatcatgtattcatggtaaatgcattttatgctacaagcacttgtgattttgctaactatatccaattatgcaatccatagtcctttgtaacagtataggtttatgccaaacaagacattagttgaatgatatgttcaaactatggaaatgcttttctctttttgctctaacaatttacatttacaaaaaatatccttctgttagtgccttgatgtgtgggatggattcctttgtcttgactcctgagtatagtgtgtttctgactctcatttgtcagttttgttgaattttatgctcataacttgagaaacttttattttaagtgtacactgttttattttttaatgttgttcgactgattactgcaaggaaccttgtggagttattgaatatgcttgcttgatggattgaagatccaaactcgaatgccttctaacttcatatcccacgagtctatgattacttgtggcttgttgaagatggcatgaagatgtaaccaatattgtccacttgatacaagcagcagaaaattattgaggtgatgtgcatgtttcgtataaatgaggttcagaagccaaatacatcagtatgccttgatttctaagccacaactgaaactgagggcgggcttatctcaataaattctaagctacagttataaacaaggcttatatagggcgtgttatgcaattagttttcttcgcttcattctatacttcacactgaacatagagagaggcttgttctgtaaacctactaatccaggactcgtgagagcgagaaagcaaggatgccatgaatacagtatttgtgtggcaacaatattagacattgtactctttcttttcaaataataactcattctcttctttttaaattataagtcattccaat

SEQ ID NO: 1605 - DNA, 2338 bp, Zea Mays
tggcgttttagcagtaagaaaaaaaaagttactcataagaatcagaagaaaaggacccgagcctagggttcggtctgcctcccacagccgccgctacgctttggctgcatcactcgctcctcttcggagcctccctttcgccggcggcgtaggaagagatggcagagcgtttgacccgtatcgccatcgtcagcgaggacaagtgcaagcccaagaagtgccgccaggagtgcaagaagagctgccccgtcgtcaagactgaaatgtccatttgatgccattgaaatcatcaaccttccaaaagacttggaaaaggataccactcaccgatatgggcctaataccttcaagttgcacaggttgcctgtcccaaggcctggtcaggttttgggccttgttggaacaaacgggattggaaagtcgacagctcttaaagtgttggctggcaagctgaaacctaacttggggcgcttcaaaaacccacctgattggcaggaaattcttacatactttcgtgggtctgaacttcagaactacttcacacgcatattggaagataacctgaaggcaatcatcaaacctcagtatgttgaccacattccaaaagctgttcaagggaatgtaggacaagtacttgaacagaaggacgagagggatatgaaatctgaactgtgtgttgatcttgaattaaaccaagttattgaccgaaatgtaggagatctttctggtggtgagcttcagagatttgcaatagcagttgttgctgtgcaaaatgcagaaatctatatgttcgatgagccatcaagctaccttgatgtgaagcagaggctaaaagctgcacaagtcgttaggtccttgcttaggcctaacagctatgtcatcgttgtggaacatgatttgagtgtcttggattacttgtccgacttcatttgctgtttatatggcaagccaggtgcttatggtgtggttaccttgccattctctgtccgagagggtatcaatattttcttggctggatttgttccaacagaaaatcttcggttccgagatgaatctcttacatttaagattgcagagactcaagaaaatgctgaggagattgagacgtatcagcggtataagtaccctactatgagcaaaacacagggaaatttcaagcttactgttgttgagggtgaatttactgattcccagattgttgttatgcttggtgaaaacgggacagggaaaactacattcatcagaatgctggctgggttgttgaagccagacacggtggaaggaactgatattgaaattcctgaattcaatgtgtcgtacaagccccaaaagattagcccgaaattccagaataccgtgaggcatttgctgcatcagaaaattcgggattcctatatgcatccgcagtttgtgtctgatgtgatgaaaccactgcaaattgaacaactcatggaccaagaggttgttaatttatcaggtggagagctccaaagagttgctatatgcctctgccttggaaagcctgcagatatctatctgattgatgaaccaagtgcttatcttgattcggagcagcgtattgttgcctcaaaagttatcaagagattcattcttcacgcgaagaaaactgcatttattgttgagcatgatttcatcatggcaacatacttggctgacaaggtcattgtttatgaggggcgaccttctattgactgtactgccaacgcaccacagtctttagtatctgggatgaataaattcttatcgcatctcgacatcacttttagaagagacccaaccaactataggccacgtataaacaagttggaatcgacaaaggacagggaacagaagtcagccgggtcctactactacctcgatgactaatgaggaagtgcagattcttcttggagagccatatgtcgcataatctttccagagcgtggaaaggagaagctactttgaagctaccactgcatcatggcatgtgacttgttgaataattggttgcaggagtagagtgcgccggttataacttataaagcagagcatgccgtgttgatactgagttttttgttggcttgacctatatgaagagaaggatcggtgttaaaatgagatttgcgagggggaactaatttctgtttttaagcaatactgtactgtcgttttgctatcaagtatatttgaccctcgattatatagattacattgaagtttttgggcaacaatgtgaaatcttgtgataaatctctgtgcttattggttatctgattgtaactcgtcctttgtaaactttgtttgaatgagcaagtgaactgattgtcgatagtttgtt

SEQ ID NO: 1606 - DNA, 2503 bp, Zea Mays
ataagaatcagaagaaaaggacccgagcctagggttcggtctgcctcccacagccgccgctacgctttggctgcatcactcgctcctcttcggagcctccctttcgccggcggcgtaggaagagatggcagagcgtttgacccgtatcgccatcgtcagcgaggacaagtgcaagcccaagaagtgccgccaggagtgcaagaagagctgccccgtcgtcaagactgggaagctttgcattgaagtaacttcggcatcaaaactagctttcatttctgaggagctgtgcatcggttgtggtatctgtgtaaagaaatgtccatttgatgccattgaaatcatcaaccttccaaaagacttggaaaaggataccactcaccgatatgggcctaataccttcaagttgcacagcttgcccctttcggggcattactgatctagccacctacaggttgcctgtcccaaggcctggtcaggttttgggccttgttggaacaaacgggattggaaagtcgacagctcttaaagtgttggctggcaagctgaaacctaacttggggcgcttcaaaaacccacctgattggcaggaaattcttacatactttcgtgggtctgaacttcagaactacttcacacgcatattggaagataacctgaaggcaatcatcaaacctcagtatgttgaccacattccaaaagctgttcaagggaatgtaggacaagtacttgaacagaaggacgagagggatatgaaatctgaactgtgtgttgatcttgaattaaaccaagttattgaccgaaatgtaggagatctttctggtggtgagcttcagagatttgcaatagcagttgttgctgtgcaaaatgcagaaatctatatgttcgatgagccatcaagctaccttgatgtgaagcagaggctaaaagctgcacaagtcgttaggtccttgcttaggcctaacagctatgtcatcgttgtggaacatgatttgagtgtcttggattacttgtccgacttcatttgctgtttatatggcaagccaggtgcttatggtgtggttaccttgccattctctgtccgagagggtatcaatattttcttggctggatttgttccaacagaaaatcttcggttccgagatgaatctcttacatttaagattgcagagactcaagaaaatgctgaggagattgagacgtatcagcggtataagtaccctactatgagcaaaacacagggaaatttcaagcttactgttgttgagggtgaatttactgattcccagattgttgttatgcttggtgaaaacgggacagggaaaactacattcatcagaatgctggctgggttgttgaagccagacacggtggaaggaactgatattgaaattcctgaattcaatgtgtcgtacaagccccaaaagattagcccgaaattccagaataccgtgaggcatttgctgcatcagaaaattcgggattcctatatgcatccgcagtttgtgtctgatgtgatgaaaccactgcaaattgaacaactcatggaccaagaggttgttaatttatcaggtggagagctccaaagagttgctatatgcctctgccttggaaagcctgcagatatctatctgattgatgaaccaagtgcttatcttgattcggagcagcgtattgttgcctcaaaagttatcaagagattcattcttcacgcgaagaaaactgcatttattgttgagcatgatttcatcatggcaacatacttggctgacaaggtcattgtttatgaggggcgaccttctattgactgtactgccaacgcaccacagtctttagtatctgggatgaataaattcttatcgcatctcgacatcacttttagaagagacccaaccaactataggccacgtataaacaagttggaatcgacaaaggacagggaacagaagtcagccgggtcctactactacctcgatgactaatgaggaagtgcaggttgtcatatatctgtgtatttttcgtgcaaaagaactacctatatgttttctgaccctttttccttgttcagattcttcttggagagccatatgtcgcataatctttccagagcgtggaaaggagaagctactttgaagctaccactgcatcatggcatgtgacttgttgaataattggttgcaggagtagagtgcgccggttataacttataaagcagagcatgccgtgttgatactgagttttttgttggcttgacctatatgaagagaaggatcggtgttaaaatgagatttgcgagggggaactaatttctgtttttaagcaatactgtactgtcgttttgctatcaagtatatttgaccctcgattatatagattacattgaagtttttgggcaacaatgtgaaatcttgtgataaatctctgtgcttattggttatctgattgtaactcgtcctttgtaaactttgtttgaatgagcaagtgaactgattgtcgatagtttgtt

SEQ ID NO: 1607 - DNA, 2103 bp, Zea Mays
aatgtctcctgcaactgctctatttgaaatgtccatttgatgccattgaaatcatcaaccttccaaaagacttggaaaaggataccactcaccgatatgggcctaataccttcaagttgcacaggttgcctgtcccaaggcctggtcaggttttgggccttgttggaacaaacgggattggaaagtcgacagctcttaaagtgttggctggcaagctgaaacctaacttggggcgcttcaaaaacccacctgattggcaggaaattcttacatactttcgtgggtctgaacttcagaactacttcacacgcatattggaagataacctgaaggcaatcatcaaacctcagtatgttgaccacattccaaaagctgttcaagggaatgtaggacaagtacttgaacagaaggacgagagggatatgaaatctgaactgtgtgttgatcttgaattaaaccaagttattgaccgaaatgtaggagatctttctggtggtgagcttcagagatttgcaatagcagttgttgctgtgcaaaatgcagaaatctatatgttcgatgagccatcaagctaccttgatgtgaagcagaggctaaaagctgcacaagtcgttaggtccttgcttaggcctaacagctatgtcatcgttgtggaacatgatttgagtgtcttggattacttgtccgacttcatttgctgtttatatggcaagccaggtgcttatggtgtggttaccttgccattctctgtccgagagggtatcaatattttcttggctggatttgttccaacagaaaatcttcggttccgagatgaatctcttacatttaagattgcagagactcaagaaaatgctgaggagattgagacgtatcagcggtataagtaccctactatgagcaaaacacagggaaatttcaagcttactgttgttgagggtgaatttactgattcccagattgttgttatgcttggtgaaaacgggacagggaaaactacattcatcagaatgctggctgggttgttgaagccagacacggtggaaggaactgatattgaaattcctgaattcaatgtgtcgtacaagccccaaaagattagcccgaaattccagaataccgtgaggcatttgctgcatcagaaaattcgggattcctatatgcatccgcagtttgtgtctgatgtgatgaaaccactgcaaattgaacaactcatggaccaagaggttgttaatttatcaggtggagagctccaaagagttgctatatgcctctgccttggaaagcctgcagatatctatctgattgatgaaccaagtgcttatcttgattcggagcagcgtattgttgcctcaaaagttatcaagagattcattcttcacgcgaagaaaactgcatttattgttgagcatgatttcatcatggcaacatacttggctgacaaggtcattgtttatgaggggcgaccttctattgactgtactgccaacgcaccacagtctttagtatctgggatgaataaattcttatcgcatctcgacatcacttttagaagagacccaaccaactataggccacgtataaacaagttggaatcgacaaaggacagggaacagaagtcagccgggtcctactactacctcgatgactaatgaggaagtgcagattcttcttggagagccatatgtcgcataatctttccagagcgtggaaaggagaagctactttgaagctaccactgcatcatggcatgtgacttgttgaataattggttgcaggagtagagtgcgccggttataacttataaagcagagcatgccgtgttgatactgagttttttgttggcttgacctatatgaagagaaggatcggtgttaaaatgagatttgcgagggggaactaatttctgtttttaagcaatactgtactgtcgttttgctatcaagtatatttgaccctcgattatatagattacattgaagtttttgggcaacaatgtgaaatcttgtgataaatctctgtgcttattggttatctgattgtaactcgtcctttgtaaactttgtttgaatgagcaagtgaactgattgtcgatagtttgtt

SEQ ID NO: 1608 - DNA, 4382 bp, Zea Mays
ctcacgtgggggcggcaagcgcaggtttgctctctcgggcaaaggacttgggttacgtaattcttttccagagacgccgcctccctaaacccttgccagtctccctcccggcagcggcggcaaggcctaccgccgcaaaccctcttcctcagccgctgcgtacaaaagaagttagcttctttttaagtaggaggcgggagccctaggtagccccatggctccggcggacggcggcggcgagcagccgcacaaggcgcaccgccaacacaagtccggcgccaaggcgcggaagaagaagggcaagggcaagggcgacgccggcgatgacgcaggggggcagcagaagaaccccaaggcttttgcatttcagtcagcagccaaggcgaaacgtctacaagctcgatcagctgagattgaacaacggcgtcttcatgtgccaattatggaccgttccatcggtgaacctcctccttttgttgttgtagttcaaggacctccacaggttgggaagtcactgttgataaaatgtctggtaaagcactacaccaagcaaaacttgcccgaagttcgtggccccatcactgttgtatcaggtaaaagtaggagggtacagttcgtagagtgtccaaatgatatcaatggaatgattgatgctgctaaaatagccgatctcgctttattgcttattgatggaagctatggatttgaaatggatacatttgagtttcttaatatcatgcaagtccatggattccccaaggtgatgggagtgctcacacaccttgataaatttaaagacgtgaaaaaactccggaaaactaagcagcgccttaaacatcgattctgggctgagataaaagagggagcaaaattattctacttgtctggtctgattcatggaaaatacacgaaaagagaagttcataatcttgcaagattcatctctgtaatcaaacctatccaattgagttggcgcatggctcatccttatttgttagttgatagatttgaggatgtcacccctacagaaagtgtgcggttgaacagaaagtgtgacagaacaataacattgtatggttatctccgtggctgtaatatgaaaagagggaccaaggtgcatatcacaggggctggtgatttcagcttgtcaggggtgacgggtttaggtgatccttgccctttgccatcatctgcaaagaaaagaggattgcgtgacaaggaaaaactgttctatgcaccaatgtctggtcttggggatttgctttatgacaaggatgctgtttatattaatatcaatgatcatcttgttcagttttcaaaaagtgatgaaaatgatgcacccaaaaagcaagggaaaggtaaagatgtgggtgtggccctggtaaaaacacttcaaaacccaagatactcccttgatgaaaagttggagcaaagttttataaatttctttggtgggcgtcctgctgctcaatccaaagacagtgatgctcaaggcaatgtcatctctgcaagccaggataatcagagtgacacaaacattttgcagcaagtagatgatggtaacaatagcaatgcagtcaccatggagagcaatgaacattctgaaggctctagtgatagcgaaggggataatgatgatatccagctgagggatcgtgatgttgacttgagggaagaagtagaggtttgcaatggaagattgaggcgaagagctgtatctgctaattttcgagatgactttgatgatgagggtactgatgaagatgcaaatgatgatgaggattctggtgatgaccagttatctggagattctgcatcatcagcagatgatagtggagaagctagtgatccagaggatgaacttgagaacacttcaaaatggaaagaatcccttcttgcaagaacaatgtcccgacggagtgataatttgatgcaacttgtctatggactaccttcaacaaagctaggcagtgttgcagaagaaaatgatgatagtgaagccaacagctcagatgatgaatttttcagaccaaaaggacaaaagcagcaagcaaagaatgaatcaccgagctttggtgatattgatggtgaggattgctccaagtttttcaaagcagagttaaaagattggtctaatgaagatctcatcaaaagcatccgtgatcgttttgtgactggaaattggtcaaaagctactttgagaggacaggatacagatgatcgtggtgaggatgatgaggaaatgtatggagattttgaagatcttgaaactggtgaggtacatatggcccagacagatgaaaatgtggaagcgaaagatgacccagaagttgaagaaagaagacttaagaagcttgcacaaagagcgaaatttgatgcacaatatgatggttctgagttatctgacgatgaagttgatgatgttaagaagaaatccagacgagaacagtccaatgaagggggctattttgacaagctaaaggaggaaatggaactacgcaagcaaatgaatatatctgagctcaatgaccttgatgaagagactcgagtagacattgaaggattcaggactggtacttatgtcaggttagaagtacatggtgtgccatttgagcttgttgagcattttgatccttgccaccccattcttgttggggggattggccttggtgaggagaacacaggattcatgcaggctagtttgaagcgccataggtggcacaggaaagttctgaagacaaaggatccaatcatagtttcaattggttggaggcgatttcaaacaacccctgtgtatgcaatagaggatcggaatggtcgacaccgcatgctgaagtatacacctgagcatatgcattgctttgctatgttttggggaccacttgctccaccgaagagtggtgtattagcagtccagaatctttccaacaatcaggtgccatttaggataactgcaacaggatgggttcaagaattcaacaatactgccagaattgtgaagaagataaagctcacaggcacaccatgcaagatatttaagaagactgcactaatcaagggaatgttcacatccgatttagaggttgctaggtttgaaggtgctgccattcggactgtaagtggaatccgaggacaggttaaaaaggcagcaaagattgagccaggagatatgttgaagagaaaaggggaaaatacagaaggaatcgcaagatgtacatttgaggacagaattcttatgagtgacattgttttcctgcgtgcctgggtcaacgttgaagttcctacgtactctaaccctgtgaccactgctctgcaacctagagagcagacctggcaaggcatgagaacaactgctgagttgcggaaggcacacaatatccctaccccacacaacaaggattcagtttacaagcctatcgagcggaaaccacgcaagttcaatcccgtcgagatccccgcaaagctgcaacagttacttccctttaaatctaagcctaaggacacagcgaagcagaagaaagcaccagttgaaaacagggtgcctgtaatcatgcagcctagtgagaagaagacacacgcagctatacaacagctaaggctgataaaacacgagaaggcaaagaagaagaaaattaaggaacaacagaagaaaaaagcatacgaggcagagaaagccaagaccgagctactgacgaagaagcgccagagggaagagaggcgtgtgagataccgggaagaagataagcagaagaaacgtgcacgcagatgaggcgaggaacggggtatgtgcaccaggaactcagcagcaaccgggcatgctctcttgtgcagaacatatgccaaaatcttagttcatatacggagagctataaaaggtgcagtaccacccatctgggcgaagaagcatgtcaagtcataaccagggcgcggagatgagcaagttaggttgcttgtttaagttatgtatcggttgccctaacgcggaatattgtctgagtgtttggcaaacgcatgtggactcccaagtaaatttggagtcataattttggagtgtatactacctcaggtaccgaatgttaggcaaacgcatgtggtctttagctcccaagcaagtttggtttctatggatcaatttttagtccatctattttagtttctaaattactaaacacatgagctaaaaaaatatctctattttagttcctttgtttaatttagagattaaaatggaggtactaaaaattagtctatagaaaccaaacacctcttaatatgcttttgagccctgttctgtgagcctgtttcgtttgattttaatgtctctattgcttttattgtctctatatattgtagctgtagttgttcaaacaactgattttaat

SEQ ID NO: 1609 - DNA, 4286 bp, Zea Mays
agacgccgcctccctaaacccttgccagtctccctcccggcagcggcggcaaggcctaccgccgcaaaccctcttcctcagccgctgcgtacaaaagaagttagcttctttttaagtaggaggcgggagccctaggtagccccatggctccggcggacggcggcggcgagcagccgcacaaggcgcaccgccaacacaagtccggcgccaaggcgcggaagaagaagggcaagggcaagggcgacgccggcgatgacgcaggggggcagcagaagaaccccaaggcttttgcatttcagtcagcagccaaggcgaaacgtctacaagctcgatcagctgagattgaacaacggcgtcttcatgtgccaattatggaccgttccatcggtgaacctcctccttttgttgttgtagttcaaggacctccacaggttgggaagtcactgttgataaaatgtctggtaaagcactacaccaagcaaaacttgcccgaagttcgtggccccatcactgttgtatcaggtaaaagtaggagggtacagttcgtagagtgtccaaatgatatcaatggaatgattgatgctgctaaaatagccgatctcgctttattgcttattgatggaagctatggatttgaaatggatacatttgagtttcttaatatcatgcaagtccatggattccccaaggtgatgggagtgctcacacaccttgataaatttaaagacgtgaaaaaactccggaaaactaagcagcgccttaaacatcgattctgggctgagataaaagagggagcaaaattattctacttgtctggtctgattcatggaaaatacacgaaaagagaagttcataatcttgcaagattcatctctgtaatcaaacctatccaattgagttggcgcatggctcatccttatttgttagttgatagatttgaggatgtcacccctacagaaagtgtgcggttgaacagaaagtgtgacagaacaataacattgtatggttatctccgtggctgtaatatgaaaagagggaccaaggtgcatatcacaggggctggtgatttcagcttgtcaggggtgacgggtttaggtgatccttgccctttgccatcatctgcaaagaaaagaggattgcgtgacaaggaaaaactgttctatgcaccaatgtctggtcttggggatttgctttatgacaaggatgctgtttatattaatatcaatgatcatcttgttcagttttcaaaaagtgatgaaaatgatgcacccaaaaagcaagggaaaggtaaagatgtgggtgtggccctggtaaaaacacttcaaaacccaagatactcccttgatgaaaagttggagcaaagttttataaatttctttggtgggcgtcctgctgctcaatccaaagacagtgatgctcaaggcaatgtcatctctgcaagccaggataatcagagtgacacaaacattttgcagcaagtagatgatggtaacaatagcaatgcagtcaccatggagagcaatgaacattctgaaggctctagtgatagcgaaggggataatgatgatatccagctgagggatcgtgatgttgacttgagggaagaagtagaggtttgcaatggaagattgaggcgaagagctgtatctgctaattttcgagatgactttgatgatgagggtactgatgaagatgcaaatgatgatgaggattctggtgatgaccagttatctggagattctgcatcatcagcagatgatagtggagaagctagtgatccagaggatgaacttgagaacacttcaaaatggaaagaatcccttcttgcaagaacaatgtcccgacggagtgataatttgatgcaacttgtctatggactaccttcaacaaagctaggcagtgttgcagaagaaaatgatgatagtgaagccaacagctcagatgatgaatttttcagaccaaaaggacaaaagcagcaagcaaagaatgaatcaccgagctttggtgatattgatggtgaggattgctccaagtttttcaaagcagagttaaaagattggtctaatgaagatctcatcaaaagcatccgtgatcgttttgtgactggaaattggtcaaaagctactttgagaggacaggatacagatgatcgtggtgaggatgatgaggaaatgtatggagattttgaagatcttgaaactggtgaggtacatatggcccagacagatgaaaatgtggaagcgaaagatgacccagaagttgaagaaagaagacttaagaagcttgcacaaagagcgaaatttgatgcacaatatgatggttctgagttatctgacgatgaagttgatgatgttaagaagaaatccagacgagaacagtccaatgaagggggctattttgacaagctaaaggaggaaatggaactacgcaagcaaatgaatatatctgagctcaatgaccttgatgaagagactcgagtagacattgaaggattcaggactggtacttatgtcaggttagaagtacatggtgtgccatttgagcttgttgagcattttgatccttgccaccccattcttgttggggggattggccttggtgaggagaacacaggattcatgcaggctagtttgaagcgccataggtggcacaggaaagttctgaagacaaaggatccaatcatagtttcaattggttggaggcgatttcaaacaacccctgtgtatgcaatagaggatcggaatggtcgacaccgcatgctgaagtatacacctgagcatatgcattgctttgctatgttttggggaccacttgctccaccgaagagtggtgtattagcagtccagaatctttccaacaatcaggtgccatttaggataactgcaacaggatgggttcaagaattcaacaatactgccagaattgtgaagaagataaagctcacaggcacaccatgcaagatatttaagaagactgcactaatcaagggaatgttcacatccgatttagaggttgctaggtttgaaggtgctgccattcggactgtaagtggaatccgaggacaggttaaaaaggcagcaaagattgagccaggagatatgttgaagagaaaaggggaaaatacagaaggaatcgcaagatgtacatttgaggacagaattcttatgagtgacattgttttcctgcgtgcctgggtcaacgttgaagttcctacgtactctaaccctgtgaccactgctctgcaacctagagagcagacctggcaaggcatgagaacaactgctgagttgcggaaggcacacaatatccctaccccacacaacaaggattcagtttacaagcctatcgagcggaaaccacgcaagttcaatcccgtcgagatccccgcaaagctgcaacagttacttccctttaaatctaagcctaaggacacagcgaagcagaagaaagcaccagttgaaaacagggtgcctgtaatcatgcagcctagtgagaagaagacacacgcagctatacaacagcaaagaagaagaaaattaaggaacaacagaagaaaaaagcatacgaggcagagaaagccaagaccgagctactgacgaagaagcgccagagggaagagaggcgtgtgagataccgggaagaagataagcagaagaaacgtgcacgcagatgaggcgaggaacggggtatgtgcaccaggaactcagcagcaaccgggcatgctctcttgtgcagaacatatgccaaaatcttagttcatatacggagagctataaaaggtgcagtaccacccatctgggcgaagaagcatgtcaagtcataaccagggcgcggagatgagcaagttaggttgcttgtttaagttatgtatcggttgccctaacgcggaatattgtctgagtgtttggcaaacgcatgtggactcccaagtaaatttggagtcataattttggagtgtatactacctcaggtaccgaatgttaggcaaacgcatgtggtctttagctcccaagcaagtttggtttctatggatcaatttttagtccatctattttagtttctaaattactaaacacatgagctaaaaaaatatctctattttagttcctttgtttaatttagagattaaaatggaggtactaaaaattagtctatagaaaccaaacacctcttaatatgcttttgagccctgttctgtgagcctgtttcgtttgattttaatgtctctattgcttttattgtctctatatattgtagctgtagttgttcaaacaactgattttaat

SEQ ID NO: 1610 - DNA, 4405 bp, Zea Mays
cgcctccctaaacccttgccagtctccctcccggcagcggcggcaaggcctaccgccgcaaaccctcttcctcagccgctgcgtacaaaagaagttagcttctttttaagtaggaggcgggagccctaggtagccccatggctccggcggacggcggcggcgagcagccgcacaaggcgcaccgccaacacaagtccggcgccaaggcgcggaagaagaagggcaagggcaagggcgacgccggcgatgacgcaggggggcagcagaagaaccccaaggcttttgcatttcagtcagcagccaaggcgaaacgtctacaagctcgatcagctgagattgaacaacggcgtcttcatgtgccaattatggaccgttccatcggtgaacctcctccttttgttgttgtagttcaaggacctccacaggttgggaagtcactgttgataaaatgtctggtaaagcactacaccaagcaaaacttgcccgaagttcgtggccccatcactgttgtatcaggtaaaagtaggagggtacagttcgtagagtgtccaaatgatatcaatggaatgattgatgctgctaaaatagccgatctcgctttattgcttattgatggaagctatggatttgaaatggatacatttgagtttcttaatatcatgcaagtccatggattccccaaggtgatgggagtgctcacacaccttgataaatttaaagacgtgaaaaaactccggaaaactaagcagcgccttaaacatcgattctgggctgagataaaagagggagcaaaattattctacttgtctggtctgattcatggaaaatacacgaaaagagaagttcataatcttgcaagattcatctctgtaatcaaacctatccaattgagttggcgcatggctcatccttatttgttagttgatagatttgaggatgtcacccctacagaaagtgtgcggttgaacagaaagtgtgacagaacaataacattgtatggttatctccgtggctgtaatatgaaaagagggaccaaggtgcatatcacaggggctggtgatttcagcttgtcaggggtgacgggtttaggtgatccttgccctttgccatcatctgcaaagaaaagaggattgcgtgacaaggaaaaactgttctatgcaccaatgtctggtcttggggatttgctttatgacaaggatgctgtttatattaatatcaatgatcatcttgttcagttttcaaaaagtgatgaaaatgatgcacccaaaaagcaagggaaaggtaaagatgtgggtgtggccctggtaaaaacacttcaaaacccaagatactcccttgatgaaaagttggagcaaagttttataaatttctttggtgggcgtcctgctgctcaatccaaagacagtgatgctcaaggcaatgtcatctctgcaagccaggataatcagagtgacacaaacattttgcagcaagtagatgatggtaacaatagcaatgcagtcaccatggagagcaatgaacattctgaaggctctagtgatagcgaaggggataatgatgatatccagctgagggatcgtgatgttgacttgagggaagaagtagaggtttgcaatggaagattgaggcgaagagctgtatctgctaattttcgagatgactttgatgatgagggtactgatgaagatgcaaatgatgatgaggattctggtgatgaccagttatctggagattctgcatcatcagcagatgatagtggagaagctagtgatccagaggatgaacttgagaacacttcaaaatggaaagaatcccttcttgcaagaacaatgtcccgacggagtgataatttgatgcaacttgtctatggactaccttcaacaaagctaggcagtgttgcagaagaaaatgatgatagtgaagccaacagctcagatgatgaatttttcagaccaaaaggacaaaagcagcaagcaaagaatgaatcaccgagctttggtgatattgatggtgaggattgctccaagtttttcaaagcagagttaaaagattggtctaatgaagatctcatcaaaagcatccgtgatcgttttgtgactggaaattggtcaaaagctactttgagaggacaggatacagatgatcgtggtgaggatgatgaggaaatgtatggagattttgaagatcttgaaactggtgaggtacatatggcccagacagatgaaaatgtggaagcgaaagatgacccagaagttgaagaaagaagacttaagaagcttgcacaaagagcgaaatttgatgcacaatatgatggttctgagttatctgacgatgaagttgatgatgttaagaagaaatccagacgagaacagtccaatgaagggggctattttgacaagctaaaggaggaaatggaactacgcaagcaaatgaatatatctgagctcaatgaccttgatgaagagactcgagtagacattgaaggattcaggactggtacttatgtcaggttagaagtacatggtgtgccatttgagcttgttgagcattttgatccttgccaccccattcttgttggggggattggccttggtgaggagaacacaggattcatgcaggctagtttgaagcgccataggtggcacaggaaagttctgaagacaaaggatccaatcatagtttcaattggttggaggcgatttcaaacaacccctgtgtatgcaatagaggatcggaatggtcgacaccgcatgctgaagtatacacctgagcatatgcattgctttgctatgttttggggaccacttgctccaccgaagagtggtgtattagcagtccagaatctttccaacaatcaggtgccatttaggataactgcaacaggatgggttcaagaattcaacaatactgccagaattgtgaagaagataaagctcacaggcacaccatgcaagatatttaagaagactgcactaatcaagggaatgttcacatccgatttagaggttgctaggtttgaaggtgctgccattcggactgtaagtggaatccgaggacaggttaaaaagtttcttgttcattacaggcagcaaagattgagccaggagatatgttgaagagaaaaggggaaaatacagaaggaatcgcaagatgtacatttgaggacagaattcttatgagtgacattgttttcctgcgtgcctgggtcaacgttgaagttcctacgtactctaaccctgtgaccactgctctgcaacctagagagcagacctggcaaggcatgagaacaactgctgagttgcggaaggcacacaatatccctaccccacacaacaaggattcagtttacaagcctatcgagcggaaaccacgcaagttcaatcccgtcgagatccccgcaaagctgcaacagttacttccctttaaatctaagcctaaggacacagcgaagcagaagaaagcaccagttgaaaacagggtgcctgtaatcatgcagcctagtgagaagaagacacacgcagctatacaacagctaaggctgataaaacacgagaaggcaatgccttaatcacacagcagccagctctactgccagccgttgttctgcctctttctcatgatttccttgtatcctcgcaggcaaagaagaagaaaattaaggaacaacagaagaaaaaagcatacgaggcagagaaagccaagaccgagctactgacgaagaagcgccagagggaagagaggcgtgtgagataccgggaagaagataagcagaagaaacgtgcacgcagatgaggcgaggaacggggtatgtgcaccaggaactcagcagcaaccgggcatgctctcttgtgcagaacatatgccaaaatcttagttcatatacggagagctataaaaggtgcagtaccacccatctgggcgaagaagcatgtcaagtcataaccagggcgcggagatgagcaagttaggttgcttgtttaagttatgtatcggttgccctaacgcggaatattgtctgagtgtttggcaaacgcatgtggactcccaagtaaatttggagtcataattttggagtgtatactacctcaggtaccgaatgttaggcaaacgcatgtggtctttagctcccaagcaagtttggtttctatggatcaatttttagtccatctattttagtttctaaattactaaacacatgagctaaaaaaatatctctattttagttcctttgtttaatttagagattaaaatggaggtactaaaaattagtctatagaaaccaaacacctcttaatatgcttttgagccctgttctgtgagcctgtttcgtttgattttaatgtctctattgcttttattgtctctatatattgtagctgtagttgttcaaacaactgattttaat

SEQ ID NO: 1611 - DNA, 4276 bp, Zea Mays
cgcctccctaaacccttgccagtctccctcccggcagcggcggcaaggcctaccgccgcaaaccctcttcctcagccgctgcgtacaaaagaagttagcttctttttaagtaggaggcgggagccctaggtagccccatggctccggcggacggcggcggcgagcagccgcacaaggcgcaccgccaacacaagtccggcgccaaggcgcggaagaagaagggcaagggcaagggcgacgccggcgatgacgcaggggggcagcagaagaaccccaaggcttttgcatttcagtcagcagccaaggcgaaacgtctacaagctcgatcagctgagattgaacaacggcgtcttcatgtgccaattatggaccgttccatcggtgaacctcctccttttgttgttgtagttcaaggacctccacaggttgggaagtcactgttgataaaatgtctggtaaagcactacaccaagcaaaacttgcccgaagttcgtggccccatcactgttgtatcaggatacatttgagtttcttaatatcatgcaagtccatggattccccaaggtgatgggagtgctcacacaccttgataaatttaaagacgtgaaaaaactccggaaaactaagcagcgccttaaacatcgattctgggctgagataaaagagggagcaaaattattctacttgtctggtctgattcatggaaaatacacgaaaagagaagttcataatcttgcaagattcatctctgtaatcaaacctatccaattgagttggcgcatggctcatccttatttgttagttgatagatttgaggatgtcacccctacagaaagtgtgcggttgaacagaaagtgtgacagaacaataacattgtatggttatctccgtggctgtaatatgaaaagagggaccaaggtgcatatcacaggggctggtgatttcagcttgtcaggggtgacgggtttaggtgatccttgccctttgccatcatctgcaaagaaaagaggattgcgtgacaaggaaaaactgttctatgcaccaatgtctggtcttggggatttgctttatgacaaggatgctgtttatattaatatcaatgatcatcttgttcagttttcaaaaagtgatgaaaatgatgcacccaaaaagcaagggaaaggtaaagatgtgggtgtggccctggtaaaaacacttcaaaacccaagatactcccttgatgaaaagttggagcaaagttttataaatttctttggtgggcgtcctgctgctcaatccaaagacagtgatgctcaaggcaatgtcatctctgcaagccaggataatcagagtgacacaaacattttgcagcaagtagatgatggtaacaatagcaatgcagtcaccatggagagcaatgaacattctgaaggctctagtgatagcgaaggggataatgatgatatccagctgagggatcgtgatgttgacttgagggaagaagtagaggtttgcaatggaagattgaggcgaagagctgtatctgctaattttcgagatgactttgatgatgagggtactgatgaagatgcaaatgatgatgaggattctggtgatgaccagttatctggagattctgcatcatcagcagatgatagtggagaagctagtgatccagaggatgaacttgagaacacttcaaaatggaaagaatcccttcttgcaagaacaatgtcccgacggagtgataatttgatgcaacttgtctatggactaccttcaacaaagctaggcagtgttgcagaagaaaatgatgatagtgaagccaacagctcagatgatgaatttttcagaccaaaaggacaaaagcagcaagcaaagaatgaatcaccgagctttggtgatattgatggtgaggattgctccaagtttttcaaagcagagttaaaagattggtctaatgaagatctcatcaaaagcatccgtgatcgttttgtgactggaaattggtcaaaagctactttgagaggacaggatacagatgatcgtggtgaggatgatgaggaaatgtatggagattttgaagatcttgaaactggtgaggtacatatggcccagacagatgaaaatgtggaagcgaaagatgacccagaagttgaagaaagaagacttaagaagcttgcacaaagagcgaaatttgatgcacaatatgatggttctgagttatctgacgatgaagttgatgatgttaagaagaaatccagacgagaacagtccaatgaagggggctattttgacaagctaaaggaggaaatggaactacgcaagcaaatgaatatatctgagctcaatgaccttgatgaagagactcgagtagacattgaaggattcaggactggtacttatgtcaggttagaagtacatggtgtgccatttgagcttgttgagcattttgatccttgccaccccattcttgttggggggattggccttggtgaggagaacacaggattcatgcaggctagtttgaagcgccataggtggcacaggaaagttctgaagacaaaggatccaatcatagtttcaattggttggaggcgatttcaaacaacccctgtgtatgcaatagaggatcggaatggtcgacaccgcatgctgaagtatacacctgagcatatgcattgctttgctatgttttggggaccacttgctccaccgaagagtggtgtattagcagtccagaatctttccaacaatcaggtgccatttaggataactgcaacaggatgggttcaagaattcaacaatactgccagaattgtgaagaagataaagctcacaggcacaccatgcaagatatttaagaagactgcactaatcaagggaatgttcacatccgatttagaggttgctaggtttgaaggtgctgccattcggactgtaagtggaatccgaggacaggttaaaaaggtaatgagtaaataccatgccttgatagtttatcacggttaaatgtaactgttaaacgtaagcatgcaaatagtttcttgttcattacaggcagcaaagattgagccaggagatatgttgaagagaaaaggggaaaatacagaaggaatcgcaagatgtacatttgaggacagaattcttatgagtgacattgttttcctgcgtgcctgggtcaacgttgaagttcctacgtactctaaccctgtgaccactgctctgcaacctagagagcagacctggcaaggcatgagaacaactgctgagttgcggaaggcacacaatatccctaccccacacaacaaggattcagtttacaagcctatcgagcggaaaccacgcaagttcaatcccgtcgagatccccgcaaagctgcaacagttacttccctttaaatctaagcctaaggacacagcgaagcagaagaaagcaccagttgaaaacagggtgcctgtaatcatgcagcctagtgagaagaagacacacgcagctatacaacagctaaggctgataaaacacgagaaggcaaagaagaagaaaattaaggaacaacagaagaaaaaagcatacgaggcagagaaagccaagaccgagctactgacgaagaagcgccagagggaagagaggcgtgtgagataccgggaagaagataagcagaagaaacgtgcacgcagatgaggcgaggaacggggtatgtgcaccaggaactcagcagcaaccgggcatgctctcttgtgcagaacatatgccaaaatcttagttcatatacggagagctataaaaggtgcagtaccacccatctgggcgaagaagcatgtcaagtcataaccagggcgcggagatgagcaagttaggttgcttgtttaagttatgtatcggttgccctaacgcggaatattgtctgagtgtttggcaaacgcatgtggactcccaagtaaatttggagtcataattttggagtgtatactacctcaggtaccgaatgttaggcaaacgcatgtggtctttagctcccaagcaagtttggtttctatggatcaatttttagtccatctattttagtttctaaattactaaacacatgagctaaaaaaatatctctattttagttcctttgtttaatttagagattaaaatggaggtactaaaaattagtctatagaaaccaaacacctcttaatatgcttttgagccctgttctgtgagcctgtttcgtttgattttaatgtctctattgcttttattgtctctatatattgtagctgtagttgttcaaacaactgattttaat

SEQ ID NO: 1612 - DNA, 4271 bp, Zea Mays
cgcctccctaaacccttgccagtctccctcccggcagcggcggcaaggcctaccgccgcaaaccctcttcctcagccgctgcgtacaaaagaagttagcttctttttaagtaggaggcgggagccctaggtagccccatggctccggcggacggcggcggcgagcagccgcacaaggcgcaccgccaacacaagtccggcgccaaggcgcggaagaagaagggcaagggcaagggcgacgccggcgatgacgcaggggggcagcagaagaaccccaaggcttttgcatttcagtcagcagccaaggcgaaacgtctacaagctcgatcagctgagattgaacaacggcgtcttcatgtgccaattatggaccgttccatcggtgaacctcctccttttgttgttgtagttcaaggacctccacaggttgggaagtcactgttgataaaatgtctggtaaagcactacaccaagcaaaacttgcccgaagttcgtggccccatcactgttgtatcaggtaaaagtaggagggtacagttcgtagagtgtccaaatgatatcaatggaatgattgatgctgctaaaatagccgatctcgctttattgcttattgatggaagctatggatttgaaatggatacatttgagtttcttaatatcatgcaagtccatggattccccaaggtgatgggagtgctcacacaccttgataaatttaaagacgtgaaaaaactccggaaaactaagcagcgccttaaacatcgattctgggctgagataaaagagggagcaaaattattctacttgtctggtctgattcatggaaaatacacgaaaagagaagttcataatcttgcaagattcatctctgtaatcaaacctatccaattgagttggcgcatggctcatccttatttgttagttgatagatttgaggatgtcacccctacagaaagtgtgcggttgaacagaaagtgtgacagaacaataacattgtatggttatctccgtggctgtaatatgaaaagagggaccaaggtgcatatcacaggggctggtgatttcagcttgtcaggggtgacgggtttaggtgatccttgccctttgccatcatctgcaaagaaaagaggattgcgtgacaaggaaaaactgttctatgcaccaatgtctggtcttggggatttgctttatgacaaggatgctgtttatattaatatcaatgatcatcttgttcagttttcaaaaagtgatgaaaatgatgcacccaaaaagcaagggaaaggtaaagatgtgggtgtggccctggtaaaaacacttcaaaacccaagatactcccttgatgaaaagttggagcaaagttttataaatttctttggtgggcgtcctgctgctcaatccaaagacagtgatgctcaaggcaatgtcatctctgcaagccaggataatcagagtgacacaaacattttgcagcaagtagatgatggtaacaatagcaatgcagtcaccatggagagcaatgaacattctgaaggctctagtgatagcgaaggggataatgatgatatccagctgagggatcgtgatgttgacttgagggaagaagtagaggtttgcaatggaagattgaggcgaagagctgtatctgctaattttcgagatgactttgatgatgagggtactgatgaagatgcaaatgatgatgaggattctggtgatgaccagttatctggagattctgcatcatcagcagatgatagtggagaagctaaggatgaacttgagaacacttcaaaatggaaagaatcccttcttgcaagaacaatgtcccgacggagtgataatttgatgcaacttgtctatggactaccttcaacaaagctaggcagtgttgcagaagaaaatgatgatagtgaagccaacagctcagatgatgaatttttcagaccaaaaggacaaaagcagcaagcaaagaatgaatcaccgagctttggtgatattgatggtgaggattgctccaagtttttcaaagcagagttaaaagattggtctaatgaagatctcatcaaaagcatccgtgatcgttttgtgactggaaattggtcaaaagctactttgagaggacaggatacagatgatcgtggtgaggatgatgaggaaatgtatggagattttgaagatcttgaaactggtgaggtacatatggcccagacagatgaaaatgtggaagcgaaagatgacccagaagttgaagaaagaagacttaagaagcttgcacaaagagcgaaatttgatgcacaatatgatggttctgagttatctgacgatgaagttgatgatgttaagaagaaatccagacgagaacagtccaatgaagggggctattttgacaagctaaaggaggaaatggaactacgcaagcaaatgaatatatctgagctcaatgaccttgatgaagagactcgagtagacattgaaggattcaggactggtacttatgtcaggttagaagtacatggtgtgccatttgagcttgttgagcattttgatccttgccaccccattcttgttggggggattggccttggtgaggagaacacaggattcatgcaggctagtttgaagcgccataggtggcacaggaaagttctgaagacaaaggatccaatcatagtttcaattggttggaggcgatttcaaacaacccctgtgtatgcaatagaggatcggaatggtcgacaccgcatgctgaagtatacacctgagcatatgcattgctttgctatgttttggggaccacttgctccaccgaagagtggtgtattagcagtccagaatctttccaacaatcaggtgccatttaggataactgcaacaggatgggttcaagaattcaacaatactgccagaattgtgaagaagataaagctcacaggcacaccatgcaagatatttaagaagactgcactaatcaagggaatgttcacatccgatttagaggttgctaggtttgaaggtgctgccattcggactgtaagtggaatccgaggacaggttaaaaaggcagcaaagattgagccaggagatatgttgaagagaaaaggggaaaatacagaaggaatcgcaagatgtacatttgaggacagaattcttatgagtgacattgttttcctgcgtgcctgggtcaacgttgaagttcctacgtactctaaccctgtgaccactgctctgcaacctagagagcagacctggcaaggcatgagaacaactgctgagttgcggaaggcacacaatatccctaccccacacaacaaggattcagtttacaagcctatcgagcggaaaccacgcaagttcaatcccgtcgagatccccgcaaagctgcaacagttacttccctttaaatctaagcctaaggacacagcgaagcagaagaaagcaccagttgaaaacagggtgcctgtaatcacgcagctatacaacagctaaggctgataaaacacgagaaggcaaagaagaagaaaattaaggaacaacagaagaaaaaagcatacgaggcagagaaagccaagaccgagctactgacgaagaagcgccagagggaagagaggcgtgtgagataccgggaagaagataagcagaagaaacgtgcacgcagatgaggcgaggaacggggtatgtgcaccaggaactcagcagcaaccgggcatgctctcttgtgcagaacatatgccaaaatcttagttcatatacggagagctataaaaggtgcagtaccacccatctgggcgaagaagcatgtcaagtcataaccagggcgcggagatgagcaagttaggttgcttgtttaagttatgtatcggttgccctaacgcggaatattgtctgagtgtttggcaaacgcatgtggactcccaagtaaatttggagtcataattttggagtgtatactacctcaggtaccgaatgttaggcaaacgcatgtggtctttagctcccaagcaagtttggtttctatggatcaatttttagtccatctattttagtttctaaattactaaacacatgagctaaaaaaatatctctattttagttcctttgtttaatttagagattaaaatggaggtactaaaaattagtctatagaaaccaaacacctcttaatatgcttttgagccctgttctgtgagcctgtttcgtttgattttaatgtctctattgcttttattgtctctatatattgtagctgtagttgttcaaacaactgattttaat

SEQ ID NO: 1613 - DNA, 3342 bp, Zea Mays
gcagggtaggtcgccgttgccgttgccgttgcctcgctcgccctcgccccctcccacttaatgccgcacggcccgtaatccggagtcttctccctcccctaacgcccctcctctccttccccacctgcgtgctgccgctgctgacaccttctcctccccacaaatctcgcctctgccgccgactctggctgcgaatccaccgcagatcggcgcgggggctccgcttgatgcccgatctgtgagagcggctcgccaccatgagggccgtgctgctgctggcgctgctcctgtctgcttgcgccgcggcggcggcgcaaggggccaactccacggcgttcgtgccgcgggacgacatccgcctggactgcggcgccaaggggcagggtaacgacactgacggccgggtgtggaccggggacgcgggctccaagtacgccccgccggacaacctcgcctcggtggcctccgcctccggccaggatccctcggtcccgcaggtgccgtacctcaccgcgcgggtctcggcctcgcctttcacctactccttcccgcttggcccgggccgcaagttcctcaggctccacttctacccggccaactacaccgaccgcgacgccgccgacggcctcttctccgtctccgtcgccgccccggggggcaacctcacgctcctctccaacttcagcgcctaccagacggctgccgcgatcacctactcgtacctcattcgggagttctccgtcaacgtctcgtccccgacgctcgacctcaccttcaccccggagaaggcccaccccaacgcctacgcgttcgtcaacggcatcgagaccatgtaccggctcaacgtcggaggccaggcgatttcgccctccaaggacacgggcggttaccggtcctgggacgacgactcatcgtacatctttggtgctagcttcggggtcagctacccgaaggatagcaaggtcaccatcacatatccaagcaatgtgccggagtatgtggcgccagaggatgtctacggcacggcgcgatccatggggccagataagaatgtgaacatgaactacaatctcacatggatgttggaggtggatgctggattcatgtaccttatcaggatgcatttctgtgagatccagtaccccatcacaaagatcaatcagcgggtcttcaatatttacattaacaaccagactgcagtcaagggtgctgatgtgaatgcctgggcggccgtaagtggtgctaccacccttattggcactccggtgtatcaggactatgtagtgagcacaacgggtttaggggccatggatttatgggtagctctccatcccaatcccgactcgaagccacaaatatatgatgctatcctcaatgggatggaggtgttcaagctacagcttaccaatggcagccttgcagggctgaatcctgtgccaagtgttgccccggtgcctgatgggacaactaagaagaagtcaagtgttgggcctattgtcggtggagtggttggaggtttggtggttcttgcacttggctattgctgctttgtgatctgcaagcgcaggaggaatgccgggaaggatgcaggcatgagtgatgggcattctggttggctgcccctgtctctttatggcaattcacacacttccagttcggccaagtcacacactactggtagctatgcttcatctttgccatccaacctgtgccgccatttctcttttgctgagatcaaggccgcaacgaacaactttgatgagtcccttattcttggtgtgggtggatttggtaaagtttatcgtggtgaggttgatgggggaacaactaaggtggctatcaagcgtggcaaccccttgtctgagcagggtgtgcatgagttccagactgagattgaaatgctgtccaagctccgccaccgccatctggtgtcactgattgggtactgcgaggagaagaatgaaatgatcctggtctacgattacatggcccatggtactctccgtgagcacctgtacaagacccagaagccacctcttacctggaggcagcgtttggatatctgtattggtgcagctcgtgggcttcactaccttcacactggtgcaaagcacaccatcatccaccgtgatgtgaagacaacaaacatcctgctggatgagaaatgggttgccaaggtttcagattttggtctgtccaagactggcccatctatggaccatactcatgtgagcacagttgtcaaaggcagttttggttaccttgatcccgaatacttccgcaggcagcagctcacagagaaatccgatgtctactcatttggtgttgtgctgtttgaggtcctctgcgcacggcctgccttgaaccctactcttccaaaagaagaagtcagcttggcggagtgggcgttgcactgccagaagaagggcatccttgaccagattgtcgacccctacctgaagggaaagatagccccacagtgcttcaagaagttcgccgagacagccgagaagtgtgtttctgatcagggaatcgaccgcccttcgatgggtgatgtgctctggaacctggagttcgcccttcagatgcaggaaggcgcagaagagagcggaagccttggctgcgggatgtcagacgagggcgccccattgatggtcgggaagaaggacccgaacgacccatcgatcgagtcaagcaccaccaccacaaccaccacttctataagcatgggcgaccaaagcgtcgcgagtatagactcggatgggctgacgcctagcgccgtcttctcgcagatcatgaaccccaaggggcggtgaggtaaagctggccccattcgttaccttgcaggcgtaatttattcattcagaataaatttttttcttcaatgttctctcaagttaaggcttaagaaccagaagtgtgaggattgtttcgtactagatattctgccttgccttgtactacttccttctccgagtattgtaatgactatacaatctgttggcttgtattgtaccgctgctattgacccagccagtattttactgcacgagaaagtggtgtgcacgaactattcttatggggtggttgtgtgacgtgttcttttaggaaggagtctcacctctgaatccgacatctacacttgacaatcagttttcagtctgaatggatacaagaactggtagaccgtcgtctggttattagcagaactgagattgtgtcggttttgtcccttcagacaaattccaattgccaaacaatccatttcacattggattgtaggcgcagggcggctcacgagagctcttgaggtgttattacagaataattgtttgggtgtgt

SEQ ID NO: 1614 - DNA, 1304 bp, Zea Mays
attccaatacctataatgacgaagagaggaacatcgtagccgttgatcgcaacgaatattggtttccagacgccttcggtgagtacagggaaggaagtcgccatggctgacgacgaacaggcggagaagaaggaggaggtccccgagcttgctccttttgacccaaccaagaaaaagaagaagaagaaggtggtaatacaagagccatcagatgaggtggataacttggcagagaagacagagagcttgactgtaaccgagtctagtgagccaagctttgcgggcatgaaaaagaagaagaagaaacatgtggaacttgattcttctcttaccgagaccggagatgttgatgacacaggagacgatcaagttagagaggatgaagaaggagaagggattgtgctcgctggtgccgctgccaccagatacccttgggaaggaactgacagagattataagtatgaagagctgcttggcagagtattcaacattttgcgtgagaacaacccggatcttgctggtgatagaagaagaactgttatgaggccccctcaagtcctcagggaaggaacaaagaagacagtttttgtgaacttcatggacttgtgcaaaacaatgcataggcaaccagaacatgtgatgatgttcttgcttgctgagatgggaacaagtggatccctggatgggcaacaaaggttggttatcaaaggaagatttgcaccaaaaaatttcgaagcgatacttaggagatatatcaatgaatatgtcatatgcaatggttgcaagagtccggataccattctttctaaagagaacaggttgttcttcctccgatgcgagcagtgtggttcatcgaggtctgttgctcccatcaaggctggattcgttgcccaagtgggccgtcgtaaggctggatcttaagctacctactacttgcctgaaatcgcttcccgatgaagacaatgcaaactagtttgctggtccacaaaaatcattgttgcactttcccttgtgcctacacagttcactggatttctgctgttcgctatacttggattggtgctgtgaatttatttcgtgtgatgagaggatttgtgtttgcggctcacttgtgtttactacgtttgttttgctcgtgattttgctgtggaaggcactgtcgggagcttcccgagttaggacgagtaacaagaaaacgtgttgcttccattcagataaaaagcaaggctgcagcattctgaactgttcctcagcttcttttccctgcacttatttgggtataaaaagctaagaagatgtgattt

SEQ ID NO: 1615 - DNA, 1404 bp, Zea Mays
gatcgcaacgaatattggtagcggctcccccagctctggaccttctcaaacccttccccgtgggccgtggccgccgtctgcctgtctccttccactcgccactccgatttccctcggtcagacgccgaagccgaaccctgactccaattctctcgtgcgagtgacatctaggtttccagacgccttcggtgagtacagggaaggaagtcgccatggctgacgacgaacaggcggagaagaaggaggaggtccccgagcttgctccttttgacccaaccaagaaaaagaagaagaagaaggtggtaatacaagagccatcagatgaggtggataacttggcagagaagacagagagcttgactgtaaccgagtctagtgagccaagctttgcgggcatgaaaaagaagaagaagaaacatgtggaacttgattcttctcttaccgagaccggagatgttgatgacacaggagacgatcaagttagagaggatgaagaaggagaagggattgtgctcgctggtgccgctgccaccagatacccttgggaaggaactgacagagattataactgcttggcagagtattcaacattttgcgtgagaacaacccggatcttgctggtgatagaagaagaactgttatgaggccccctcaagtcctcagggaaggaacaaagaagacagtttttgtgaacttcatggacttgtgcaaaacaatgcataggcaaccagaacatgtgatgatgttcttgcttgctgagatgggaacaagtggatccctggatgggcaacaaaggttggttatcaaaggaagatttgcaccaaaaaatttcgaagcgatacttaggagatatatcaatgaatatgtcatatgcaatggttgcaagagtccggataccattctttctaaagagaacaggttgttcttcctccgatgcgagcagtgtggttcatcgaggtctgttgctcccatcaaggctggattcgttgcccaagtgggccgtcgtaaggctggatcttaagctacctactacttgcctgaaatcgcttcccgatgaagacaatgcaaactagtttgctggtccacaaaaatcattgttgcactttcccttgtgcctacacagttcactggatttctgctgttcgctatacttggattggtgctgtgaatttatttcgtgtgatgagaggatttgtgtttgcggctcacttgtgtttactacgtttgttttgctcgtgattttgctgtggaaggcactgtcgggagcttcccgagttaggacgagtaacaagaaaacgtgttgcttccattcagataaaaagcaaggctgcagcattctgaactgttcctcagcttcttttccctgcacttatttgggtataaaaagctaagaagatgtgattt

SEQ ID NO: 1616 - DNA, 796 bp, Zea Mays
cagcgctcccccaaaagaacgctaagatgtggaatctgcatgaacggattaagttagcgtgacaagcttgctccttttgacccaaccaagaaaaagaagaagaagaaggtggtaatacaagagccatcagatgaggtggataacttggcagagaagacagagagcttgactgtaaccgagtctagtgagccaagctttgcgggcatgaaaaagaagaagaagaaacatgtggaacttgattcttctcttaccgagaccggagatgttgatgacacaggagacgatcaagttagagaggatgaagaaggagaagggattgtgctcgctggtgccgctgccaccagatacccttgggaaggaactgacagagattataagtatgaagagctgcttggcagagtattcaacattttgcgtgagaacaacccggatcttgctggtgatagaagaagaactgttatgaggccccctcaagtcctcagggaaggaacaaagaagacagtttttgtgaacttcatggacttgtgcaaaacaatgcataggcaaccagaacatgtgatgatgttcttgcttgctgagatgggaacaagtggatccctggatgggcaacaaaggttggttatcaaaggaagatttgcaccaaaaaatttcgaagcgatacttaggagatatatcaatgaatatgtcatatgcaatggttgcaagagtccggataccattctttctaaagagaacaggttgttcttcctccgatgcgagcagcatagtgtcatgggcaaaagcttgcttcagtaag

SEQ ID NO: 1617 - DNA, 1202 bp, Zea Mays
ctaagatgtggaatctgcatgaacggattaagttagcgtgacaagcttgctccttttgacccaaccaagaaaaagaagaagaagaaggtggtaatacaagagccatcagatgaggtggataacttggcagagaagacagagagcttgactgtaaccgagtctagtgagccaagctttgcgggcatgaaaaagaagaagaagaaacatgtggaacttgattcttctcttaccgagaccggagatgttgatgacacaggagacgatcaagttagagaggatgaagaaggagaagggattgtgctcgctggtgccgctgccaccagatacccttgggaaggaactgacagagattataagtatgaagagctgcttggcagagtattcaacattttgcgtgagaacaacccggatcttgctggtgatagaagaagaactgttatgaggccccctcaagtcctcagggaaggaacaaagaagacagtttttgtgaacttcatggacttgtgcaaaacaatgcataggcaaccagaacatgtgatgatgttcttgcttgctgagatgggaacaagtggatccctggatgggcaacaaaggttggttatcaaaggaagatttgcaccaaaaaatttcgaagcgatacttaggagatatatcaatgaatatgtcatatgcaatggttgcaagagtccggataccattctttctaaagagaacaggttgttcttcctccgatgcgagcagtgtggttcatcgaggtctgttgctcccatcaaggctggattcgttgcccaagtgggccgtcgtaaggctggatcttaagctacctactacttgcctgaaatcgcttcccgatgaagacaatgcaaactagtttgctggtccacaaaaatcattgttgcactttcccttgtgcctacacagttcactggatttctgctgttcgctatacttggattggtgctgtgaatttatttcgtgtgatgagaggatttgtgtttgcggctcacttgtgtttactacgtttgttttgctcgtgattttgctgtggaaggcactgtcgggagcttcccgagttaggacgagtaacaagaaaacgtgttgcttccattcagataaaaagcaaggctgcagcattctgaactgttcctcagcttcttttccctgcacttatttgggtataaaaagctaagaagatgtgattt

SEQ ID NO: 1618 - DNA, 912 bp, Zea Mays
atttttaatataaagatgcactgcgcgttcgataaaaaaacgtgttgctgccatgcaccatggccgccctatccgaaatcttgggagcccattcacagcctcaagaagggtagtcgggataaggggataagctgacgtgtcgctctcccagtctcggttttgcccacaaaccaaaagctatctcgctggtcactgtcctcgcttttgctccctgttccgccgagctcacgccagtagagatgagggccacgtcgtcccccgtggctggcgccgtcctcgccgccccttcctccgccgccgccgtagtcgtaaagcctctgcctcgtggcgcagcgaatggcggcagcacgggcaggcgcgaagtgcttgccgggaccgggctgggcgcggcgctgctgctagcgctggggcccgtgtgcggcgcggcgcgtgcggcggacgaggaatacgtgagcgagacgaaggaggtgatcgggaaggtgcggtcgacgatcaacctggacaagtcggacccgagcgtggcggacgcggtggcggagctccgggagctgtccaactcgtgggtggccaagtaccggcgggagaagtcgctgctggggcggccgtcgttccgggagatgtactcggcgctcaacgccgtgtcgggccattacatcagcttcggccccacggcgcccatcccggccaagcgccgcgcgcgcatcctcgaggagatggacaccgccgagaaggcactcctccgcggcaggtaggccaaatcccagcgaagcccggccatggcgatcgccgtcgccgtggtggcaggaacgcagctctcagcgacaacgctaccattttgtaactactgcggtgtagtatatatatatgcatgcattcgtacgtgatgcgagctgtgttttcgctcaaaaaaaa

SEQ ID NO: 1619 - DNA, 3201 bp, Zea Mays
gtcaacacccaacacatgctttaccacgcacacgtttgaccacggactctcggctggccgtctccagtcccccactccgcagctccgttcacacctcgccgcgggaacgggagtcctggtggtgttttttattctgctaagtggcccggcccggtcgtctttgctgcctcttgcgaagcgagtgcgccgtaacttccaagaaccggggggtgcgcggggggccggagcccggaggtagcaagcaacgagaggaaggagacgacgacgcggcctcggctcggaggagacgacggcgaggaagcgtccaggggaccccgtacgaaagacttgcagctgcgggtgtcttctgctatcacgatctgaagtgctgaacttggttggaagatactcttcttaagcctggaactgtcgtttccgatggtctggcactttctttcctgatggcaagcacagaaggtttccgcctcgtgagatgcccaaagtgtctgaacattctcccagaaccacctaacgtcacagtctacaagtgcggtggatgcggcaccacccttcgagctaaaacccgtgccagcggtggccaacaagtggccgcgaccgcgaaacaaggtcgccaggactccgacagttattcggtcgctaccgccgtgagcagtggggtgcctcgtcagaacagagaccagggctccattggtgccgtcacggagagttccttcgacgctgatgtcgcgagcgccgagcatggcagcaacggagcaaggagcggtgaaaatggtggtggtatgctggctggccagaatgtccatttcgaaggccaggataataataccagttcaaggatggaaggtcctgctggccagacacgcctgaacgcaaatgccacgtatttagactctggtggaacagaaaaccacaccgtgcaacaaactgcagagaaatgccgagtgagtggacatgtcgatgatacagaatgccacttgaacacctctgaggacgaaatgtttccttccgagacaagcaaagcagccgtcggtatgcaggatcctgggcagaagaaggaagcgggcggaaccgagcatgcagcgaacaagaagagccatcttgtgagggcactgtctcggtcgtgtgatcttggatcatcgatgaacttgaccgatttccactctgctcgggcttcgctccagtccaaaagcttcagggccagcgcgcccctccagtcgaagatcatgagcacggtggatgagctgaagggcgacctctctgagatgttcagcaaacctgcggactgcaagccaaggccacacccacaccctccacgcccttccaaacgagatggcggccgcacggctcgtgcggccgtcacgtccagcgcaccactcgcggcgtatcgtcctcccgccgagcattccggctatgtgtctcgctctcgcctcagcaggtctgcccaggttcttcctcctcctcgtcgtgggctgccgtcactgaggtcctgcgagcaagaaccttcagcgatgcacagggcaccggtcgagcaggttaagcgtcgtcctccgcccagaaaccactgcctgcccgtcctaagcggcgctccgttcgtcatctgctccagctgcgtcagcctggtccagctgcccgccgacttcgccgtgccgagcagaggagcacgccggctgcggtgcggcgcctgctccgagctcctttcctactcgtacagggaccccgccgggaggaagaagccgcggtcgccattcgagggcgatgagtgcagcactgacgggtacgacgagatccgccaccaggctgccggcgccggcttcgagcgggcaggtccggccgtgtcctactccgaagagtacgggctctcgttcggcatcggccactcgaccagcagcagcaccgaggacgggcagccgctgtacgtgtcgaggaactcttccttcaacaccgccgacgacggaaggatgggcagagacggcaagcttcaccggctgatgggatactcgtcggcgagcgagctgctgcggcactcgcccgacctattcgagagcttcgacaggcgcgcgcccagcgcgagagcgcacgtcgacggcaagggcaaaggcgtctgcgtggcaggaaacgacgcggcgggcgcgcgagacggtgcggcgaagaggtccaaggcgaggagcggtggcttgccgctccatgggatcctgaagaaagggatccatggcctggaatcgctcaagctcaggtcgtagctgatgatcctcgtttggcggggctctggcgatcgggtttaggagaaggtagcagtagcatacacgacatgtctttagaggcagtgtgtagtgatttgattattggcggcctgatgtgtgcttactgcttagtagctagcttgtgtgtgtgagttgtttgcaattcatctgtgtgtgtggagttggttggttggttcgcaaacttgtgctcttcggttcgatgtgtgtaagtgtaagatttgaacgccgggcatgctcgatgctgtggatgtttatagaatagaaatatgatgatgatgatgtggatctaaaccaagcaacctgagtaacttggtctaaccacaaccaaatctgaaccgattccgccacagggagcaagcggtgagtttttgttacccgcccgccaattactcaagtttgctctacaatcatcaggtaaccgaaatctgaaatttagttttcctcatggcctaatctctgcagtgaaaaaaaaacaaatatctgtagcaccagaatccaaacggacagggactaaaattaatccctccgtgcaaacaccccgaggaccaactcgggcaggattgcggcaatgaagtcgttatgtaacatggaaaaaaaaccttatagacagttgaagtttcagaatcggataacccaagtgaattgaccaagcaataatcaaacttcctgtagtttttgaataacaagacctcttgtgcaagttaactgcatgtctcttgtgcgcgggtagcacctgctgctctgtgtatcctccgtgaatttgacttgtggtatcctccgtggattcatcaaacgcattaagttgaaatgtccttagatccgtataagcatgagtagacgtatttttttgaaccaaaactaagtttatggataaaaatacattttaagatttttaaaacctatatgacaccacctctcatattacacagtacgacatttt

SEQ ID NO: 1620 - DNA, 632 bp, Zea Mays
cgctgctgcagttctgcggtgcgagcgcagtccgtcacgtctccacggatggatcatgacttcaaggcttgggtgactgaccgcgcgccagttcggcactttggctgatctgcagacgcccgatatttgctgccgtccccggtcccccatcttgtttttgctcaatgtaattgctgaacacgcacgcacgccgtggcttcaatcgcgcggcaacctgattttcagtgccagacgcaaggctcaatgatcgatgactttacttgccgtgacttgacgggcaaacttgtgtagcttagtgaatggttgatagcatagaaggcgtcgttcccagcatctcgaacagcctctgttccaattctcaacgattgtacacagatgaaaaaatttggtaaggtgtacaaattcagcttggggaagaggcttcagaatgcaatggagtggctgacaaaggaactgactgcactggtagtgacgagaaacggcttggaccttcggggctagtaatgacacctgtacagatatgggacacagccatacatacacttgtattttaaggtacagcttggtagtttgtgtttaggaaataaaaacgtaaatagatacagacttcttttcggactccggcatttttt

SEQ ID NO: 1621 - DNA, 1629 bp, Zea Mays
gcagctcatgcacgccggcacgaggccaagtcatcgacacgagtacggcaccctggcccaccccacaagccacacatcgccgatccaacgcccgcccgcatcgcgacgaacactgtcagcttccgatccgcgtgttgtcgtccaaagactgcatccctcccccctctccagtctccacccagaacacaagcaggcagcagccgatcggactcggctagtttcgccggccgcctccaactggtcctccgctgggcgcgagggctctttctctaggcccgtagatctgcgctgctgcgccctcgttgtcgtgaaaatcactatccgtctcttggatcgagcgatcctcccattcgcggcttcgccccacacgagtcgttccaaggagccgaaatttccagcccgcccggcaggggcaggcggtacggggattcgggctctgccctgcttttatcagcaactccactggccgctgaggttctgtaggagggcggtgcaccggtggggccaggggagcatgatgagggggcacacgtggctggcgcttctggtcgtggtggtgctcgcgttggcggacgcggcggcggggaggttcgtggtggagaagaacagcatccagaatgcttcttcacaaccaaggcatggaatgcacaaaacgctggagctgctgccgttcttgttgtggatgacaagtcggaacctctaatcacaatggacaacccagaagaaggcaaagagcacctagaaaacatcactattccctcagtgcttataacaaagaaattgggggaaagccttaagaaatccgcggaaaatggcgatatgcttagcgttcttctagactggagagaatcccttccccatccggatgagcgtgtagagtatgagttctggacaaacagtaatgatgaatgtggtcctaaatgtgatatgcaaatggacttcgtgaagagctttagaggaactgcacaaatccttgagaaaaagggttacactcagtttactcctcattatatcacatggtattgtccagaagcttttgtcgatagcaagcaatgcaaatcacagtgcatcaatcatgggagatattgtgcaccagacccagagcaggattttagtcaagggtatgatggaagaaatgttgtggttcaaaatctacatcaaatttgtgtattcaagattgctaatgaaactggaaagccatggctgtggtgggattatgtgcatgatttcgcacttaggtgcccaatgaaggataagaaatacaatcatgactgtgccagcgatgttatcaagtcacttggattggacatcgagaaaataaacaagtgtgttggcgaccctgaagccaatgaggaaaacgtaattttaaaggcagaacaagatgcccaaattggtcatggtaaaaggggagatgtcacaatactaccaacccttgtcatcaacaacaggcaatacagaggtaagctggacaaagttgctgtcctgaaagcgatttgttcaggattcgaggagacaactgagcctgctgtttgtttgagcgaagaggttcaaacaaatgagtgtttggagaacaatgggggttgctggctggacaaagctaataatgttactgcatgcaaggtacaattt

SEQ ID NO: 1622 - DNA, 1149 bp, Zea Mays
gcagctcatgcacgccggcacgaggccaagtcatcgacacgagtacggcaccctggcccaccccacaagccacacatcgccgatccaacgcccgcccgcatcgcgacgaacactgtcagcttccgatccgcgtgttaatgcttcttcacaaccaaggcatggaatgcacaaaacgctggagctgctgccgttcttgttgtggatgacaagtcggaacctctaatcacaatggacaacccagaagaaggcaaagagcacctagaaaacatcactattccctcagtgcttataacaaagaaattgggggaaagccttaagaaatccgcggaaaatggcgatatgcttagcgttcttctagactggagagaatcccttccccatccggatgagcgtgtagagtatgagttctggacaaacagtaatgatgaatgtggtcctaaatgtgatatgcaaatggacttcgtgaagagctttagaggaactgcacaaatccttgagaaaaagggttacactcagtttactcctcattatatcacatggtattgtccagaagcttttgtcgatagcaagcaatgcaaatcacagtgcatcaatcatgggagatattgtgcaccagacccagagcaggattttagtcaagggtatgatggaagaaatgttgtggttcaaaatctacatcaaatttgtgtattcaagattgctaatgaaactggaaagccatggctgtggtgggattatgtgcatgatttcgcacttaggtgcccaatgaaggataagaaatacaatcatgactgtgccagcgatgttatcaagtcacttggattggacatcgagaaaataaacaagtgtgttggcgaccctgaagccaatgaggaaaacgtaattttaaaggcagaacaagatgcccaaattggtcatggtaaaaggggagatgtcacaatactaccaacccttgtcatcaacaacaggcaatacagaggtaagctggacaaagttgctgtcctgaaagcgatttgttcaggattcgaggagacaactgagcctgctgtttgtttgagcgaagaggttcaaacaaatgagtgtttggagaacaatgggggttgctggctggacaaagctaataatgttactgcatgcaaggtacaattt

SEQ ID NO: 1623 - DNA, 1711 bp, Zea Mays
gcagctcatgcacgccggcacgaggccaagtcatcgacacgagtacggcaccctggcccaccccacaagccacacatcgccgatccaacgcccgcccgcatcgcgacgaacactgtcagcttccgatccgcgtgttgtcgtccaaagactgcatccctcccccctctccagtctccacccagaacacaagcaggcagcagccgatcggactcggctagtttcgccggccgcctccaactggtcctccgctgggcgcgagggctctttctctaggcccgtagatctgcgctgctgcgccctcgttgtcgtgaaaatcactatccgtctcttggatcgagcgatcctcccattcgcggcttcgccccacacgagtcgttccaaggagccgaaatttccagcccgcccggcaggggcaggcggtacggggattcgggctctgccctgcttttatcagcaactccactggccgctgaggttcgtggtggagaagaacagcatccaggtgacgtcccccgacgagctcaagggcaagtacgagtgcgccatcggcaacttcggggtgccgcagtacgggggcaccctgcacggattggtcgagtacccaaagtccaaccggaaggcgtgccagagcttcgacatctcgttcaagcccaagcaggccgggggacgacccaccttcgtcctcgtcgaccgcggagaatgcttcttcacaaccaaggcatggaatgcacaaaacgctggagctgctgccgttcttgttgtggatgacaagtcggaacctctaatcacaatggacaacccagaagaaggcaaagagcacctagaaaacatcactattccctcagtgcttataacaaagaaattgggggaaagccttaagaaatccgcggaaaatggcgatatgcttagcgttcttctagactggagagaatcccttccccatccggatgagcgtgtagagtatgagttctggacaaacagtaatgatgaatgtggtcctaaatgtgatatgcaaatggacttcgtgaagagctttagaggaactgcacaaatccttgagaaaaagggttacactcagtttactcctcattatatcacatggtattgtccagaagcttttgtcgatagcaagcaatgcaaatcacagtgcatcaatcatgggagatattgtgcaccagacccagagcaggattttagtcaagggtatgatggaagaaatgttgtggttcaaaatctacatcaaatttgtgtattcaagattgctaatgaaactggaaagccatggctgtggtgggattatgtgcatgatttcgcacttaggtgcccaatgaaggataagaaatacaatcatgactgtgccagcgatgttatcaagtcacttggattggacatcgagaaaataaacaagtgtgttggcgaccctgaagccaatgaggaaaacgtaattttaaaggcagaacaagatgcccaaattggtcatggtaaaaggggagatgtcacaatactaccaacccttgtcatcaacaacaggcaatacagaggtaagctggacaaagttgctgtcctgaaagcgatttgttcaggattcgaggagacaactgagcctgctgtttgtttgagcgaagaggttcaaacaaatgagtgtttggagaacaatgggggttgctggctggacaaagctaataatgttactgcatgcaaggtacaattt

SEQ ID NO: 1624 - DNA, 3796 bp, Zea Mays
ttccactcctcgctctttctccctcgcagcggtccagcctcagcccactctccgttgctccctgcctccctcggtccctcccggctcccactctcgcccctcctcccctctccctgcctgcattcttcaatgaagttttccggcgagtcggcaccggcggcagcgacgtagacgggtgcatcctggctcggcaggaaggaagagagagaaccatttgaagcttcgaggtcgtcacgcacagatttaagtgagcccaaacccgcggagtctcatccgttcatcccaccggttcgttcgtcttcctgcatcagccctgagcgtttaattgcgccgccgcctccttgtccttcgcccaagtctcgccgagcaatgcggcctctcgcgctgctcgttctcgcccacctcgccgccctcgcggcggcggcggaggccaagggcggcgtggcgggggcggggctgggcgacgacgtgctggggctgatcgtgttcaaggccgacgtgtcggaccccgacggccgcctcgcgacgtggagcgaggacgacgagcggccctgcgcctgggacggcgtcacctgcgacgcgcgcaccggccgcgtctccgcgctctccctcgccggcttcggcctctccggcaagctcggccggggcctcctccgcctcgaggcgctccagtcgctctccctcgcccgcaacaacctctccggcgacgtccccgccgacctcgcccgcctcccggcgctccagacgctggacctcagcgccaacgcattcgccggcgccgtcccggaggggctcttcggccggtgccgctccctccgcgacgtctcgctcgccaacaacgccttctccggcggcatcccgcgggacgtcgccgcgtgcgccacgctcgcgtcgctcaacctctcctccaaccgcctggacggcgcgctgcccagcgacatttggtccctcaacgcgctgcgcacgctggacatctcgggcaatgccgtcaccggcgacctcccgatcggtgtcagcaggatgtttaaccttcgggagcttaatctgcgaggcaaccgtctcactggtagcctcccggacgacattggggactgcccgctgctcaggtcagtggatcttgggtccaactcgctgtccggcaacttacctgagtccctgaggaggctctccacctgcacataccttgatttgagctcaaatgagttcactgggagtgtcccgacatggtttggagaaatgacaagcctggaaatgctggatttgtcggggaacaggttgtctggcgagatccctgggtctattggtgagttgatgtcactgagggagctgaggttgtcagggaatgggttcaccggagccttacctgaatcaattggtggatgcaagagcctgatgcatgttgatgtcagctggaattctcttacgggtgcactgcctacctgggttctcagttccagtgtgcaatgggtgtcggtgtcgcagaacacattgagcggggacctaaaagtgcctgcaaatgcttcttcagtgcttcaaggagtggacttgtcaaacaatgccttctctggagttataccatcggaaatctcgaagctgcagaacttgcagtcattgaacatgtcatggaactcaatgtatggaagtattccggccagcattttggagatgaagtcactggaggttcttgattttactgccaaccggctaaatgggtgcattccagcttcaaaaggaggggagtcattgaaggagttgaggctggggaagaacttcctgactggcaacatcccagctcagattggcaattgctctgccctcgcatcactggatctttctcataacagtttaacaggagtgattccggaagcactatctaaccttaccaatctcgagattgtggatctttctcagaacaagcttactggtgttctaccaaagcagctttctaatctcccccacctcttgcaattcaatgtttcacataaccagctctctggggatctccctcccggtagcttctttgacaccatccccctatcttgtgtgtcggataatcctggcctttgtggcgcgaagctcaattcatcttgtcctggtgtgctaccaaaaccaatcgtgctgaacccaaacacttcttccgatccaatatcaccaaccgagcttgtgcctgatggtggtcgccatcataagaaaaccatactcagcatctcggcccttgttgcaattggtgctgctgttctaattgctgttggtgtcattaccatcactgttcttaaccttcgagtgcgtgcccctggatctcattctggtgctgtcctggaactctcagatggatatctcagccagtcgccaacaaccgacatgaacgcagggaagcttgtcatgtttggaggaggaaatccggagttcagtgccagcacccatgctcttctgaacaaggattgcgagcttgggcgtggtggttttggcactgtctacaagaccactcttcgagatggacaacctgttgccatcaagaagctcactgtgtcaagcttggttaaatctcaagttgaatttgagagagaagtgaagatgctgggtaagctacgccatcgcaacctagttgcgctaaagggatattactggacgccgtcgcttcagcttctcatttatgagtttgtctccgggggcaacctgcacaaacaattgcatgagtcatccaccacaaactgcctgccatggaaggagaggtttgacatagtcctcggtatagcgagaagccttgctcatctccacaggcatgatattatccactacaatctgaaatcaagcaacatcctgctcgacggatcaggcgaggcaaaggtaggagattatgggctagcgaagctgcttccaatgctggaccgctacgtcttaagtagcaaggtgcagagcgcgcttggatacatggctccagagtttgcgtgcaggaccgtgaagatcacggagaaatgcgatgtgtacgggttcggcgtccttatcctcgagatcctgacagggaggacgcccgtggagtacatggaggacgacgtggtcgtgctctgcgatgtggtgagggcggctctggacgaaggcaaggtggaagagtgcgtcgacgagaggctctgcggcaagtttccgctggaggaggccgttccgatcatgaagctgggtctggtctgcacttcccaggttccgtctaacaggccagacatgggtgaggtggtgaacatactggagctgatcagatgcccccaggacagcccggagactgaactgggttaacctcctctactacctacactggatcccggactgtttgttggtttcacttttgagatccttctttgcttggtaactgaccggacgatgaaaggtgaagcaagcgagttctactctatccagtgtgccgtcgccgaagtgtctagctagtcttctgatggttagggagttattatggaacgcctacagtagtttggtcgcctcccggggtgttgatgtgtttgacttagatcctcaccagtaaggccaagatgtatggtgtggatcctctcacatcaatcctggtggcctgtaatttcaatttattttttttagctatgcaatgtggtgcaacttgccctttttctagaccatgttatgaaagcttgccacattttggatccttgctgtctaaccacccatttaattaacttggaaatgtgtaccactaaaccgagtactgctgggcggtactcaccatggcaagtgccagtaccagccagtcaagagagtgttgtgtttatatttgtct

SEQ ID NO: 1625 - DNA, 4020 bp, Zea Mays
agcgcaatggcacggacccgattcgctgccgcaccgaaagaaggcgatcgtccccgtggtggctggctcacatgtgatgtgcttgctacggagtgggaagactgtagaatagcatatctacgctagtatatagactctctccggatcgtcagatcccactccactcctaaatccaaagcaaatccgaaagcaccacgaaacacggcggcagcagcctgcgtgcctgcctgcctatccaccccatcctccagcctccgcctccgacacccgcgcgcgccctcgcgcggacaaagccgtgagcggcagagccgagggaggcggggctgcgccggcctcgcaatgcagcagccggggcctgccgatctgccgggctgggccttcccgccacgggcgggaccggcgcctgccgccgcgcgcggggcgcaccaccgccgggccagatctgaggttgccttccgcctgccggacgacctcggcctcggcggcggcgccggccccgatggcgacgccttcgacgagatcggctcggaggacgacctcttctccaccttcatggacatcgagaagatctccacctccgggccctccgaccgcgccgccgagaactcgtctccgccgcgccccaagcaccgccacagcagctccgtcgatggctcgggcttcttcttctcacccggcgccggcggtggcgcggggaaggatgccgccgcgtcgctggctgaggtcttggaggccaagaagtccatgactcccgagcaactggccgagctcgccgccatcgaccccaagcgcgccaagaggtaccgcctcctcgatcgcggcaatccatccacttctttagttacggaggtggcgaggaattgactaaggcgtcgaggacaatcatgtgctcatgctttatgatgggaatggctggagattaataaggtgtttggtttgaggaataagctatctagaataagttgatccatcatcactttattagtcagttagcattaacatgaaaaataatgtcgtcccaccaaattaaatttgaggaatggacttatgacgcaccaacccatcttggatggagtgaacacatccttaaggtgtttggtttaggaatgaggtggtctatttcttctcacttctcacttttttatttggttcgtggaataaaatgggttgatccatcaccacttcattcttcttaagctaataattagtatatacatgaagaatatgttgatttcaccaaaatttaaaggataaactcatgatgcatcatcttattaagcataggggactccacaaaccaaacacgtcgtaaaggaaagacggtcatttactcttactttttcctctgcgggcactgtgtatggatatggggttttggtgtttgttggttggttggttgggagctaaggtggtggtgcgttagcgctttgttggtgggattatgaaagtgtttggtttgatgaatcactctatctaacatgaggtggctcatcatgagcacatttggtgagataaccttatttctcatattaactaactatgaggaatgaggtgatgatggatcaactcattccattctataaactaaacaaaaaagtgagtgagaagatgatggactaccttattcctcgtatcaaacacctcatttgtttccatgagggtgatacttggctttactactcccttttgctcggtgttgggaggttgagcccgttgaccatggttggaaaagggagatcagcgaaaaaggacacatcattttcttatgtgcgaagttgtatttcccggttgttggtttacagatgaagtgctgaggtatgacctagatggctggttttgaggattatatatcttagttctgacacttcagagtgatgtcagacgaatgctttttgttgggcgagacgataagaaaatgaagcacattggactagtgggtcattgcaaatgattaggaaaaaactggttatatggttagtgtaatgcagtaggaaggaacaaccactgaaaactatccaatcaaatcagtgaaaataacaagttctaaccattttacctattgcgtctctattgaaactatgaacgattcctggcggagtggcggtcattggttgaaattttaatagagaaatgtgaataatgttggaaggaattggatttcacatttctaatagccacgtgagtacgtgactgacgtaatcctatcaccaaaaccagatgctttcatctaatcatctttagcacgacagagatctcattagtaacaataatgctatccaaactgagtagctgacaacatgaaacctactgtttatagttcaattctaatgcttcgaaattatgctccatcgtcaccagttttttatctcttctgttcttagacaccgtgcctaccgttttccttgtagtagtaaaagaaaattagaaataacagatacctccttcgttccaaattatggttcactttgactttgttctaagtcgatctcatctaactttgaccaagtttttataaaaatgtggtaacacctatagtttaaaataaatgcactttcaaaacacatctcattgaatttgatgttacatatgttagtgcttttttttctataagcttggtcaaagttagagaaattagactgagtacaatcccaaagcgaactgtaagttgaaacgaagggaatacatgttacaacgcagtgttttgtcaatttttaataaattgtttattggcaggtatgtagaaaacttactcatgaattggattcgtctggtatcttccttcaacgaagccccttctttgcttaaaatctttgtacaaatgtatatgtgttggttgttgtagtatgatccacctgtttagatcgattgttcctttatttcaatgtacaaacaaactagtcaggttgtggctaatggtccatctgggtagggtcaagatctattgtcactagaatcgttttttcaaatatcatcttggtttacattaattttttgtgttaaatttttcatgcagaattctagctaacagacaatcagcagctagatcaaaagaaagaaaggctcgttatatgacagaccttgagcggaaggtccaaactcttcagactgaagccaccaccctgtcagctcaacttacactatttcagagggacacgaccggactttctacagaaaatgcagagcttaagataaggttacaggccatggagcaacaagctcaactccgtgatgctctgaatgatgcactaaagcaggagttggagaggcttaaacatgctactggtgagatgaccaattccagcgaggcatataacatgagattccaacatgttccatacaactcttccttcttcccgctttcccagcaaaatgcatccccacaccttggtagcacccagctgccactgccgttccacccaccccatcccaacgtgccaaaccaccagatggtgtcccaccgaaacactctcccggacataatgcagcaagagtctctcggacggctgcagggtttggacattgggaaggggccactggttgtgaagttagagagcagctcgatctctgcaagtgaaagcagcagcaccttctaacgaggcctacaagtgaaaacccaccgtttcagtaggttccattgttcatagtagcctgacatccttgtgctgcttcctgctctgtaagcccatttgttatttaattcattcaattagttgaaattatacgctgtcgcactggctgatcaatcatgttgtagaatggtccatgaacccttcaattctgtttgttttgggttcgtttcctgtttctgtgactggtatcatcagggcatttgggttttggagtgaaattctctggtggtactttgttgttgttttagctatgttgcttcatggatcctctctttggaacacacatatgtattctcgtgcaatttgttgaggccctgtacattgtgtgctggcaagctatgcgtacaccctaatttatgaaatgttatcgcattgagggattttaatcacc

SEQ ID NO: 1626 - DNA, 1642 bp, Zea Mays
actccactcctaaatccaaagcaaatccgaaagcaccacgaaacacggcggcagcagcctgcgtgcctgcctgcctatccaccccatcctccagcctccgcctccgacacccgcgcgcgccctcgcgcggacaaagccgtgagcggcagagccgagggaggcggggctgcgccggcctcgcaatgcagcagccggggcctgccgatctgccgggctgggccttcccgccacgggcgggaccggcgcctgccgccgcgcgcggggcgcaccaccgccgggccagatctgaggttgccttccgcctgccggacgacctcggcctcggcggcggcgccggccccgatggcgacgccttcgacgagatcggctcggaggacgacctcttctccaccttcatggacatcgagaagatctccacctccgggccctccgaccgcgccgccgagaactcgtctccgccgcgccccaagcaccgccacagcagctccgtcgatggctcgggcttcttcttctcacccggcgccggcggtggcgcggggaaggatgccgccgcgtcgctggctgaggtcttggaggccaagaagtccatgactcccgagcaactggccgagctcgccgccatcgaccccaagcgcgccaagagctaacagacaatcagcagctagatcaaaagaaagaaaggctcgttatatgacagaccttgagcggaaggtccaaactcttcagactgaagccaccaccctgtcagctcaacttacactatttcagagggacacgaccggactttctacagaaaatgcagagcttaagataaggttacaggccatggagcaacaagctcaactccgtgatgctctgaatgatgcactaaagcaggagttggagaggcttaaacatgctactggtgagatgaccaattccagcgaggcatataacatgagattccaacatgttccatacaactcttccttcttcccgctttcccagcaaaatgcatccccacaccttggtagcacccagctgccactgccgttccacccaccccatcccaacgtgccaaaccaccagatggtgtcccaccgaaacactctcccggacataatgcagcaagagtctctcggacggctgcagggtttggacattgggaaggggccactggttgtgaagttagagagcagctcgatctctgcaagtgaaagcagcagcaccttctaacgaggcctacaagtgaaaacccaccgtttcagtaggttccattgttcatagtagcctgacatccttgtgctgcttcctgctctgtaagcccatttgttatttaattcattcaattagttgaaattatacgctgtcgcactggctgatcaatcatgttgtagaatggtccatgaacccttcaattctgtttgttttgggttcgtttcctgtttctgtgactggtatcatcagggcatttgggttttggagtgaaattctctggtggtactttgttgttgttttagctatgttgcttcatggatcctctctttggaacacacatatgtattctcgtgcaatttgttgaggccctgtacattgtgtgctggcaagctatgcgtacaccctaatttatgaaatgttatcgcattgagggattttaatcacc

SEQ ID NO: 1627 - DNA, 1162 bp, Zea Mays
gtcaaagttagagaaattagactgagtacaatcccaaagcgaactgtaagttgaaacgaagggaatacatgttacaacgcagtgttttgtcaatttttaataaattgtttattggcaggtatgtagaaaacttactcatgaattggattcgtctgaattctagctaacagacaatcagcagctagatcaaaagaaagaaaggctcgttatatgacagaccttgagcggaaggtccaaactcttcagactgaagccaccaccctgtcagctcaacttacactatttcagagggacacgaccggactttctacagaaaatgcagagcttaagataaggttacaggccatggagcaacaagctcaactccgtgatgctctgaatgatgcactaaagcaggagttggagaggcttaaacatgctactggtgagatgaccaattccagcgaggcatataacatgagattccaacatgttccatacaactcttccttcttcccgctttcccagcaaaatgcatccccacaccttggtagcacccagctgccactgccgttccacccaccccatcccaacgtgccaaaccaccagatggtgtcccaccgaaacactctcccggacataatgcagcaagagtctctcggacggctgcagggtttggacattgggaaggggccactggttgtgaagttagagagcagctcgatctctgcaagtgaaagcagcagcaccttctaacgaggcctacaagtgaaaacccaccgtttcagtaggttccattgttcatagtagcctgacatccttgtgctgcttcctgctctgtaagcccatttgttatttaattcattcaattagttgaaattatacgctgtcgcactggctgatcaatcatgttgtagaatggtccatgaacccttcaattctgtttgttttgggttcgtttcctgtttctgtgactggtatcatcagggcatttgggttttggagtgaaattctctggtggtactttgttgttgttttagctatgttgcttcatggatcctctctttggaacacacatatgtattctcgtgcaatttgttgaggccctgtacattgtgtgctggcaagctatgcgtacaccctaatttatgaaatgttatcgcattgagggattttaatcacc

SEQ ID NO: 1628 - DNA, 1165 bp, Zea Mays
aacatgccagggcaaaacgcggacccgtgctgtgcgttccacccaatgtcgcgtgcggccactagatttttcctgacgcggtgtctgctcccacttcccctcctctcccccaggtggcggcagcggcggcggggtagcatttgtgctacgagggcttttgcaatggcggcttcggggttcggcggcggcgaggcgttccggctctcggccgcgccgggggccggcttactgaagctgcacaagggcgacatcaccctctggtccgtcgactgcgccaccgacgccatcgttaatgctgctaatgagcgaatgttaggtggcggaggtgttgatggagctatacatcaagctgctggaccagagctagtgcaagcatgccggaaagttccagaggtcaaaccaggagtccgttgtcctactggagaagctaggattactcctgcttttgagcttcctgcctctcgggtgattcacactgttggccctatatatgatttggacaagcatcctgaggtgtcattaaagaaggcctatgaaaatagcttgaagcttgctaaggataatggcattcagtacatcgcattccctgctatatcttgtggtgtttatcgttatcctcccaaggaagcatcaaaaatagctgtttctaccgcacaaaaattttcagaggatatcaaagaggtgcattttgttctgttctcggacgacctttacaatatatggcgcgagactgcccagcagttgctatcacagtttgagaaatgaatggtccataggccataggcagtttgcctggtgtaataaaaatgggtgtatcagacaacgtttaaatcttgatgaaaccgtgtattgcacctgtggtataatgctgaatgagtaaagtttggcgataccgagcagttgcaatactacctatcagcatgcctccggtatttgttgtgcaatgcaggtactgtgaccagtccaacggttcctgtcatgcacacccattgtaatgtttaggatgatgttgcttgagactccttcaggtttcgcaaccttggatgttgctgcgcgatcgcttctttatcctgaggggtcgggatatgggcatggttaactaatccagaagatggccgtgatgtcgtcattagcattggttttatgacagatctgttgcgtgtat

SEQ ID NO: 1629 - DNA, 1163 bp, Zea Mays
aacatgccagggcaaaacgcggacccgtgctgtgcgttccacccaatgtcgcgtgcggccactagatttttcctgacgcggtgtctgctcccacttcccctcctctcccccaggtggcggcagcggcggcggggtagcatttgtgctacgagggcttttgcaatggcggcttcggggttcggcggcggcgaggcgttccggctctcggccgcgccgggggccggcttactgaagctgcacaagggcgacatcaccctctggtccgtcgactgcgccaccgacgccatcgttaatgctgctaatgagcgaatgttaggtggcggaggtgttgatggagctatacatcaagctgctggaccagagctagtgcaagcatgccggaaagttccagaggtcaaaccaggagtccgttgtcctactggagaagctaggattactcctgcttttgagcttcctgcctctcgggtgattcacactgttggccctatatatgatttggacaagcatcctgaggtgtcattaaagaaggcctatgaaaatagcttgaagcttgctaaggataatggcattcagtacatcgcattccctgctatatcttgtggtgtttatcgttatcctcccaaggaagcatcaaaaatagctgtttctaccgcacaaaaattttcagaggatatcaaagagttgctatcacagtttgagaaatgaatggtccataggcagtttgctagcactagcagttgcccagcagtcgttgtctagtgttgagatgtgagcgccataggcagtttgcctggtgtaataaaaatgggtgtatcagacaacgtttaaatcttgatgaaaccgtgtattgcacctgtggtataatgctgaatgagtaaagtttggcgataccgagcagttgcaatactacctatcagcatgcctccggtatttgttgtgcaatgcaggtactgtgaccagtccaacggttcctgtcatgcacacccattgtaatgtttaggatgatgttgcttgagactccttcaggtttcgcaaccttggatgttgctgcgcgatcgcttctttatcctgaggggtcgggatatgggcatggttaactaatccagaagatggccgtgatgtcgtcattagcattggttttatgacagatctgttgcgtgtat

SEQ ID NO: 1630 - DNA, 1146 bp, Zea Mays
aacatgccagggcaaaacgcggacccgtgctgtgcgttccacccaatgtcgcgtgcggccactagatttttcctgacgcggtgtctgctcccacttcccctcctctcccccaggtggcggcagcggcggcggggtagcatttgtgctacgagggcttttgcaatggcggcttcggggttcggcggcggcgaggcgttccggctctcggccgcgccgggggccggcttactgaagctgcacaagggcgacatcaccctctggtccgtcgactgcgccaccgacgccatcgttaatgctgctaatgagcgaatgttaggtggcggaggtgttgatggagctgctggaccagagctagtgcaagcatgccggaaagttccagaggtcaaaccaggagtccgttgtcctactggagaagctaggattactcctgcttttgagcttcctgcctctcgggtgattcacactgttggccctatatatgatttggacaagcatcctgaggtgtcattaaagaaggcctatgaaaatagcttgaagcttgctaaggataatggcattcagtacatcgcattccctgctatatcttgtggtgtttatcgttatcctcccaaggaagcatcaaaaatagctgtttctaccgcacaaaaattttcagaggatatcaaagaggtgcattttgttctgttctcggacgacctttacaatatatggcgcgagactgcccagcagttgctatcacagtttgagaaatgaatggtccataggcagtttgcctggtgtaataaaaatgggtgtatcagacaacgtttaaatcttgatgaaaccgtgtattgcacctgtggtataatgctgaatgagtaaagtttggcgataccgagcagttgcaatactacctatcagcatgcctccggtatttgttgtgcaatgcaggtactgtgaccagtccaacggttcctgtcatgcacacccattgtaatgtttaggatgatgttgcttgagactccttcaggtttcgcaaccttggatgttgctgcgcgatcgcttctttatcctgaggggtcgggatatgggcatggttaactaatccagaagatggccgtgatgtcgtcattagcattggttttatgacagatctgttgcgtgtat

SEQ ID NO: 1631 - DNA, 4146 bp, Zea Mays
ctcagactcacacacacacttataaaatcccagatccagatagggacggccgtcaggcccagggacgaaccctgccccaccaccaccgcctccgcctcgtcgtcgtggggcgctggcgacgcgtttgttttgttcatcacacgcccgcgggtttcctgtttcttctcttcccccggccgcgcgcgtccgacgcggggcagcgagccagcgaccactctcgcctgcctgcctacctacccatcccacacccgcctggggaaaatcaaagcgccgccctcgcacgcactcgcgctccccactcccctcacctcactcctcgtaacggctcggcaaaacccccagcacgcggtcgacgagacgagagccgagaaacagtccactcctcactcccgttccgtttcgtttccccagttccgcatggccgccgcgaggtagcggcgcaggcgctcaccggggatggcggccggagggaggggcaagctggcgccggcggaagtggcgcccgcggcgtttccctcgcggggcttggcggtggcgggggccgcggcgggcgaggtggtgcggcgcgtgaggcccacggaggcctccgagcgccgccgcgcggaggtcgtcgactacgcgcggaggctcgtcggctcagcgctcggatgcgaggtttttgcatttggatcagttccactaaagacttaccttcctgatggggatattgatctaactgtccttggaaatacatcttatgatagtactttggttaatgatgttttctgcattcttgagtctgaggagcagaatagtgatgctgaatttgtagtgaaggacttggaacgaattgatgccgaggtcaggctcattaaatgcactattggaaatattatagttgatatctcattcaaccaaactggtgggatctgcgcactctgcttccttgagctggttgatcggaaagttggaaaaaaccatctatttaaaaggagcatcatattgatcaaggcatggtgctattatgaaagccgcctactaggagctcatcatggacttatatcaacctatgcactggaagtacttatcctttatgtattcaatctattccacaaatctctccacagccctgtggaggttctttataggtttctggaatattttagcaagtttgactgggacaactattgcataagtttaaatggccctgttgctttgtcgtctttgccaaacttaattgttgaagctacagttacacataccagtgacttattgtttgacaaagaattcctcaagagctccatggataaagcaactgtacctccaaaaaattccgattcatgctatccgaggtttcgtcctaaacatctaaacatagttgatccactgaaggagtacaacaatcttggcagaagtgtcaacagaggtttgaatttgatctaaccaagatatacatataactcttttctaagttttcctatacaatattttgctgctgcttgtactcataattgcatcccaatttattaagtcttgctgctgcttgtactcataattgcataaacccatatgtgtagctagctagcattgggtttgcctggcctcatctgcttaatttaataaggtgattttgtgcagctagctttaatcgcattcgaacagctttcttatatggtgctcgaaagcttggtcatattgtcacgttaccatcagaagttattcctgatgaaatttatgagtttttcaaaaacactttgggaaggaatgaactaggggcaagaccagatattgacagcaattatgcttttcattcttcctttggtactgctgagactattttggaagatatatcaagtatgaagatttccgatggtgaagatgagaacataacctgtcatctttcaaagagcttgggtgataaaaacttatacgttggaatgaatggacatacacatttgagtaattattttccaggagtccgtaacactgcattaagtactggtttaagtacaagagcatcccattttgttcataatgcaccaaaactacattcatcgttttgccatgataacagtcacggtgacagtgaaaaatgttacttgaaccatggaatggagcaggtatctcactacactgctaaagccttctgtatagatgataagacaacaatacagtcacaagtttttgtgagcaacccatcactattgagcacctctgctgctgtcactgcttcagaacttgccaccaaacagaaaaaatggagtactgcctatgtggagaaacaacatttttctccctcaccatcaagcttgccagatctttcaggggatctggattcacaatttagatgtttgcgtcaagttcagtaccacctcgaatacttgtttgatgggtttttgcagtcagttcagggagcatcttctgctgataagtttcacaaggacccctttcacatttctgcttgcagtatcttgttggacagagatacaggatcgccaaggttgcagttgctttcacctgctcgaagcaatggaagggatccatctcccgtttcttgtagtcagagcacagaatgtgtctctcagcattcacagaatggaagcccatgggatatggcttctcaacggagtgtctctgtgccctctggaatcgatattccaccaaatggagtctcaccgtgttcttcttgtgctgattctgaggtttcttctgtttcatggtttcatggctctggggatagcgctatgatgcatggaagtggaaaagacacatactttacaagaaagagctgttatactcgctgggagcgattggcatcttcaagaaagaatgggaaaatactgccaaatcaatcagtgaaatataaaagcaaccagaagtcagctccaggagcaagatttgtgtctcacaaggagcaggccgcaatagacagtagaaccaaagaaataacaatcgatcaagctttgaagatacatgaatacattgaatcagacatgaaaattgttgaaaaactcagttgtcataatcaaaaggaagtccgtcatgacaatgaagcaagacaattaccaaataacaaccaggatgtttgcttgaataagaactttttgcaaaaccgatatcatgtggagtctacacgagctcccagagcaacacatcagattcctaaatatcaaccgtttaaaattcaaaatactacagagtgtgatagagctagcctaagtaagaacatgcccagaaagcacagctgtggcacttggaaagagtatgagatacttgaccggccaacaaagcagagaccaatttgtggcccattgaagctagaaaacagacatgtctgggattgcacaaagaagatatcagctggaaaccagaagtgtaataatcataaggattacctatctttcgtaagaggtgcagtgccacgcagccacgcagcaagcactccaaatggtttagaaaaggaggcggctaattcaaataaatccgctgacaacggaagtcccgtaaggccaatcttgccagagttattgctttcttgtcatgacatcaatagccaagagaggtccccatcatctagtgctcatcaatcatacttccctgctgcaaatgatcgaccactggagactatagagtttggatctttgggaccttttgcactgcctttatcctcattgaagtcaaatggaactactaacacagaagctacaagtaaggtgtttacagatgcctctccatttgtgttacagaggtccagggccgccgcaactgaaaacagaccaccaggactttgcaaagtgggagacgaggacgaatttccacctcttagagctgggatccgagtttttttgggcgcctcatagaaatgaggattattgcagtggcatagtacagcctaccgtgtaaaatgtcgtcggccccttatcaatctctctctttttcccgtagttgtcactagagttacaccgaacaaggtttatacagctaatgttcactagtataacttagcaaggagaaagatcagatacaaaaaaaaacggagtacttacgtttaccttatcagtctctctgtttcaggtcttcttgcctttgctttgcttcattgcagtatatatagatagatgatgaaaaatcggaaaagcacacgtcatcagctgtcatgaaatgcct

SEQ ID NO: 1632 - DNA, 4106 bp, Zea Mays
acgaaccctgccccaccaccaccgcctccgcctcgtcgtcgtggggcgctggcgacgcgtttgttttgttcatcacacgcccgcgggtttcctgtttcttctcttcccccggccgcgcgcgtccgacgcggggcagcgagccagcgaccactctcgcctgcctgcctacctacccatcccacacccgcctggggaaaatcaaagcgccgccctcgcacgcactcgcgctccccactcccctcacctcactcctcgtaacggctcggcaaaacccccagcacgcggtcgacgagacgagagccgagaaacagtccactcctcactcccgttccgtttcgtttccccagttccgcatggccgccgcgaggtagcggcgcaggcgctcaccggggatggcggccggagggaggggcaagctggcgccggcggaagtggcgcccgcggcgtttccctcgcggggcttggcggtggcgggggccgcggcgggcgaggtggtgcggcgcgtgaggcccacggaggcctccgagcgccgccgcgcggaggtcgtcgactacgcgcggaggctcgtcggctcagcgctcggatgcgaggtttttgcatttggatcagttccactaaagacttaccttcctgatggggatattgatctaactgtccttggaaatacatcttatgatagtactttggttaatgatgttttctgcattcttgagtctgaggagcagaatagtgatgctgaatttgtagtgaaggacttggaacgaattgatgccgaggtcaggctcattaaatgcactattggaaatattatagttgatatctcattcaaccaaactggtgggatctgcgcactctgcttccttgagctggttgatcggaaagttggaaaaaaccatctatttaaaaggagcatcatattgatcaaggcatggtgctattatgaaagccgcctactaggagctcatcatggacttatatcaacctatgcactggaagttctttataggtttctggaatattttagcaagtttgactgggacaactattgcataagtttaaatggccctgttgctttgtcgtctttgccaaacttaattgttgaagctacagttacacataccagtgacttattgtttgacaaagaattcctcaagagctccatggataaagcaactgtacctccaaaaaattccgattcatgctatccgaggtttcgtcctaaacatctaaacatagttgatccactgaaggagtacaacaatcttggcagaagtgtcaacagaggtttgaatttgatctaaccaagatatacatataactcttttctaagttttcctatacaatattttgctgctgcttgtactcataattgcatcccaatttattaagtcttgctgctgcttgtactcataattgcataaacccatatgtgtagctagctagcattgggtttgcctggcctcatctgcttaatttaataaggtgattttgtgcagctagctttaatcgcattcgaacagctttcttatatggtgctcgaaagcttggtcatattgtcacgttaccatcagaagttattcctgatgaaatttatgagtttttcaaaaacactttgggaaggaatgaactaggggcaagaccagatattgacagcaattatgcttttcattcttcctttggtactgctgagactattttggaagatatatcaagtatgaagatttccgatggtgaagatgagaacataacctgtcatctttcaaagagcttgggtgataaaaacttatacgttggaatgaatggacatacacatttgagtaattattttccaggagtccgtaacactgcattaagtactggtttaagtacaagagcatcccattttgttcataatgcaccaaaactacattcatcgttttgccatgataacagtcacggtgacagtgaaaaatgttacttgaaccatggaatggagcaggtatctcactacactgctaaagccttctgtatagatgataagacaacaatacagtcacaagtttttgtgagcaacccatcactattgagcacctctgctgctgtcactgcttcagaacttgccaccaaacagaaaaaatggagtactgcctatgtggagaaacaacatttttctccctcaccatcaagcttgccagatctttcaggggatctggattcacaatttagatgtttgcgtcaagttcagtaccacctcgaatacttgtttgatgggtttttgcagtcagttcagggagcatcttctgctgataagtttcacaaggacccctttcacatttctgcttgcagtatcttgttggacagagatacaggatcgccaaggttgcagttgctttcacctgctcgaagcaatggaagggatccatctcccgtttcttgtagtcagagcacagaatgtgtctctcagcattcacagaatggaagcccatgggatatggcttctcaacggagtgtctctgtgccctctggaatcgatattccaccaaatggagtctcaccgtgttcttcttgtgctgattctgaggtttcttctgtttcatggtttcatggctctggggatagcgctatgatgcatggaagtggaaaagacacatactttacaagaaagagctgttatactcgctgggagcgattggcatcttcaagaaagaatgggaaaatactgccaaatcaatcagtgaaatataaaagcaaccagaagtcagctccaggagcaagatttgtgtctcacaaggagcaggccgcaatagacagtagaaccaaagaaataacaatcgatcaagctttgaagatacatgaatacattgaatcagacatgaaaattgttgaaaaactcagttgtcataatcaaaaggaagtccgtcatgacaatgaagcaagacaattaccaaataacaaccaggatgtttgcttgaataagaactttttgcaaaaccgatatcatgtggagtctacacgagctcccagagcaacacatcagattcctaaatatcaaccgtttaaaattcaaaatactacagagtgtgatagagctagcctaagtaagaacatgcccagaaagcacagctgtggcacttggaaagagtatgagatacttgaccggccaacaaagcagagaccaatttgtggcccattgaagctagaaaacagacatgtctgggattgcacaaagaagatatcagctggaaaccagaagtgtaataatcataaggattacctatctttcgtaagaggtgcagtgccacgcagccacgcagcaagcactccaaatggtttagaaaaggaggcggctaattcaaataaatccgctgacaacggaagtcccgtaaggccaatcttgccagagttattgctttcttgtcatgacatcaatagccaagagaggtccccatcatctagtgctcatcaatcatacttccctgctgcaaatgatcgaccactggagactatagagtttggatctttgggaccttttgcactgcctttatcctcattgaagtcaaatggaactactaacacagaagctacaagtaaggtgtttacagatgcctctccatttgtgttacagaggtccagggccgccgcaactgaaaacagaccaccaggactttgcaaagtgggagacgaggacgaatttccacctcttagagctgggatccggtgagaacttacgtgtaggtcttacggatacaactgatcatagagttagcaaaaggagctgaccagttgagctttgtgcagagtttttttgggcgcctcatagaaatgaggattattgcagtggcatagtacagcctaccgtgtaaaatgtcgtcggccccttatcaatctctctctttttcccgtagttgtcactagagttacaccgaacaaggtttatacagctaatgttcactagtataacttagcaaggagaaagatcagatacaaaaaaaaacggagtacttacgtttaccttatcagtctctctgtttcaggtcttcttgcctttgctttgcttcattgcagtatatatagatagatgatgaaaaatcggaaaagcacacgtcatcagctgtcatgaaatgcct

SEQ ID NO: 1633 - DNA, 3843 bp, Zea Mays
gaaccctgccccaccaccaccgcctccgcctcgtcgtcgtggggcgctggcgacgcgtttgttttgttcatcacacgcccgcgggtttcctgtttcttctcttcccccggccgcgcgcgtccgacgcggggcagcgagccagcgaccactctcgcctgcctgcctacctacccatcccacacccgcctggggaaaatcaaagcgccgccctcgcacgcactcgcgctccccactcccctcacctcactcctcgtaacggctcggcaaaacccccagcacgcggtcgacgagacgagagccgagaaacagtccactcctcactcccgttccgtttcgtttccccagttccgcatggccgccgcgaggtagcggcgcaggcgctcaccggggatggcggccggagggaggggcaagctggcgccggcggaagtggcgcccgcggcgtttccctcgcggggcttggcggtggcgggggccgcggcgggcgaggtggtgcggcgcgtgaggcccacggaggcctccgagcgccgccgcgcggaggtcgtcgactacgcgcggaggctcgtcggctcagcgctcggatgcgaggtttttgcatttggatcagttccactaaagacttaccttcctgatggggatattgatctaactgtccttggaaatacatcttatgatagtactttggttaatgatgttttctgcattcttgagtctgaggagcagaatagtgatgctgaatttgtagtgaaggacttggaacgaattgatgccgaggtcaggctcattaaatgcactattggaaatattatagttgatatctcattcaaccaaactggtgggatctgcgcactctgcttccttgagctggttgatcggaaagttggaaaaaaccatctatttaaaaggagcatcatattgatcaaggcatggtgctattatgaaagccgcctactaggagctcatcatggacttatatcaacctatgcactggaagtacttatcctttatgtattcaatctattccacaaatctctccacagccctgtggaggtatgtcttaaaagatttacttatttcagatatattttctcattatataatagaaaagctcatgtcttgccgtttccctgtgtttttattaataggttctttataggtttctggaatattttagcaagtttgactgggacaactattgcataagtttaaatggccctgttgctttgtcgtctttgccaaacttaattgttgaagctacagttacacataccagtgacttattgtttgacaaagaattcctcaagagctccatggataaagcaactgtacctccaaaaaattccgattcatgctatccgaggtttcgtcctaaacatctaaacatagttgatccactgaaggagtacaacaatcttggcagaagtgtcaacagagctagctttaatcgcattcgaacagctttcttatatggtgctcgaaagcttggtcatattgtcacgttaccatcagaagttattcctgatgaaatttatgagtttttcaaaaacactttgggaaggaatgaactaggggcaagaccagatattgacagcaattatgcttttcattcttcctttggtactgctgagactattttggaagatatatcaagtatgaagatttccgatggtgaagatgagaacataacctgtcatctttcaaagagcttgggtgataaaaacttatacgttggaatgaatggacatacacatttgagtaattattttccaggagtccgtaacactgcattaagtactggtttaagtacaagagcatcccattttgttcataatgcaccaaaactacattcatcgttttgccatgataacagtcacggtgacagtgaaaaatgttacttgaaccatggaatggagcaggtatctcactacactgctaaagccttctgtatagatgataagacaacaatacagtcacaagtttttgtgagcaacccatcactattgagcacctctgctgctgtcactgcttcagaacttgccaccaaacagaaaaaatggagtactgcctatgtggagaaacaacatttttctccctcaccatcaagcttgccagatctttcaggggatctggattcacaatttagatgtttgcgtcaagttcagtaccacctcgaatacttgtttgatgggtttttgcagtcagttcagggagcatcttctgctgataagtttcacaaggacccctttcacatttctgcttgcagtatcttgttggacagagatacaggatcgccaaggttgcagttgctttcacctgctcgaagcaatggaagggatccatctcccgtttcttgtagtcagagcacagaatgtgtctctcagcattcacagaatggaagcccatgggatatggcttctcaacggagtgtctctgtgccctctggaatcgatattccaccaaatggagtctcaccgtgttcttcttgtgctgattctgaggtttcttctgtttcatggtttcatggctctggggatagcgctatgatgcatggaagtggaaaagacacatactttacaagaaagagctgttatactcgctgggagcgattggcatcttcaagaaagaatgggaaaatactgccaaatcaatcagtgaaatataaaagcaaccagaagtcagctccaggagcaagatttgtgtctcacaaggagcaggccgcaatagacagtagaaccaaagaaataacaatcgatcaagctttgaagatacatgaatacattgaatcagacatgaaaattgttgaaaaactcagttgtcataatcaaaaggaagtccgtcatgacaatgaagcaagacaattaccaaataacaaccaggatgtttgcttgaataagaactttttgcaaaaccgatatcatgtggagtctacacgagctcccagagcaacacatcagattcctaaatatcaaccgtttaaaattcaaaatactacagagtgtgatagagctagcctaagtaagaacatgcccagaaagcacagctgtggcacttggaaagagtatgagatacttgaccggccaacaaagcagagaccaatttgtggcccattgaagctagaaaacagacatgtctgggattgcacaaagaagatatcagctggaaaccagaagtgtaataatcataaggattacctatctttcgtaagaggtgcagtgccacgcagccacgcagcaagcactccaaatggtttagaaaaggaggcggctaattcaaataaatccgctgacaacggaagtcccgtaaggccaatcttgccagagttattgctttcttgtcatgacatcaatagccaagagaggtccccatcatctagtgctcatcaatcatacttccctgctgcaaatgatcgaccactggagactatagagtttggatctttgggaccttttgcactgcctttatcctcattgaagtcaaatggaactactaacacagaagctacaagtaaggtgtttacagatgcctctccatttgtgttacagaggtccagggccgccgcaactgaaaacagtgctggaggctgatgggtctgaggaaagaacaatcatcgaggtaataccttctcccatggagaggctgcttcaaacctgcaaccgaagacctgcccttgtttaggcataaaattcaataagtatgattggtgtagtatatggggattagggactgtcacagaagaccgatacgtgtgtctggcatccagatttgttgttatgtgatagtgattccatgcacttttacgctacatacaatggctacaattctgtccttatatgaagcatcccg

SEQ ID NO: 1634 - DNA, 3916 bp, Zea Mays
cgcggggcagcgagccagcgaccactctcgcctgcctgcctacctacccatcccacacccgcctggggaaaatcaaagcgccgccctcgcacgcactcgcgctccccactcccctcacctcactcctcgtaacggctcggcaaaacccccagcacgcggtcgacgagacgagagccgagaaacagtccactcctcactcccgttccgtttcgtttccccagttccgcatggccgccgcgaggtagcggcgcaggcgctcaccggggatggcggccggagggaggggcaagctggcgccggcggaagtggcgcccgcggcgtttccctcgcggggcttggcggtggcgggggccgcggcgggcgaggtggtgcggcgcgtgaggcccacggaggcctccgagcgccgccgcgcggaggtcgtcgactacgcgcggaggctcgtcggctcagcgctcggatgcgaggtttttgcatttggatcagttccactaaagacttaccttcctgatggggatattgatctaactgtccttggaaatacatcttatgatagtactttggttaatgatgttttctgcattcttgagtctgaggagcagaatagtgatgctgaatttgtagtgaaggacttggaacgaattgatgccgaggtcaggctcattaaatgcactattggaaatattatagttgatatctcattcaaccaaactggtgggatctgcgcactctgcttccttgagctggttgatcggaaagttggaaaaaaccatctatttaaaaggagcatcatattgatcaaggcatggtgctattatgaaagccgcctactaggagctcatcatggacttatatcaacctatgcactggaagtacttatcctttatgtattcaatctattccacaaatctctccacagccctgtggaggtatgtcttaaaagatttacttatttcagatatattttctcattatataatagaaaagctcatgtcttgccgtttccctgtgtttttattaataggttctttataggtttctggaatattttagcaagtttgactgggacaactattgcataagtttaaatggccctgttgctttgtcgtctttgccaaacttaattgttgaagctacagttacacataccagtgacttattgtttgacaaagaattcctcaagagctccatggataaagcaactgtacctccaaaaaattccgattcatgctatccgaggtttcgtcctaaacatctaaacatagttgatccactgaaggagtacaacaatcttggcagaagtgtcaacagagctttaatcgcattcgaacagctttcttatatggtgctcgaaagcttggtcatattgtcacgttaccatcagaagttattcctgatgaaatttatgagtttttcaaaaacactttgggaaggaatgaactaggggcaagaccagatattgacagcaattatgcttttcattcttcctttggtactgctgagactattttggaagatatatcaagtatgaagatttccgatggtgaagatgagaacataacctgtcatctttcaaagagcttgggtgataaaaacttatacgttggaatgaatggacatacacatttgagtaattattttccaggagtccgtaacactgcattaagtactggtttaagtacaagagcatcccattttgttcataatgcaccaaaactacattcatcgttttgccatgataacagtcacggtgacagtgaaaaatgttacttgaaccatggaatggagcaggtatctcactacactgctaaagccttctgtatagatgataagacaacaatacagtcacaagtttttgtgagcaacccatcactattgagcacctctgctgctgtcactgcttcagaacttgccaccaaacagaaaaaatggagtactgcctatgtggagaaacaacatttttctccctcaccatcaagcttgccagatctttcaggggatctggattcacaatttagatgtttgcgtcaagttcagtaccacctcgaatacttgtttgatgggtttttgcagtcagttcagggagcatcttctgctgataagtttcacaaggacccctttcacatttctgcttgcagtatcttgttggacagagatacaggatcgccaaggttgcagttgctttcacctgctcgaagcaatggaagggatccatctcccgtttcttgtagtcagagcacagaatgtgtctctcagcattcacagaatggaagcccatgggatatggcttctcaacggagtgtctctgtgccctctggaatcgatattccaccaaatggagtctcaccgtgttcttcttgtgctgattctgaggtttcttctgtttcatggtttcatggctctggggatagcgctatgatgcatggaagtggaaaagacacatactttacaagaaagagctgttatactcgctgggagcgattggcatcttcaagaaagaatgggaaaatactgccaaatcaatcagtgaaatataaaagcaaccagaagtcagctccaggagcaagatttgtgtctcacaaggagcaggccgcaatagacagtagaaccaaagaaataacaatcgatcaagctttgaagatacatgaatacattgaatcagacatgaaaattgttgaaaaactcagttgtcataatcaaaaggaagtccgtcatgacaatgaagcaagacaattaccaaataacaaccaggatgtttgcttgaataagaactttttgcaaaaccgatatcatgtggagtctacacgagctcccagagcaacacatcagattcctaaatatcaaccgtttaaaattcaaaatactacagagtgtgatagagctagcctaagtaagaacatgcccagaaagcacagctgtggcacttggaaagagtatgagatacttgaccggccaacaaagcagagaccaatttgtggcccattgaagctagaaaacagacatgtctgggattgcacaaagaagatatcagctggaaaccagaagtgtaataatcataaggattacctatctttcgtaagaggtgcagtgccacgcagccacgcagcaagcactccaaatggtttagaaaaggaggcggctaattcaaataaatccgctgacaacggaagtcccgtaaggccaatcttgccagagttattgctttcttgtcatgacatcaatagccaagagaggtccccatcatctagtgctcatcaatcatacttccctgctgcaaatgatcgaccactggagactatagagtttggatctttgggaccttttgcactgcctttatcctcattgaagtcaaatggaactactaacacagaagctacaagtaaggtgtttacagatgcctctccatttgtgttacagaggtccagggccgccgcaactgaaaacagaccaccaggactttgcaaagtgggagacgaggacgaatttccacctcttagagctgggatccggtgagaacttacgtgtaggtcttacggatacaactgatcatagagttagcaaaaggagctgaccagttgagctttgtgcagagtttttttgggcgcctcatagaaatgaggattattgcagtggcatagtacagcctaccgtgtaaaatgtcgtcggccccttatcaatctctctctttttcccgtagttgtcactagagttacaccgaacaaggtttatacagctaatgttcactagtataacttagcaaggagaaagatcagatacaaaaaaaaacggagtacttacgtttaccttatcagtctctctgtttcaggtcttcttgcctttgctttgcttcattgcagtatatatagatagatgatgaaaaatcggaaaagcacacgtcatcagctgtcatgaaatgcct

SEQ ID NO: 1635 - DNA, 4092 bp, Zea Mays
aacagtccactcctcactcccgttccgtttcgtttccccagttccgcatggccgccgcgaggtagcggcgcaggcgctcaccggggatggcggccggagggaggggcaagctggcgccggcggaagtggcgcccgcggcgtttccctcgcggggcttggcggtggcgggggccgcggcgggcgaggtggtgcggcgcgtgaggcccacggaggcctccgagcgccgccgcgcggaggtcgtcgactacgcgcggaggctcgtcggctcagcgctcggatgcgaggtttttgcatttggatcagttccactaaagacttaccttcctgatggggatattgatctaactgtccttggaaatacatcttatgatagtactttggttaatgatgttttctgcattcttgagtctgaggagcagaatagtgatgctgaatttgtagtgaaggacttggaacgaattgatgccgaggtttattctcctatatacacatcctataccttcctagtgattcgttttggatggttgtttaggcaatctatgatattgtaatccgagttcttacttggcattttcattctgctcgcatgatagttaaactgaaagctatctgtccctcatctttctctttgacatgttattcttattgtttttcacacccatctaattatctgaaattcatgtccatccaggtcaggctcattaaatgcactattggaaatattatagttgatatctcattcaaccaaactggtgggatctgcgcactctgcttccttgagctggttgatcggaaagttggaaaaaaccatctatttaaaaggagcatcatattgatcaaggcatggtgctattatgaaagccgcctactaggagctcatcatggacttatatcaacctatgcactggaagtacttatcctttatgtattcaatctattccacaaatctctccacagccctgtggaggtatgtcttaaaagatttacttatttcagatatattttctcattatataatagaaaagctcatgtcttgccgtttccctgtgtttttattaataggttctttataggtttctggaatattttagcaagtttgactgggacaactattgcataagtttaaatggccctgttgctttgtcgtctttgccaaacttaattgttgaagctacagttacacataccagtgacttattgtttgacaaagaattcctcaagagctccatggataaagcaactgtacctccaaaaaattccgattcatgctatccgaggtttcgtcctaaacatctaaacatagttgatccactgaaggagtacaacaatcttggcagaagtgtcaacagaggtttgaatttgatctaaccaagatatacatataactcttttctaagttttcctatacaatattttgctgctgcttgtactcataattgcatcccaatttattaagtcttgctgctgcttgtactcataattgcataaacccatatgtgtagctagctagcattgggtttgcctggcctcatctgcttaatttaataaggtgattttgtgcagctagctttaatcgcattcgaacagctttcttatatggtgctcgaaagcttggtcatattgtcacgttaccatcagaagttattcctgatgaaatttatgagtttttcaaaaacactttgggaaggaatgaactaggggcaagaccagatattgacagcaattatgcttttcattcttcctttggtactgctgagactattttggaagatatatcaagtatgaagatttccgatggtgaagatgagaacataacctgtcatctttcaaagagcttgggtgataaaaacttatacgttggaatgaatggacatacacatttgagtaattattttccaggagtccgtaacactgcattaagtactggtttaagtacaagagcatcccattttgttcataatgcaccaaaactacattcatcgttttgccatgataacagtcacggtgacagtgaaaaatgttacttgaaccatggaatggagcaggtatctcactacactgctaaagccttctgtatagatgataagacaacaatacagtcacaagtttttgtgagcaacccatcactattgagcacctctgctgctgtcactgcttcagaacttgccaccaaacagaaaaaatggagtactgcctatgtggagaaacaacatttttctccctcaccatcaagcttgccagatctttcaggggatctggattcacaatttagatgtttgcgtcaagttcagtaccacctcgaatacttgtttgatgggtttttgcagtcagttcagggagcatcttctgctgataagtttcacaaggacccctttcacatttctgcttgcagtatcttgttggacagagatacaggatcgccaaggttgcagttgctttcacctgctcgaagcaatggaagggatccatctcccgtttcttgtagtcagagcacagaatgtgtctctcagcattcacagaatggaagcccatgggatatggcttctcaacggagtgtctctgtgccctctggaatcgatattccaccaaatggagtctcaccgtgttcttcttgtgctgattctgaggtttcttctgtttcatggtttcatggctctggggatagcgctatgatgcatggaagtggaaaagacacatactttacaagaaagagctgttatactcgctgggagcgattggcatcttcaagaaagaatgggaaaatactgccaaatcaatcagtgaaatataaaagcaaccagaagtcagctccaggagcaagatttgtgtctcacaaggagcaggccgcaatagacagtagaaccaaagaaataacaatcgatcaagctttgaagatacatgaatacattgaatcagacatgaaaattgttgaaaaactcagttgtcataatcaaaaggaagtccgtcatgacaatgaagcaagacaattaccaaataacaaccaggatgtttgcttgaataagaactttttgcaaaaccgatatcatgtggagtctacacgagctcccagagcaacacatcagattcctaaatatcaaccgtttaaaattcaaaatactacagagtgtgatagagctagcctaagtaagaacatgcccagaaagcacagctgtggcacttggaaagagtatgagatacttgaccggccaacaaagcagagaccaatttgtggcccattgaagctagaaaacagacatgtctgggattgcacaaagaagatatcagctggaaaccagaagtgtaataatcataaggattacctatctttcgtaagaggtgcagtgccacgcagccacgcagcaagcactccaaatggtttagaaaaggaggcggctaattcaaataaatccgctgacaacggaagtcccgtaaggccaatcttgccagagttattgctttcttgtcatgacatcaatagccaagagaggtccccatcatctagtgctcatcaatcatacttccctgctgcaaatgatcgaccactggagactatagagtttggatctttgggaccttttgcactgcctttatcctcattgaagtcaaatggaactactaacacagaagctacaagtaaggtgtttacagatgcctctccatttgtgttacagaggtccagggccgccgcaactgaaaacagaccaccaggactttgcaaagtgggagacgaggacgaatttccacctcttagagctgggatccgagtttttttgggcgcctcatagaaatgaggattattgcagtggcatagtacagcctaccgtgtaaaatgtcgtcggccccttatcaatctctctctttttcccgtagttgtcactagagttacaccgaacaaggtttatacagctaatgttcactagtataacttagcaaggagaaagatcagatacaaaaaaaaacggagtacttacgtttaccttatcagtctctctgtttcaggtcttcttgcctttgctttgcttcattgcagtatatatagatagatgatgaaaaatcggaaaagcacacgtcatcagctgtcatgaaatgcct

SEQ ID NO: 1636 - DNA, 3536 bp, Zea Mays
attttttgttgcttacagggaaaaaagtataaaaacattttttgttgttaatgtctgtgttctgcccgtgattgcctgctttactagctggcagcagtgtccgcttcgagctgtgcatatccatccaaccattcatgttgactcgtccacgtggaattactgcatagtttggcaagtttttgcatttggatcagttccactaaagacttaccttcctgatggggatattgatctaactgtccttggaaatacatcttatgatagtactttggttaatgatgttttctgcattcttgagtctgaggagcagaatagtgatgctgaatttgtagtgaaggacttggaacgaattgatgccgaggtcaggctcattaaatgcactattggaaatattatagttgatatctcattcaaccaaactggtgggatctgcgcactctgcttccttgagctggttgatcggaaagttggaaaaaaccatctatttaaaaggagcatcatattgatcaaggcatggtgctattatgaaagccgcctactaggagctcatcatggacttatatcaacctatgcactggaagtacttatcctttatgtattcaatctattccacaaatctctccacagccctgtggaggttctttataggtttctggaatattttagcaagtttgactgggacaactattgcataagtttaaatggccctgttgctttgtcgtctttgccaaacttaattgttgaagctacagttacacataccagtgacttattgtttgacaaagaattcctcaagagctccatggataaagcaactgtacctccaaaaaattccgattcatgctatccgaggtttcgtcctaaacatctaaacatagttgatccactgaaggagtacaacaatcttggcagaagtgtcaacagagctagctttaatcgcattcgaacagctttcttatatggtgctcgaaagcttggtcatattgtcacgttaccatcagaagttattcctgatgaaatttatgagtttttcaaaaacactttgggaaggaatgaactaggggcaagaccagatattgacagcaattatgcttttcattcttcctttggtactgctgagactattttggaagatatatcaagtatgaagatttccgatggtgaagatgagaacataacctgtcatctttcaaagagcttgggtgataaaaacttatacgttggaatgaatggacatacacatttgagtaattattttccaggagtccgtaacactgcattaagtactggtttaagtacaagagcatcccattttgttcataatgcaccaaaactacattcatcgttttgccatgataacagtcacggtgacagtgaaaaatgttacttgaaccatggaatggagcaggtatctcactacactgctaaagccttctgtatagatgataagacaacaatacagtcacaagtttttgtgagcaacccatcactattgagcacctctgctgctgtcactgcttcagaacttgccaccaaacagaaaaaatggagtactgcctatgtggagaaacaacatttttctccctcaccatcaagcttgccagatctttcaggggatctggattcacaatttagatgtttgcgtcaagttcagtaccacctcgaatacttgtttgatgggtttttgcagtcagttcagggagcatcttctgctgataagtttcacaaggacccctttcacatttctgcttgcagtatcttgttggacagagatacaggatcgccaaggttgcagttgctttcacctgctcgaagcaatggaagggatccatctcccgtttcttgtagtcagagcacagaatgtgtctctcagcattcacagaatggaagcccatgggatatggcttctcaacggagtgtctctgtgccctctggaatcgatattccaccaaatggagtctcaccgtgttcttcttgtgctgattctgaggtttcttctgtttcatggtttcatggctctggggatagcgctatgatgcatggaagtggaaaagacacatactttacaagaaagagctgttatactcgctgggagcgattggcatcttcaagaaagaatgggaaaatactgccaaatcaatcagtgaaatataaaagcaaccagaagtcagctccaggagcaagatttgtgtctcacaaggagcaggccgcaatagacagtagaaccaaagaaataacaatcgatcaagctttgaagatacatgaatacattgaatcagacatgaaaattgttgaaaaactcagttgtcataatcaaaaggaagtccgtcatgacaatgaagcaagacaattaccaaataacaaccaggatgtttgcttgaataagaactttttgcaaaaccgatatcatgtggagtctacacgagctcccagagcaacacatcagattcctaaatatcaaccgtttaaaattcaaaatactacagagtgtgatagagctagcctaagtaagaacatgcccagaaagcacagctgtggcacttggaaagagtatgagatacttgaccggccaacaaagcagagaccaatttgtggcccattgaagctagaaaacagacatgtctgggattgcacaaagaagatatcagctggaaaccagaagtgtaataatcataaggattacctatctttcgtaagaggtgcagtgccacgcagccacgcagcaagcactccaaatggtttagaaaaggaggcggctaattcaaataaatccgctgacaacggaagtcccgtaaggccaatcttgccagagttattgctttcttgtcatgacatcaatagccaagagaggtccccatcatctagtgctcatcaatcatacttccctgctgcaaatgatcgaccactggagactatagagtttggatctttgggaccttttgcactgcctttatcctcattgaagtcaaatggaactactaacacagaagctacaagtaaggtgtttacagatgcctctccatttgtgttacagaggtccagggccgccgcaactgaaaacagaccaccaggactttgcaaagtgggagacgaggacgaatttccacctcttagagctgggatccggtgagaacttacgtgtaggtcttacggatacaactgatcatagagttagcaaaaggagctgaccagttgagctttgtgcagagtttttttgggcgcctcatagaaatgaggattattgcagtggcatagtacagcctaccgtgtaaaatgtcgtcggccccttatcaatctctctctttttcccgtagttgtcactagagttacaccgaacaaggtttatacagctaatgttcactagtataacttagcaaggagaaagatcagatacaaaaaaaaacggagtacttacgtttaccttatcagtctctctgtttcaggtcttcttgcctttgctttgcttcattgcagtatatatagatagatgatgaaaaatcggaaaagcacacgtcatcagctgtcatgaaatgcct

SEQ ID NO: 1637 - DNA, 3311 bp, Zea Mays
ttaaataagcacttagctcattgaatgtgttgatcggaaagttggaaaaaaccatctatttaaaaggagcatcatattgatcaaggcatggtgctattatgaaagccgcctactaggagctcatcatggacttatatcaacctatgcactggaagtacttatcctttatgtattcaatctattccacaaatctctccacagccctgtggaggtttctggaatattttagcaagtttgactgggacaactattgcataagtttaaatggccctgttgctttgtcgtctttgccaaacttaattgttgaagctacagttacacataccagtgacttattgtttgacaaagaattcctcaagagctccatggataaagcaactgtacctccaaaaaattccgattcatgctatccgaggtttcgtcctaaacatctaaacatagttgatccactgaaggagtacaacaatcttggcagaagtgtcaacagaggtttgaatttgatctaaccaagatatacatataactcttttctaagttttcctatacaatattttgctgctgcttgtactcataattgcatcccaatttattaagtcttgctgctgcttgtactcataattgcataaacccatatgtgtagctagctagcattgggtttgcctggcctcatctgcttaatttaataaggtgattttgtgcagctagctttaatcgcattcgaacagctttcttatatggtgctcgaaagcttggtcatattgtcacgttaccatcagaagttattcctgatgaaatttatgagtttttcaaaaacactttgggaaggaatgaactaggggcaagaccagatattgacagcaattatgcttttcattcttcctttggtactgctgagactattttggaagatatatcaagtatgaagatttccgatggtgaagatgagaacataacctgtcatctttcaaagagcttgggtgataaaaacttatacgttggaatgaatggacatacacatttgagtaattattttccaggagtccgtaacactgcattaagtactggtttaagtacaagagcatcccattttgttcataatgcaccaaaactacattcatcgttttgccatgataacagtcacggtgacagtgaaaaatgttacttgaaccatggaatggagcaggtatctcactacactgctaaagccttctgtatagatgataagacaacaatacagtcacaagtttttgtgagcaacccatcactattgagcacctctgctgctgtcactgcttcagaacttgccaccaaacagaaaaaatggagtactgcctatgtggagaaacaacatttttctccctcaccatcaagcttgccagatctttcaggggatctggattcacaatttagatgtttgcgtcaagttcagtaccacctcgaatacttgtttgatgggtttttgcagtcagttcagggagcatcttctgctgataagtttcacaaggacccctttcacatttctgcttgcagtatcttgttggacagagatacaggatcgccaaggttgcagttgctttcacctgctcgaagcaatggaagggatccatctcccgtttcttgtagtcagagcacagaatgtgtctctcagcattcacagaatggaagcccatgggatatggcttctcaacggagtgtctctgtgccctctggaatcgatattccaccaaatggagtctcaccgtgttcttcttgtgctgattctgaggtttcttctgtttcatggtttcatggctctggggatagcgctatgatgcatggaagtggaaaagacacatactttacaagaaagagctgttatactcgctgggagcgattggcatcttcaagaaagaatgggaaaatactgccaaatcaatcagtgaaatataaaagcaaccagaagtcagctccaggagcaagatttgtgtctcacaaggagcaggccgcaatagacagtagaaccaaagaaataacaatcgatcaagctttgaagatacatgaatacattgaatcagacatgaaaattgttgaaaaactcagttgtcataatcaaaaggaagtccgtcatgacaatgaagcaagacaattaccaaataacaaccaggatgtttgcttgaataagaactttttgcaaaaccgatatcatgtggagtctacacgagctcccagagcaacacatcagattcctaaatatcaaccgtttaaaattcaaaatactacagagtgtgatagagctagcctaagtaagaacatgcccagaaagcacagctgtggcacttggaaagagtatgagatacttgaccggccaacaaagcagagaccaatttgtggcccattgaagctagaaaacagacatgtctgggattgcacaaagaagatatcagctggaaaccagaagtgtaataatcataaggattacctatctttcgtaagaggtgcagtgccacgcagccacgcagcaagcactccaaatggtttagaaaaggaggcggctaattcaaataaatccgctgacaacggaagtcccgtaaggccaatcttgccagagttattgctttcttgtcatgacatcaatagccaagagaggtccccatcatctagtgctcatcaatcatacttccctgctgcaaatgatcgaccactggagactatagagtttggatctttgggaccttttgcactgcctttatcctcattgaagtcaaatggaactactaacacagaagctacaagtaaggtgtttacagatgcctctccatttgtgttacagaggtccagggccgccgcaactgaaaacagaccaccaggactttgcaaagtgggagacgaggacgaatttccacctcttagagctgggatccggtgagaacttacgtgtaggtcttacggatacaactgatcatagagttagcaaaaggagctgaccagttgagctttgtgcagagtttttttgggcgcctcatagaaatgaggattattgcagtggcatagtacagcctaccgtgtaaaatgtcgtcggccccttatcaatctctctctttttcccgtagttgtcactagagttacaccgaacaaggtttatacagctaatgttcactagtataacttagcaaggagaaagatcagatacaaaaaaaaacggagtacttacgtttaccttatcagtctctctgtttcaggtcttcttgcctttgctttgcttcattgcagtatatatagatagatgatgaaaaatcggaaaagcacacgtcatcagctgtcatgaaatgcct

SEQ ID NO: 1638 - DNA, 3075 bp, Zea Mays
tgctctgctcacccctggcggccgggcccgttctttggaattattggtcgccattgttgtatttgtatgggcggccaactgttggagatagactgacgggcatgctacagtgttggtggcgttcgcagcagtcttgtccgatcatcaatggataccaccaacccagtagtagctgtgacttgcgacgagtgatggagcgtagcgcggctggagtggacgtacgcccggcttctcgtcttcgtccggggcgagccgagtccccctccctggctccctcctccttgccgcggcaccctgcatcgcgacgtccgcgaggagacttggcaggcgcggcaatccgcgtgttcttggggagctgctcgtttggtacgcgttgatgctgctaaaaaagattcttcactgctcggggatttggaacaaaggccgtggttcgaagctggtgtgttcgttcaattgtgcggaaagaaaggccagtgttatgtgtgaagtagtgaaggctagcaggtaggctggctctcgcctcgccgagcgatggatctcgagttcggtaggggcctgaggtccccaaagagagactcgtggaagaccaccttgctgctggcgtaccagagcctgggggtggtctacggcgacctcagcatctctccgctgtacgtgtacaagagcaccttcgccgaggacatccagcattcggagacgaacgaggagatcttcggcgtgctctccttcgtcttctggacgctcaccctcatccctctcgtcaagtatgtctccgttgtcctgcgagctgacgacaatggcgagggaggaacgtttgccctctactctctgatttgcaggcacgccaatgtgagcctcctcccgaaccggcagatcgccgatgaggagctttccacctacaagctggaatgccctcctgaaatcaccgacaagtcccgcatcaaggtgtggcttgagcggcacaggaagctgcgcgtcgctctgctggtcatggttatgatcgggacatgcatggttatcggggacggtgttctcacgccagctatatccgtgttctcggcagtttcaggcctggagttctcgctgtccaaggatcaccgtgaatatgctgtcattccaataacctgtgtcatattagcattcctatttgccctccagcactatgatctaccaagctctaaatccgtcttacatgttcaagttcttaaaaaagactagaaaatatggatggatgtcacttggtggaatcttgctctgcatgacaggatcagaagcaatgtttgcagatcttggacatttctcatacagtgcaatccagcttgctttcacttgtctagtttaccccgcactgattttggcatacatgggtcaagctgcttacttatcaaaacatcatgacttttactctagctcacaagttggattttacatcgcagttccagataagatcagatggccagtgcttatattggcaattttggcttcggtggtcggaagccaagcaatcatcagcggaacattctcaatcatcaaccagagcctgtccctgagctgcttccctcgagtgaaagttgtacacacatctgagaaaattcatggccaaatatacatccccgagatcaattggttgcttatgatcctctgcattgctgtgaccgttgggtttagagatacaaaacacatgggaaatgcatctggtttggctgtgatcacagtgatgctggtgaccacgttcctgacatccttggtcatcgttctctgctggcacaggccaccgctgctggcgttggctttcctcctgttctttggatccatcgaggcgctttacttctccgcgtccctgatcaagttcctggaaggcgcgtggctccccatcctcctggcgctcatcctgatggccgtcatgctcatctggcactacacgaccatcaagaagtacgagttcgacctgcacaacaaggtgaccctggagtggctcctcgccctcggggacaggctgggcatggtccgcgtccccggcatcggcctcgtgtacacagacctgacgtcgggcgtcccggccaacttctcccggttcgtgaccaacctcccggcgttccaccaggtgctggtgttcgtgtgcgtcaagtcggtgccagtgccgtacgtattcccggcggagcggtacctcatcgggcgtgtcggcccgccgggccaccgctcgtaccggtgcatcgtgcgctacggctaccgcgacgtgcaccaggacgtggactcgttcgagacggagctcgtggagaccctggccacgttcataacgctggacgcctcgtaccgctgcagcgaggccagcgagcgggagctggagctggatcccggggagcaggagcggcggctgaccgtgatcgcgagcaacccgctgcggcgccgcgccagctacgacctccaggacagcgtgcagcattcggcagcgtccaccgtggaggtgcgcgccacggccgccgacagccttagccccagggacgcggagatcagctcggcggcggggccgaagcaggtgcggttcttcatcgacagccacgtggtgagcccggaggccgcggagaacaagcaggttgcggatgagctggaggcgctggcggcggcccgggaggccggcactgcgttcatcctggggcactcgcacgtgcagtgcaagcccgggtcgtcggtgctcaagcggttggcggtggacgtcgggtacaacttcctgcggcgcaactgccgcggcccggacgtcgcgctgcgcgtgccgccggcgtcactgctggaggtcggcatggtgtacgtgctttgattgaggctgagacgatgcgactttttcttatgaacatctgatatagtaatcacgactgttgtcagttttcccagtaacataatgaggccgttctgtatagcttagcttgttcgtacttctacagctgcaatatatagagtcaaaatactgtagaattagtaggagtcggtaacgaactctgtgtgcacgtctgtgcgtgagcgtgtgcgtttcaggcccagtttggttttgcttttggacagcatcagtctgtgcgtttt

SEQ ID NO: 1639 - DNA, 2896 bp, Zea Mays
tgctctgctcacccctggcggccgggcccgttctttggaattattggtcgccattgttgtatttgtatgggcggccaactgttggagatagactgacgggcatgctacagtgttggtggcgttcgcagcagtcttgtccgatcatcaatggataccaccaacccagtagtagctgtgacttgcgacgagtgatggagcgtagcgcggctggagtggacgtacgcccggcttctcgtcttcgtccggggcgagccgagtccccctccctggctccctcctccttgccgcggcaccctgcatcgcgacgtccgcgaggagacttggcaggcgcggcaatccgcgtgttcttggggagctgctcgtttggtacgcgttgatgctgctaaaaaagagagactcgtggaagaccaccttgctgctggcgtaccagagcctgggggtggtctacggcgacctcagcatctctccgctgtacgtgtacaagagcaccttcgccgaggacatccagcattcggagacgaacgaggagatcttcggcgtgctctccttcgtcttctggacgctcaccctcatccctctcgtcaagtatgtctccgttgtcctgcgagctgacgacaatggcgagggaggaacgtttgccctctactctctgatttgcaggcacgccaatgtgagcctcctcccgaaccggcagatcgccgatgaggagctttccacctacaagctggaatgccctcctgaaatcaccgacaagtcccgcatcaaggtgtggcttgagcggcacaggaagctgcgcgtcgctctgctggtcatggttatgatcgggacatgcatggttatcggggacggtgttctcacgccagctatatccgtgttctcggcagtttcaggcctggagttctcgctgtccaaggatcaccgtgaatatgctgtcattccaataacctgtgtcatattagcattcctatttgccctccagcactatgatctaccaagctctaaatccgtcttacatgttcaagttcttaaaaaagactagaaaatatggatggatgtcacttggtggaatcttgctctgcatgacaggatcagaagcaatgtttgcagatcttggacatttctcatacagtgcaatccagcttgctttcacttgtctagtttaccccgcactgattttggcatacatgggtcaagctgcttacttatcaaaacatcatgacttttactctagctcacaagttggattttacatcgcagttccagataagatcagatggccagtgcttatattggcaattttggcttcggtggtcggaagccaagcaatcatcagcggaacattctcaatcatcaaccagagcctgtccctgagctgcttccctcgagtgaaagttgtacacacatctgagaaaattcatggccaaatatacatccccgagatcaattggttgcttatgatcctctgcattgctgtgaccgttgggtttagagatacaaaacacatgggaaatgcatctggtttggctgtgatcacagtgatgctggtgaccacgttcctgacatccttggtcatcgttctctgctggcacaggccaccgctgctggcgttggctttcctcctgttctttggatccatcgaggcgctttacttctccgcgtccctgatcaagttcctggaaggcgcgtggctccccatcctcctggcgctcatcctgatggccgtcatgctcatctggcactacacgaccatcaagaagtacgagttcgacctgcacaacaaggtgaccctggagtggctcctcgccctcggggacaggctgggcatggtccgcgtccccggcatcggcctcgtgtacacagacctgacgtcgggcgtcccggccaacttctcccggttcgtgaccaacctcccggcgttccaccaggtgctggtgttcgtgtgcgtcaagtcggtgccagtgccgtacgtattcccggcggagcggtacctcatcgggcgtgtcggcccgccgggccaccgctcgtaccggtgcatcgtgcgctacggctaccgcgacgtgcaccaggacgtggactcgttcgagacggagctcgtggagaccctggccacgttcataacgctggacgcctcgtaccgctgcagcgaggccagcgagcgggagctggagctggatcccggggagcaggagcggcggctgaccgtgatcgcgagcaacccgctgcggcgccgcgccagctacgacctccaggacagcgtgcagcattcggcagcgtccaccgtggaggtgcgcgccacggccgccgacagccttagccccagggacgcggagatcagctcggcggcggggccgaagcaggtgcggttcttcatcgacagccacgtggtgagcccggaggccgcggagaacaagcaggttgcggatgagctggaggcgctggcggcggcccgggaggccggcactgcgttcatcctggggcactcgcacgtgcagtgcaagcccgggtcgtcggtgctcaagcggttggcggtggacgtcgggtacaacttcctgcggcgcaactgccgcggcccggacgtcgcgctgcgcgtgccgccggcgtcactgctggaggtcggcatggtgtacgtgctttgattgaggctgagacgatgcgactttttcttatgaacatctgatatagtaatcacgactgttgtcagttttcccagtaacataatgaggccgttctgtatagcttagcttgttcgtacttctacagctgcaatatatagagtcaaaatactgtagaattagtaggagtcggtaacgaactctgtgtgcacgtctgtgcgtgagcgtgtgcgtttcaggcccagtttggttttgcttttggacagcatcagtctgtgcgtttt

SEQ ID NO: 1640 - DNA, 2790 bp, Zea Mays
agacagtggtatataaataaatgcggcgaagtcgatctctgcgtccggtttcctggcgttcattgatggaggattaatgtcactgccaaactcgctccgttcagcagcacgctagtagtactgcaagctgcagcttcggtggttggggagtagaggagagcagagtacaggagagactctgcgagtcttcccccctttcccttccccgtcgtcctcgccagatgaccaccagagccaccgctcaatttcttgctttgctccatttaaacacttatatatattaaaaaaacgctagttgtggtctctgtgccacagtccagtccggagaagaggagaggagcctcgctctcgcaagattcttcactgctcggggatttggaacaaaggccgtggttcgaagctggtgtgttcgttcaattgtgcggaaagaaaggccagtgttatgtgtgaagtagtgaaggctagcaggtaggctggctctcgcctcgccgagcgatggatctcgagttcggtaggggcctgaggtccccaaagagagactcgtggaagaccaccttgctgctggcgtaccagagcctgggggtggtctacggcgacctcagcatctctccgctgtacgtgtacaagagcaccttcgccgaggacatccagcattcggagacgaacgaggagatcttcggcgtgctctccttcgtcttctggacgctcaccctcatccctctcgtcaagtatgtctccgttgtcctgcgagctgacgacaatggcgagggaggaacgtttgccctctactctctgatttgcaggcacgccaatgtgagcctcctcccgaaccggcagatcgccgatgaggagctttccacctacaagctggaatgccctcctgaaatcaccgacaagtcccgcatcaaggtgtggcttgagcggcacaggaagctgcgcgtcgctctgctggtcatggttatgatcgggacatgcatggttatcggggacggtgttctcacgccagctatatccgtgttctcggcagtttcaggcctggagttctcgctgtccaaggatcaccgtgaatatgctgtcattccaataacctgtgtcatattagcattcctatttgccctccagcactatgatctaccaagctctaaatccgtcttacatgttcaagttcttaaaaaagactagaaaatatggatggatgtcacttggtggaatcttgctctgcatgacaggatcagaagcaatgtttgcagatcttggacatttctcatacagtgcaatccagcttgctttcacttgtctagtttaccccgcactgattttggcatacatgggtcaagctgcttacttatcaaaacatcatgacttttactctagctcacaagttggattttacatcgcagttccagataagatcagatggccagtgcttatattggcaattttggcttcggtggtcggaagccaagcaatcatcagcggaacattctcaatcatcaaccagagcctgtccctgagctgcttccctcgagtgaaagttgtacacacatctgagaaaattcatggccaaatatacatccccgagatcaattggttgcttatgatcctctgcattgctgtgaccgttgggtttagagatacaaaacacatgggaaatgcatctggtttggctgtgatcacagtgatgctggtgaccacgttcctgacatccttggtcatcgttctctgctggcacaggccaccgctgctggcgttggctttcctcctgttctttggatccatcgaggcgctttacttctccgcgtccctgatcaagttcctggaaggcgcgtggctccccatcctcctggcgctcatcctgatggccgtcatgctcatctggcactacacgaccatcaagaagtacgagttcgacctgcacaacaaggtgaccctggagtggctcctcgccctcggggacaggctgggcatggtccgcgtccccggcatcggcctcgtgtacacagacctgacgtcgggcgtcccggccaacttctcccgcgaggccagcgagcgggagctggagctggatcccggggagcaggagcggcggctgaccgtgatcgcgagcaacccgctgcggcgccgcgccagctacgacctccaggacagcgtgcagcattcggcagcgtccaccgtggaggtgcgcgccacggccgccgacagccttagccccagggacgcggagatcagctcggcggcggggccgaagcaggtgcggttcttcatcgacagccacgtggtgagcccggaggccgcggagaacaagcaggttgcggatgagctggaggcgctggcggcggcccgggaggccggcactgcgttcatcctggggcactcgcacgtgcagtgcaagcccgggtcgtcggtgctcaagcggttggcggtggacgtcgggtacaacttcctgcggcgcaactgccgcggcccggacgtcgcgctgcgcgtgccgccggcgtcactgctggaggtcggcatggtgtacgtgctttgattgaggctgagacgatgcgactttttcttatgaacatctgatatagtaatcacgactgttgtcagttttcccagtaacataatgaggccgttctgtatagcttagcttgttcgtacttctacagctgcaatatatagagtcaaaatactgtagaattagtaggagtcggtaacgaactctgtgtgcacgtctgtgcgtgagcgtgtgcgtttcaggcccagtttggttttgcttttggacagcatcagtctgtgcgtttt

SEQ ID NO: 1641 - DNA, 3043 bp, Zea Mays
gctgcagcttcggtggttggggagtagaggagagcagagtacaggagagactctgcgagtcttcccccctttcccttccccgtcgtcctcgccagatgaccaccagagccaccgctcaatttcttgctttgctccatttaaacacttatatatattaaaaaaacgctagttgtggtctctgtgccacagtccagtccggagaagaggagaggagcctcgctctcgcaagtagattcttcactgctcggggatttggaacaaaggccgtggttcgaagctggtgtgttcgttcaattgtgcggaaagaaaggccagtgttatgtgtgaagtagtgaaggctagcaggtaggctggctctcgcctcgccgagcgatggatctcgagttcggtaggggcctgaggtccccaaaggccgtctggggttcttcttcttgcagagagactcgtggaagaccaccttgctgctggcgtaccagagcctgggggtggtctacggcgacctcagcatctctccgctgtacgtgtacaagagcaccttcgccgaggacatccagcattcggagacgaacgaggagatcttcggcgtgctctccttcgtcttctggacgctcaccctcatccctctcgtcaagtatgtctccgttgtcctgcgagctgacgacaatggcgagggaggaacgtttgccctctactctctgatttgcaggcacgccaatgtgagcctcctcccgaaccggcagatcgccgatgaggagctttccacctacaagctggaatgccctcctgaaatcaccgacaagtcccgcatcaaggtgtggcttgagcggcacaggaagctgcgcgtcgctctgctggtcatggttatgatcgggacatgcatggttatcggggacggtgttctcacgccagctatatccgtgttctcggcagtttcaggcctggagttctcgctgtccaaggatcaccgtgaatatgctgtcattccaataacctgtgtcatattagcattcctatttgccctccagcactatggtacgcaccgggttggatttctgttcgccccgatagttctagcctggctgttctgcatgagtgctcttggcctttataatatcatccactggaatcctcagatctaccaagctctaaatccgtcttacatgttcaagttcttaaaaaagactagaaaatatggatggatgtcacttggtggaatcttgctctgcatgacaggatcagaagcaatgtttgcagatcttggacatttctcatacagtgcaatccagcttgctttcacttgtctagtttaccccgcactgattttggcatacatgggtcaagctgcttacttatcaaaacatcatgacttttactctagctcacaagttggattttacatcgcagttccagataagatcagatggccagtgcttatattggcaattttggcttcggtggtcggaagccaagcaatcatcagcggaacattctcaatcatcaaccagagcctgtccctgagctgcttccctcgagtgaaagttgtacacacatctgagaaaattcatggccaaatatacatccccgagatcaattggttgcttatgatcctctgcattgctgtgaccgttgggtttagagatacaaaacacatgggaaatgcatctggtttggctgtgatcacagtgatgctggtgaccacgttcctgacatccttggtcatcgttctctgctggcacaggccaccgctgctggcgttggctttcctcctgttctttggatccatcgaggcgctttacttctccgcgtccctgatcaagttcctggaaggcgcgtggctccccatcctcctggcgctcatcctgatggccgtcatgctcatctggcactacacgaccatcaagaagtacgagttcgacctgcacaacaaggtgaccctggagtggctcctcgccctcggggacaggctgggcatggtccgcgtccccggcatcggcctcgtgtacacagacctgacgtcgggcgtcccggccaacttctcccggttcgtgaccaacctcccggcgttccaccaggtgctggtgttcgtgtgcgtcaagtcggtgccagtgccgtacgtattcccggcggagcggtacctcatcgggcgtgtcggcccgccgggccaccgctcgtaccggtgcatcgtgcgctacggctaccgcgacgtgcaccaggacgtggactcgttcgagacggagctcgtggagaccctggccacgttcataacgctggacgcctcgtaccgctgcagcgaggccagcgagcgggagctggagctggatcccggggagcaggagcggcggctgaccgtgatcgcgagcaacccgctgcggcgccgcgccagctacgacctccaggacagcgtgcagcattcggcagcgtccaccgtggaggtgcgcgccacggccgccgacagccttagccccagggacgcggagatcagctcggcggcggggccgaagcaggtgcggttcttcatcgacagccacgtggtgagcccggaggccgcggagaacaagcaggttgcggatgagctggaggcgctggcggcggcccgggaggccggcactgcgttcatcctggggcactcgcacgtgcagtgcaagcccgggtcgtcggtgctcaagcggttggcggtggacgtcgggtacaacttcctgcggcgcaactgccgcggcccggacgtcgcgctgcgcgtgccgccggcgtcactgctggaggtcggcatggtgtacgtgctttgattgaggctgagacgatgcgactttttcttatgaacatctgatatagtaatcacgactgttgtcagttttcccagtaacataatgaggccgttctgtatagcttagcttgttcgtacttctacagctgcaatatatagagtcaaaatactgtagaattagtaggagtcggtaacgaactctgtgtgcacgtctgtgcgtgagcgtgtgcgtttcaggcccagtttggttttgcttttggacagcatcagtctgtgcgtttt

SEQ ID NO: 1642 - DNA, 2838 bp, Zea Mays
cccgtcgtcctcgccagatgaccaccagagccaccgctcaatttcttgctttgctccatttaaacacttatatatattaaaaaaacgctagttgtggtctctgtgccacagtccagtccggagaagaggagaggagcctcgctctcgcaagtagattcttcactgctcggggatttggaacaaaggccgtggttcgaagctggtgtgttcgttcaattgtgcggaaagaaaggccagtgttatgtgtgaagtagtgaaggctagcaggtaggctggctctcgcctcgccgagcgatggatctcgagttcggtaggggcctgaggtccccaaagagagactcgtggaagaccaccttgctgctggcgtaccagagcctgggggtggtctacggcgacctcagcatctctccgctgtacgtgtacaagagcaccttcgccgaggacatccagcattcggagacgaacgaggagatcttcggcgtgctctccttcgtcttctggacgctcaccctcatccctctcgtcaagtatgtctccgttgtcctgcgagctgacgacaatggcgagggaggaacgtttgccctctactctctgatttgcaggcacgccaatgtgagcctcctcccgaaccggcagatcgccgatgaggagctttccacctacaagctggaatgccctcctgaaatcaccgacaagtcccgcatcaaggtgtggcttgagcggcacaggaagctgcgcgtcgctctgctggtcatggttatgatcgggacatgcatggttatcggggacggtgttctcacgccagctatatccgtgttctcggcagtttcaggcctggagttctcgctgtccaaggatcaccgtgaatatgctgtcattccaataacctgtgtcatattagcattcctatttgccctccagcactatgatctaccaagctctaaatccgtcttacatgttcaagttcttaaaaaagactagaaaatatggatggatgtcacttggtggaatcttgctctgcatgacaggatcagaagcaatgtttgcagatcttggacatttctcatacagtgcaatccagcttgctttcacttgtctagtttaccccgcactgattttggcatacatgggtcaagctgcttacttatcaaaacatcatgacttttactctagctcacaagttggattttacatcgcagttccagataagatcagatggccagtgcttatattggcaattttggcttcggtggtcggaagccaagcaatcatcagcggaacattctcaatcatcaaccagagcctgtccctgagctgcttccctcgagtgaaagttgtacacacatctgagaaaattcatggccaaatatacatccccgagatcaattggttgcttatgatcctctgcattgctgtgaccgttgggtttagagatacaaaacacatgggaaatgcatctggtttggctgtgatcacagtgatgctggtgaccacgttcctgacatccttggtcatcgttctctgctggcacaggccaccgctgctggcgttggctttcctcctgttctttggatccatcgaggcgctttacttctccgcgtccctgatcaagttcctggaaggcgcgtggctccccatcctcctggcgctcatcctgatggccgtcatgctcatctggcactacacgaccatcaagaagtacgagttcgacctgcacaacaaggtgaccctggagtggctcctcgccctcggggacaggctgggcatggtccgcgtccccggcatcggcctcgtgtacacagacctgacgtcgggcgtcccggccaacttctcccggttcgtgaccaacctcccggcgttccaccaggtgctggtgttcgtgtgcgtcaagtcggtgccagtgccgtacgtattcccggcggagcggtacctcatcgggcgtgtcggcccgccgggccaccgctcgtaccggtgcatcgtgcgctacggctaccgcgacgtgcaccaggacgtggactcgttcgagacggagctcgtggagaccctggccacgttcataacgctggacgcctcgtaccgctgcagcgaggccagcgagcgggagctggagctggatcccggggagcaggagcggcggctgaccgtgatcgcgagcaacccgctgcggcgccgcgccagctacgacctccaggacagcgtgcagcattcggcagcgtccaccgtggaggtgcgcgccacggccgccgacagccttagccccagggacgcggagatcagctcggcggcggggccgaagcaggtgcggttcttcatcgacagccacgtggtgagcccggaggccgcggagaacaagcaggttgcggatgagctggaggcgctggcggcggcccgggaggccggcactgcgttcatcctggggcactcgcacgtgcagtgcaagcccgggtcgtcggtgctcaagcggttggcggtggacgtcgggtacaacttcctgcggcgcaactgccgcggcccggacgtcgcgctgcgcgtgccgccggcgtcactgctggaggtcggcatggtgtacgtgctttgattgaggctgagacgatgcgactttttcttatgaacatctgatatagtaatcacgactgttgtcagttttcccagtaacataatgaggccgttctgtatagcttagcttgttcgtacttctacagctgcaatatatagagtcaaaatactgtagaattagtaggagtcggtaacgaactctgtgtgcacgtctgtgcgtgagcgtgtgcgtttcaggcccagtttggttttgcttttggacagcatcagtctgtgcgtttt

SEQ ID NO: 1643 - DNA, 3330 bp, Zea Mays
ctcgactctgctccccaccccaccccaaacgtatttgcatgccattccccccctccgactccgattgcatcgacaccacaccttgcttgaatctgcacatcaccttccgtggatataaacgagatgtcaatttcgatgtgaccgagggagatgtgtttgtgtgtgtgtgtgtttttcttttcattttggttcttggccggctcttcatcgcccttttccacttggtttttgttggctctgttgtgtttgtgcttccctttcctcgcgaccgcgactcggatcggatctctctcctgtgtagagccatgctgtgctgtgctggtagtagcagcagcagtagcaatgagtagtccagtccacagctccaagaacacgtggccgtcctttccttgcctctccctatcggtattcggtaacgcagggggagggcgccaccggctttaaccatggcctgtcgcttttgcctcgtctggtcggctggtccctctgctctatcccatcccccttgagcaggcttagattcttcactgctcggggatttggaacaaaggccgtggttcgaagctggtgtgttcgttcaattgtgcggaaagaaaggccagtgttatgtgtgaagtagtgaaggctagcaggtaggctggctctcgcctcgccgagcgatggatctcgagttcggtaggggcctgaggtccccaaaggccgtctggggttcttcttcttgcagagagactcgtggaagaccaccttgctgctggcgtaccagagcctgggggtggtctacggcgacctcagcatctctccgctgtacgtgtacaagagcaccttcgccgaggacatccagcattcggagacgaacgaggagatcttcggcgtgctctccttcgtcttctggacgctcaccctcatccctctcgtcaagtatgtctccgttgtcctgcgagctgacgacaatggcgagggaggaacgtttgccctctactctctgatttgcaggcacgccaatgtgagcctcctcccgaaccggcagatcgccgatgaggagctttccacctacaagctggaatgccctcctgaaatcaccgacaagtcccgcatcaaggtgtggcttgagcggcacaggaagctgcgcgtcgctctgctggtcatggttatgatcgggacatgcatggttatcggggacggtgttctcacgccagctatatccgtgttctcggcagtttcaggcctggagttctcgctgtccaaggatcaccgtgaatatgctgtcattccaataacctgtgtcatattagcattcctatttgccctccagcactatggtacgcaccgggttggatttctgttcgccccgatagttctagcctggctgttctgcatgagtgctcttggcctttataatatcatccactggaatcctcagatctaccaagctctaaatccgtcttacatgttcaagttcttaaaaaagactagaaaatatggatggatgtcacttggtggaatcttgctctgcatgacaggatcagaagcaatgtttgcagatcttggacatttctcatacagtgcaatccagcttgctttcacttgtctagtttaccccgcactgattttggcatacatgggtcaagctgcttacttatcaaaacatcatgacttttactctagctcacaagttggattttacatcgcagttccagataagatcagatggccagtgcttatattggcaattttggcttcggtggtcggaagccaagcaatcatcagcggaacattctcaatcatcaaccagagcctgtccctgagctgcttccctcgagtgaaagttgtacacacatctgagaaaattcatggccaaatatacatccccgagatcaattggttgcttatgatcctctgcattgctgtgaccgttgggtttagagatacaaaacacatgggaaatgcatctggtttggctgtgatcacagtgatgctggtgaccacgttcctgacatccttggtcatcgttctctgctggcacaggccaccgctgctggcgttggctttcctcctgttctttggatccatcgaggcgctttacttctccgcgtccctgatcaagttcctggaaggcgcgtggctccccatcctcctggcgctcatcctgatggccgtcatgctcatctggcactacacgaccatcaagaagtacgagttcgacctgcacaacaaggtgaccctggagtggctcctcgccctcggggacaggctgggcatggtccgcgtccccggcatcggcctcgtgtacacagacctgacgtcgggcgtcccggccaacttctcccggttcgtgaccaacctcccggcgttccaccaggtgctggtgttcgtgtgcgtcaagtcggtgccagtgccgtacgtattcccggcggagcggtacctcatcgggcgtgtcggcccgccgggccaccgctcgtaccggtgcatcgtgcgctacggctaccgcgacgtgcaccaggacgtggactcgttcgagacggagctcgtggagaccctggccacgttcataacgctggacgcctcgtaccgctgcagcgaggccagcgagcgggagctggagctggatcccggggagcaggagcggcggctgaccgtgatcgcgagcaacccgctgcggcgccgcgccagctacgacctccaggacagcgtgcagcattcggcagcgtccaccgtggaggtgcgcgccacggccgccgacagccttagccccagggacgcggagatcagctcggcggcggggccgaagcaggtgcggttcttcatcgacagccacgtggtgagcccggaggccgcggagaacaagcaggttgcggatgagctggaggcgctggcggcggcccgggaggccggcactgcgttcatcctggggcactcgcacgtgcagtgcaagcccgggtcgtcggtgctcaagcggttggcggtggacgtcgggtacaacttcctgcggcgcaactgccgcggcccggacgtcgcgctgcgcgtgccgccggcgtcactgctggaggtcggcatggtgtacgtgctttgattgaggctgagacgatgcgactttttcttatgaacatctgatatagtaatcacgactgttgtcagttttcccagtaacataatgaggccgttctgtatagcttagcttgttcgtacttctacagctgcaatatatagagtcaaaatactgtagaattagtaggagtcggtaacgaactctgtgtgcacgtctgtgcgtgagcgtgtgcgtttcaggcccagtttggttttgcttttggacagcatcagtctgtgcgtttt

SEQ ID NO: 1644 - DNA, 3240 bp, Zea Mays
cgattgcatcgacaccacaccttgcttgaatctgcacatcaccttccgtggatataaacgagatgtcaatttcgatgtgaccgagggagatgtgtttgtgtgtgtgtgtgtttttcttttcattttggttcttggccggctcttcatcgcccttttccacttggtttttgttggctctgttgtgtttgtgcttccctttcctcgcgaccgcgactcggatcggatctctctcctgtgtagagccatgctgtgctgtgctggtagtagcagcagcagtagcaatgagtagtccagtccacagctccaagaacacgtggccgtcctttccttgcctctccctatcggtattcggtaacgcagggggagggcgccaccggctttaaccatggcctgtcgcttttgcctcgtctggtcggctggtccctctgctctatcccatcccccttgagcaggctattcttcactgctcggggatttggaacaaaggccgtggttcgaagctggtgtgttcgttcaattgtgcggaaagaaaggccagtgttatgtgtgaagtagtgaaggctagcaggtaggctggctctcgcctcgccgagcgatggatctcgagttcggtaggggcctgaggtccccaaagagagactcgtggaagaccaccttgctgctggcgtaccagagcctgggggtggtctacggcgacctcagcatctctccgctgtacgtgtacaagagcaccttcgccgaggacatccagcattcggagacgaacgaggagatcttcggcgtgctctccttcgtcttctggacgctcaccctcatccctctcgtcaagtatgtctccgttgtcctgcgagctgacgacaatggcgagggaggaacgtttgccctctactctctgatttgcaggcacgccaatgtgagcctcctcccgaaccggcagatcgccgatgaggagctttccacctacaagctggaatgccctcctgaaatcaccgacaagtcccgcatcaaggtgtggcttgagcggcacaggaagctgcgcgtcgctctgctggtcatggttatgatcgggacatgcatggttatcggggacggtgttctcacgccagctatatccgtgttctcggcagtttcaggcctggagttctcgctgtccaaggatcaccgtgaatatgctgtcattccaataacctgtgtcatattagcattcctatttgccctccagcactatggtacgcaccgggttggatttctgttcgccccgatagttctagcctggctgttctgcatgagtgctcttggcctttataatatcatccactggaatcctcagatctaccaagctctaaatccgtcttacatgttcaagttcttaaaaaagactagaaaatatggatggatgtcacttggtggaatcttgctctgcatgacaggatcagaagcaatgtttgcagatcttggacatttctcatacagtgcaatccagcttgctttcacttgtctagtttaccccgcactgattttggcatacatgggtcaagctgcttacttatcaaaacatcatgacttttactctagctcacaagttggattttacatcgcagttccagataagatcagatggccagtgcttatattggcaattttggcttcggtggtcggaagccaagcaatcatcagcggaacattctcaatcatcaaccagagcctgtccctgagctgcttccctcgagtgaaagttgtacacacatctgagaaaattcatggccaaatatacatccccgagatcaattggttgcttatgatcctctgcattgctgtgaccgttgggtttagagatacaaaacacatgggaaatgcatctggtttggctgtgatcacagtgatgctggtgaccacgttcctgacatccttggtcatcgttctctgctggcacaggccaccgctgctggcgttggctttcctcctgttctttggatccatcgaggcgctttacttctccgcgtccctgatcaagttcctggaaggcgcgtggctccccatcctcctggcgctcatcctgatggccgtcatgctcatctggcactacacgaccatcaagaagtacgagttcgacctgcacaacaaggtgaccctggagtggctcctcgccctcggggacaggctgggcatggtccgcgtccccggcatcggcctcgtgtacacagacctgacgtcgggcgtcccggccaacttctcccggttcgtgaccaacctcccggcgttccaccaggtgctggtgttcgtgtgcgtcaagtcggtgccagtgccgtacgtattcccggcggagcggtacctcatcgggcgtgtcggcccgccgggccaccgctcgtaccggtgcatcgtgcgctacggctaccgcgacgtgcaccaggacgtggactcgttcgagacggagctcgtggagaccctggccacgttcataacgctggacgcctcgtaccgctgcagcgaggccagcgagcgggagctggagctggatcccggggagcaggagcggcggctgaccgtgatcgcgagcaacccgctgcggcgccgcgccagctacgacctccaggacagcgtgcagcattcggcagcgtccaccgtggaggtgcgcgccacggccgccgacagccttagccccagggacgcggagatcagctcggcggcggggccgaagcaggtgcggttcttcatcgacagccacgtggtgagcccggaggccgcggagaacaagcaggttgcggatgagctggaggcgctggcggcggcccgggaggccggcactgcgttcatcctggggcactcgcacgtgcagtgcaagcccgggtcgtcggtgctcaagcggttggcggtggacgtcgggtacaacttcctgcggcgcaactgccgcggcccggacgtcgcgctgcgcgtgccgccggcgtcactgctggaggtcggcatggtgtacgtgctttgattgaggctgagacgatgcgactttttcttatgaacatctgatatagtaatcacgactgttgtcagttttcccagtaacataatgaggccgttctgtatagcttagcttgttcgtacttctacagctgcaatatatagagtcaaaatactgtagaattagtaggagtcggtaacgaactctgtgtgcacgtctgtgcgtgagcgtgtgcgtttcaggcccagtttggttttgcttttggacagcatcagtctgtgcgtttt

SEQ ID NO: 1645 - DNA, 1148 bp, Zea Mays
ttccacatgaatactgttctactcagcacaatcactttgaaaagaatttgcggttgcatattctacacaatttgctacagaagttcacaacatcaatggctaactatattaaataccaagcggacaatggggcgcaggctgtccaaattttcgattcatgggctactgaactcagcccggctgattttgaggagtttagcctgccttatctaaagcagatagtggatagtgttagggaaacacatcctaacttgcctctgatactctacgcaagtggatctgggggcttgctggagaggcttcctttgacaggtgttgatgttgtcagcttggactggacggtcgatatggcagagggcaggaaaagattgggatctaacacagcagtccaagggaacgtggaccctggtgttctttttggatccaaagagtttataagcaggcggatttacgacactgtgcagaaggctggcaatgttggacatgtattgaaccttggccatggcatcaaggttggaactccggaggaaaatgttgctcacttcttcgaggtcgcaaaagggatcagatactaaagaaccttgcatggttctttcctttctccaaatcggcagaagttgtagagtcggcggtcgaggatagatgcagaaagccatgtgcagtatagagtgcctgaaaacatttttgtgactgattctgtctgtcgcatttcaagttccggtttcagtgtaatattgtaagcagatttgagtggaggcgtaatgaagtgcctaattgtttatagcactatagttctgtacaaccagtagccttgtctatgagactacgaagcagaaatactgatcatgtgttgacatgatagaagaaagaaaaaaaatggaagactaagatatgctcaaaagaagaaggaaaaaaaacaaacaaacttgtcagtggctagctcagtgccgcgcttagaaacctggatgtttatctgcatttgggctttgacgctatcctgacgctcacagcatgtaaagtaaagcaaacagtggatttaggaggtgacactagaaaaggaaactgcagcttttgctacggtggcggcgctcgcaagccacagtggaggaggctaaaaggatggagaggaagagcaacgacggaggaag

SEQ ID NO: 1646 - DNA, 2455 bp, Zea Mays
ctactttccctgtgctgccaaactactggctgaaagaggtgacggtggagaagcatcaactcagcaaactttcagaggaaccatgaactggccatgttccccttcggcagatttgctctggtgtcttgttcctttcccattccaggctctaacttatcatctacaacatctttcggacttagttttgacttcctggtgatattgtttagataacagccaacaagttcaatcccgcatctgttggttttcatttaccttttactcaacgattaccattgatcagtataatcatcgggtcgcttcatatatacagaagacaaacgctatgtgatatgcctaacaattttatccactccactcactgcctagtccactccaatgtccaatcgatgtttctgttctgatgggcccatggccagtggctatggtgagtacttactgaccaacgaaacgagagggagctcagtcagtgcctcctcgcctataaacaaggggccggggtctctctcctacggcgtgcgcatgctttggcttggcaaacccgattggatcttcagagaaatcgccatcccctctccctcttctcgtgcccatcgctcctctacccattcttacttgaatcttttctgacgaggaaatctgacttcgggagcggctcctccgcgttgcctggatcgcccgggatcagtattttgcttccagtcagaggtccaaaatatcaaagggatgcagaaagatgtggttgcatgatggagtaccttgcctggaaattggcaggatacacaaacatagttgtggagatggttaaaattgctggtcacttataattaccagcatcttatacgtcattgttgttcatcgccaacttattcaagtttgaaagtagaacactgagaagatggctgagaaagagaatattctaatgcagagatatgagatgggaaagttacttggaaaagggagttttgccaaagtttaccatgctcgcaatgttaagacttcagaaagcgttgctatcaaggtgattgacaaagataagatcaagaagtgtggtcttatggatcaaataattcaagagatttcggtgatgaagttggtaaaacatccaaacattgtccaattgtatgaggttatggctaccaaaaccaagatatattttgtgatagagtatgtcaagggaggagagttgttcaaaaaggttcaacgtggaaggttaaaagaagatgttgctcgtacatatttccaacaattgatcagtgctgttgacttctgccatactagacaagtttatcatagagatctaaagcccgaaaatcttcttcttgacggaagtcacaacttaaagatttcagactttggtttgagtgcacttccaaactgcaagagaaaagatgggttactccacacaatttgtgggactcctgcatatgttgctccagaagtaattagtcaaaaaggatatgatggtgcaaaagctgacatatgggcttgtggagtgatcctctatgtgttgttggcgggctatcttcctttccaagacaagaacatgatggacatgtataagaaaatttgcaaagcagaactcaaatggccaagttggttttcttcagatgttcgaaagcttctgcggcgcatccttcatccaaaccctaatagacgaatatctattgaagaaataaggactcatccttggtttagaattggtcttgatgcaagattgtttgattctacaacgagagattatgtgcctagtgacatggatttggctttgaattccttaaatagcaatatggtcgagtgtaattcagcggcagagaaactgactattttgaatgcttttgatatcatctccctgtctaacgggtttgatctctctggtatatttgagaactcaaacaaggagtctaaatttatgtctaccaacacagctatgacaattatcacaaagctaatggaagttgcaaagagcctggatctgaaggttataacaaaaactggtggattgttgaatatggaagctgccaaatcaggaataaaaggtgtgatgtctataaatgctgagatatttcaaatcacaccaaattatcatctcgtggagatcaagaaaatcaatggtgacatccttgagtatcataactttatgaaccaaagcatgagaccggcactagaagatattgtgtgggcatggcatggtgaacaacctgacgagaagtagactcatcaactttagataatcatcaacctacaaccttagatattgtggcagctttaatgctattagaaagtgtatcaggcattcaggccaaaaaaatgtcatgggacttaataatattacttatatgttgtttttattctcacgttcatgcagtggaatgttctttctgttgaccaatactactggaacatggtttctatctcaagggaatattttcataatcaattactttgattggtg

SEQ ID NO: 1647 - DNA, 1994 bp, Zea Mays
gagctcagtcagtgcctcctcgcctataaacaaggggccggggtctctctcctacggcgtgcgcatgctttggcttggcaaacccgattggatcttcagagaaatcgccatcccctctccctcttctcgtgcccatcgctcctctacccattcttacttgaatcttttctgacgaggaaatctgacttcgggagcggctcctccgcgttgcctggatcgcccgggatcagtattttgcttccagtcagaggtccaaaatatcaaagggatgcagaaagatgtggttgcatgatggagtaccttgcctggaaattggcaggatacacaaacatagtggagatggttaaaattgctggtcacttataattaccagcatcttatacgtcattgttgttcatcgccaacttattcaagtttgaaagtagaacactgagaagatggctgagaaagagaatattctaatgcagagatatgagatgggaaagttacttggaaaagggagttttgccaaagtttaccatgctcgcaatgttaagacttcagaaagcgttgctatcaaggtgattgacaaagataagatcaagaagtgtggtcttatggatcaaataattcaagagatttcggtgatgaagttggtaaaacatccaaacattgtccaattgtatgaggttatggctaccaaaaccaagatatattttgtgatagagtatgtcaagggaggagagttgttcaaaaaggttcaacgtggaaggttaaaagaagatgttgctcgtacatatttccaacaattgatcagtgctgttgacttctgccatactagacaagtttatcatagagatctaaagcccgaaaatcttcttcttgacggaagtcacaacttaaagatttcagactttggtttgagtgcacttccaaactgcaagagaaaagatgggttactccacacaatttgtgggactcctgcatatgttgctccagaagtaattagtcaaaaaggatatgatggtgcaaaagctgacatatgggcttgtggagtgatcctctatgtgttgttggcgggctatcttcctttccaagacaagaacatgatggacatgtataagaaaatttgcaaagcagaactcaaatggccaagttggttttcttcagatgttcgaaagcttctgcggcgcatccttcatccaaaccctaatagacgaatatctattgaagaaataaggactcatccttggtttagaattggtcttgatgcaagattgtttgattctacaacgagagattatgtgcctagtgacatggatttggctttgaattccttaaatagcaatatggtcgagtgtaattcagcggcagagaaactgactattttgaatgcttttgatatcatctccctgtctaacgggtttgatctctctggtatatttgagaactcaaacaaggagtctaaatttatgtctaccaacacagctatgacaattatcacaaagctaatggaagttgcaaagagcctggatctgaaggttataacaaaaactggtggattgttgaatatggaagctgccaaatcaggaataaaaggtgtgatgtctataaatgctgagatatttcaaatcacaccaaattatcatctcgtggagatcaagaaaatcaatggtgacatccttgagtatcataactttatgaaccaaagcatgagaccggcactagaagatattgtgtgggcatggcatggtgaacaacctgacgagaagtagactcatcaactttagataatcatcaacctacaaccttagatattgtggcagctttaatgctattagaaagtgtatcaggcattcaggccaaaaaaatgtcatgggacttaataatattacttatatgttgtttttattctcacgttcatgcagtggaatgttctttctgttgaccaatactactggaacatggtttctatctcaagggaatattttcataatcaattactttgattggtg

SEQ ID NO: 1648 - DNA, 1870 bp, Zea Mays
tgccactgcaattaacggaccttctacgtgggccactcttcctcacatcgcctccctcgacgatggccgccgccaccgccgccgccgccacggcgtcggcttcgtgtcttctccggaggtctatatcctctgcattcctcgcgaagcgcgcggtccctagcattccgcgtacaactctctgctattcctcctccgcatccgccagactcaaaccaacgccgtccctgtctccgcctgtcacgtccgccaacgatggaggcggcgggatgaggtgggagtcagcgcgcaagaagagggtggtgctccgcatcggctacgtcggcactgattaccgagggcttcaaaagcagcaagagcttggcgtggattcgaccattgagtcagtcctggaatctgccatcttcaagtccgggggtattctcgagagtaattatggaaaactgcaaaagattgggtgggagaggagtagccgaactgataaagggaatggactaattgcaggtacactcattggctacaatgatttcccttaagatggaaatccctgatagagcatgggaggatgatcctgatggtattgctcttgccagcttcattaactcaaatttgccggacaatgtgagggtttttagtatattgcctgcacaaaggagttttgatgtaaggagggagtgcttatatcgtgagtacttctatcttcttcctgctgaaattattggaattaaagatgactatagctctgaagaaatgcaagagcacttgtcagaattcaacaaaatactgaaaggttttgagggaaaccatccattccataattacactgcacgtgccaagtataggaaggttctcgcgggaagacacagaagggccaaaggagcaagctcggcgttgaagtccatgtcctctgacactggcatggcagaaagctcttctgaagaaagcacttctccagatcacgatgaggacttgaatatttcatcaatctttgactctggtataccagaagacactcgtgtgaatggtattctgaagctttctgaggatcggctgcagattcaagctaggtggctgcatgagcctgacgaaagcgatagattaaacgcttcacatttcagagatatcattacctgttcctgtggagacttgcaaacttcatcagggattcagttcgttgagttgaccatatgcggggtatctttcatgctacatcagatccggaaaatggttggaaccgccgtgacggtgaagcgtggactactaccaagagacatcatagagctgtccctcgcgaagttctccagaatcgttctaccaatagccccttcagaggtcctggtcctcaaggacaacagtttctgcacgaagagcaagggagggaggatcgttcgccccgggatccagtccatgaacaagtcggaagcaaccaggaagggggtcgaggagttctacagggcagcgctcctgccagaagtagcgaagttcctggacccctctctgccgccgtggaaggagtggctggagaacctggacaggttctcgggcataccgggttcgcagctggacgaagtcagggaggcgtatcgagcgtggagggatgattacgaccgagcgaagatggctagaaactaggagtgctggcagtgtcgcaaggtggatgaactacctagcagtgaacaatgatgatttatatatactagttcgcttgatgtttatatattgagattcatacatatgcagcccgtcacgcagtgcaagcagcgcgcgggcactgctgttgttgttgggttgatactagctcaggagcaagctagtgttctgtactcacgtcacgtggaggcattccaatggcgaggcacatgcacggacggac

SEQ ID NO: 1649 - DNA, 1767 bp, Zea Mays
tgccactgcaattaacggaccttctacgtgggccactcttcctcacatcgcctccctcgacgatggccgccgccaccgccgccgccgccacggcgtcggcttcgtgtcttctccggagactcaaaccaacgccgtccctgtctccgcctgtcacgtccgccaacgatggaggcggcgggatgaggtgggagtcagcgcgcaagaagagggtggtgctccgcatcggctacgtcggcactgattaccgagggcttcaaaagcagcaagagcttggcgtggattcgaccattgagtcagtcctggaatctgccatcttcaagtccgggggtattctcgagagtaattatggaaaactgcaaaagattgggtgggagaggagtagccgaactgataaaggggtacactcattggctacaatgatttcccttaagatggaaatccctgatagagcatgggaggatgatcctgatggtattgctcttgccagcttcattaactcaaatttgccggacaatgtgagggtttttagtatattgcctgcacaaaggagttttgatgtaaggagggagtgcttatatcgtgagtacttctatcttcttcctgctgaaattattggaattaaagatgactatagctctgaagaaatgcaagagcacttgtcagaattcaacaaaatactgaaaggttttgagggaaaccatccattccataattacactgcacgtgccaagtataggaaggttctcgcgggaagacacagaagggccaaaggagcaagctcggcgttgaagtccatgtcctctgacactggcatggcagaaagctcttctgaagaaagcacttctccagatcacgatgaggacttgaatatttcatcaatctttgactctggtataccagaagacactcgtgtgaatggtattctgaagctttctgaggatcggctgcagattcaagctaggtggctgcatgagcctgacgaaagcgatagattaaacgcttcacatttcagagatatcattacctgttcctgtggagacttgcaaacttcatcagggattcagttcgttgagttgaccatatgcggggtatctttcatgctacatcagatccggaaaatggttggaaccgccgtgacggtgaagcgtggactactaccaagagacatcatagagctgtccctcgcgaagttctccagaatcgttctaccaatagccccttcagaggtcctggtcctcaaggacaacagtttctgcacgaagagcaagggagggaggatcgttcgccccgggatccagtccatgaacaagtcggaagcaaccaggaagggggtcgaggagttctacagggcagcgctcctgccagaagtagcgaagttcctggacccctctctgccgccgtggaaggagtggctggagaacctggacaggttctcgggcataccgggttcgcagctggacgaagtcagggaggcgtatcgagcgtggagggatgattacgaccgagcgaagatggctagaaactaggagtgctggcagtgtcgcaaggtggatgaactacctagcagtgaacaatgatgatttatatatactagttcgcttgatgtttatatattgagattcatacatatgcagcccgtcacgcagtgcaagcagcgcgcgggcactgctgttgttgttgggttgatactagctcaggagcaagctagtgttctgtactcacgtcacgtggaggcattccaatggcgaggcacatgcacggacggac

SEQ ID NO: 1650 - DNA, 1735 bp, Zea Mays
tgcaattaacggaccttctacgtgggccactcttcctcacatcgcctccctcgacgatggccgccgccaccgccgccgccgccacggcgtcggcttcgtgtcttctccggaggtctatatcctctgcattcctcgcgaagcgcgcggtccctagcattccgcgtacaactctctgctattcctcctccgcatccgccagactcaaaccaacgccgtccctgtctccgcctgtcacgtccgccaacgatggaggcggcgggatgaggtgggagtcagcgcgcaagaagagggtggtgctccgcatcggctacgtcggcactgattaccgagggcttcaaaagcagcaagagcttggcgtggattcgagtacactcattggctacaatgatttcccttaagatggaaatccctgatagagcatgggaggatgatcctgatggtattgctcttgccagcttcattaactcaaatttgccggacaatgtgagggtttttagtatattgcctgcacaaaggagttttgatgtaaggagggagtgcttatatcgtgagtacttctatcttcttcctgctgaaattattggaattaaagatgactatagctctgaagaaatgcaagagcacttgtcagaattcaacaaaatactgaaaggttttgagggaaaccatccattccataattacactgcacgtgccaagtataggaaggttctcgcgggaagacacagaagggccaaaggagcaagctcggcgttgaagtccatgtcctctgacactggcatggcagaaagctcttctgaagaaagcacttctccagatcacgatgaggacttgaatatttcatcaatctttgactctggtataccagaagacactcgtgtgaatggtattctgaagctttctgaggatcggctgcagattcaagctaggtggctgcatgagcctgacgaaagcgatagattaaacgcttcacatttcagagatatcattacctgttcctgtggagacttgcaaacttcatcagggattcagttcgttgagttgaccatatgcggggtatctttcatgctacatcagatccggaaaatggttggaaccgccgtgacggtgaagcgtggactactaccaagagacatcatagagctgtccctcgcgaagttctccagaatcgttctaccaatagccccttcagaggtcctggtcctcaaggacaacagtttctgcacgaagagcaagggagggaggatcgttcgccccgggatccagtccatgaacaagtcggaagcaaccaggaagggggtcgaggagttctacagggcagcgctcctgccagaagtagcgaagttcctggacccctctctgccgccgtggaaggagtggctggagaacctggacaggttctcgggcataccgggttcgcagctggacgaagtcagggaggcgtatcgagcgtggagggatgattacgaccgagcgaagatggctagaaactaggagtgctggcagtgtcgcaaggtggatgaactacctagcagtgaacaatgatgatttatatatactagttcgcttgatgtttatatattgagattcatacatatgcagcccgtcacgcagtgcaagcagcgcgcgggcactgctgttgttgttgggttgatactagctcaggagcaagctagtgttctgtactcacgtcacgtggaggcattccaatggcgaggcacatgcacggacggac

SEQ ID NO: 1651 - DNA, 1772 bp, Zea Mays
tgcaattaacggaccttctacgtgggccactcttcctcacatcgcctccctcgacgatggccgccgccaccgccgccgccgccacggcgtcggcttcgtgtcttctccggaggtctatatcctctgcattcctcgcgaagcgcgcggtccctagcattccgcgtacaactctctgctattcctcctccgcatccgccagactcaaaccaacgccgtccctgtctccgcctgtcacgtccgccaacgatggaggcggcgggatgaggtgggagtcagcgcgcaagaagagggtggtgctccgcatcggctacgtcggcactgattaccgagggcttcaaaagcagcaagagcttggcgtggattcgaccattgagtcagtcctggaatctgccatcttcaagtccgggggtattctcgagagtaattatggaaaactgcaaaagattgggtgggagaggagtagccgaactgataaaggggtacactcattggctacaatgatttcccttaagatggaaatccctgatagagcatgggaggatgatcctgatggagttttgatgtaaggagggagtgcttatatcgtgagtacttctatcttcttcctgctgaaattattggaattaaagatgactatagctctgaagaaatgcaagagcacttgtcagaattcaacaaaatactgaaaggttttgagggaaaccatccattccataattacactgcacgtgccaagtataggaaggttctcgcgggaagacacagaagggccaaaggagcaagctcggcgttgaagtccatgtcctctgacactggcatggcagaaagctcttctgaagaaagcacttctccagatcacgatgaggacttgaatatttcatcaatctttgactctggtataccagaagacactcgtgtgaatggtattctgaagctttctgaggatcggctgcagattcaagctaggtggctgcatgagcctgacgaaagcgatagattaaacgcttcacatttcagagatatcattacctgttcctgtggagacttgcaaacttcatcagggattcagttcgttgagttgaccatatgcggggtatctttcatgctacatcagatccggaaaatggttggaaccgccgtgacggtgaagcgtggactactaccaagagacatcatagagctgtccctcgcgaagttctccagaatcgttctaccaatagccccttcagaggtcctggtcctcaaggacaacagtttctgcacgaagagcaagggagggaggatcgttcgccccgggatccagtccatgaacaagtcggaagcaaccaggaagggggtcgaggagttctacagggcagcgctcctgccagaagtagcgaagttcctggacccctctctgccgccgtggaaggagtggctggagaacctggacaggttctcgggcataccgggttcgcagctggacgaagtcagggaggcgtatcgagcgtggagggatgattacgaccgagcgaagatggctagaaactaggagtgctggcagtgtcgcaaggtggatgaactacctagcagtgaacaatgatgatttatatatactagttcgcttgatgtttatatattgagattcatacatatgcagcccgtcacgcagtgcaagcagcgcgcgggcactgctgttgttgttgggttgatactagctcaggagcaagctagtgttctgtactcacgtcacgtggaggcattccaatggcgaggcacatgcacggacggac

SEQ ID NO: 1652 - DNA, 2176 bp, Zea Mays
cacctaccaccacccgatgcagaatgcacgcgtgagatccgcccatcaaagctccctggttccctgcctcctctgtatactaactctcctctctcccagagtcccggtcagctcgactgctccagttcttcccatttcccagccgccgcggcgccacgcagacctagcagagaaacacccacccgagatggcgatggctctgcgccgccttgcgggcgtgtccggatcgccgtcggcctcctctgccgcggccacggtgctactccggtcggcgctgacccgcccgatctccaccggcttccgcgaggagcgcgacaccttcggtcccatccaagtccccaacgacaagctgtggggcgcgcagacgcagagatcgctgcagaactttgacattggcggggagcgtgagaggatgcccgttcccatcatccgtgcctttggcgtgctaaaaaagtgcgccgctaaggtgaatatggactatggccttgatccaacaatagggaaggccataatacaggcagctgaggaggtcgcagagggaaagttggatgatcacttcccacttgttatctggcaaactggcagtggcacacaaagcaacatgaatgccaatgaggtaattgcaaatagggcatctgagatccttggacacaagcgcggtgagaagtttgtgcacccaaatgaccatgtgaataggtcacaatcttcaaatgatacatttcccactgtaatgcatatagcgacggccgttgagatacattcgaggtttatcccaagtttgcaacagttgcatgattcacttcattcgaaaactattgagtttaaagacataattaaaattggacgtacacatacccaagatgccaccccattgactcttggccaagaattcagtggctacactacacagattctatgcaggtcaaatatggaattgaccgcattaattgtacattacctcggatgtaccagcttgctcaaggtggaactgcagttggaactggcttgaacaccaagaaaggatttgatgccaaaatagctgctgcagtggctgaggaaacaaacctaccctttgtgacagcagagaacaagtttgaagctttggcagcacatgacgcttttgttgagagcagtggtgccgtaaatacaatttctgcatctcttatgaagatagcaaacgacatacgtttgctaggaagtggtcctcggtgtggtcttggtgaactaatcctaccagaaaatgagcctgggagcagcattatgcctgggaaagttaatccaacccagtgtgaggctctgacaatggtttgtgcacaggttatgggtaatcatgttggtgttacaattggtggtgccaatgggcattttgaactgaatgtttttaagccaatgatcgcagccggattacttcgatcattgaggttgttaggggatgcatccgtgtcctttgagaaaaattgtgtcaggggaattcaagcaaaccacaagagaatttcacaacttttgcatgagtctctgatgttagtgacatctttgaaccctaaaattggctatgacaatgctgcagctgttgctaagaaagcccacaaagaaggaaccacgttgaaggaagctgcattagaccttggagtattaacggagcaagaattccatgagcttgtcgtcccggagaaaatgattggtccttctgattgataaccccatgttcactatgtttctttgaagcattcaggttgccacatccgcgagttctggtggccctgtgtttccaagttaatgattctagcgcacccataaataaagcaaataatttttcatatggtcattaggtcctcaccgtaccgcactagagaaatgatttttgcatggcggatggtatctgagaaaacagttgtattcttgttcaaatagggagcagtgcactttgattcatgaggcgccttccattatcttggcatcagtcaaccttttcttgccaagtagctagtgctatgtaacaagtgacatggcaaccatgtatagaaattatttgcatgggtttgtgttcttgccaggtagctaatgttatgtaataagtgacaaggaaacaatgtcatgaattatttgcattgggttttgacgagtgaaatagaaatatacgccctgttttagttttctttttagggctagtttgacc

SEQ ID NO: 1653 - DNA, 2060 bp, Zea Mays
tccctggttccctgcctcctctgtatactaactctcctctctcccagagtcccggtcagctcgactgctccagttcttcccatttcccagccgccgcggcgccacgcagacctagcagagaaacacccacccgagatggcgatggctctgcgccgccttgcgggcgtgtccggatcgccgtcggcctcctctgccgcggccacggtgctactccggtcggcgctgacccgcccgatctccaccggcttccgcgaggagcgcgacaccttcggtcccatccaagtccccaacgacaagctgtggggcgcgcagacgcagagatcgctgcagaactttgacattggcggggagcgtgagaggatgcccgttcccatcatccgtgcctttggcgtgctaaaaaagtgcgccgctaaggtgaatatggactatggccttgatccaacaatagggaaggccataatacaggcagctgaggaggtcgcagagggaaagttggatgatcacttcccacttgttatctggcaaactggcagtggcacacaaagcaacatgaatgccaatgaggtaattgcaaatagggcatctgagatccttggacacaagcgcggtgagaagtttgtgcacccaaatgaccatgtgaataggtcacaatcttcaaatgatacatttcccactgtaatgcatatagcgacggccgttgagatacattcgaggtttatcccaagtttgcaacagttgcatgattcacttcattcgaaaactattgagtttaaagacataattaaaattggacgtacacatacccaagatgccaccccattgactcttggccaagaattcagtggctacactacacaggtcaaatatggaattgaccgcattaattgtacattacctcggatgtaccagcttgctcaaggtggaactgcagttggaactggcttgaacaccaagaaaggatttgatgccaaaatagctgctgcagtggctgaggaaacaaacctaccctttgtgacagcagagaacaagtttgaagctttgcattctgggggcatgcactaaatatttccaacacaatcatagtggtcctcggtgtggtcttggtgaactaatcctaccagaaaatgagcctgggagcagcattatgcctgggaaagttaatccaacccagtgtgaggctctgacaatggtttgtgcacaggttatgggtaatcatgttggtgttacaattggtggtgccaatgggcattttgaactgaatgtttttaagccaatgatcgcagccggattacttcgatcattgaggttgttaggggatgcatccgtgtcctttgagaaaaattgtgtcaggggaattcaagcaaaccacaagagaatttcacaacttttgcatgagtctctgatgttagtgacatctttgaaccctaaaattggctatgacaatgctgcagctgttgctaagaaagcccacaaagaaggaaccacgttgaaggaagctgcattagaccttggagtattaacggagcaagaattccatgagcttgtcgtcccggagaaaatgattggtccttctgattgataaccccatgttcactatgtttctttgaagcattcaggttgccacatccgcgagttctggtggccctgtgtttccaagttaatgattctagcgcacccataaataaagcaaataatttttcatatggtcattaggtcctcaccgtaccgcactagagaaatgatttttgcatggcggatggtatctgagaaaacagttgtattcttgttcaaatagggagcagtgcactttgattcatgaggcgccttccattatcttggcatcagtcaaccttttcttgccaagtagctagtgctatgtaacaagtgacatggcaaccatgtatagaaattatttgcatgggtttgtgttcttgccaggtagctaatgttatgtaataagtgacaaggaaacaatgtcatgaattatttgcattgggttttgacgagtgaaatagaaatatacgccctgttttagttttctttttagggctagtttgacc

SEQ ID NO: 1654 - DNA, 1224 bp, Zea Mays
gtcaatcaccaattgcctctggaagaaaattcatgtaaccttgccatccagagtgcaatgaataacccagatttgatgccaaaatagctgctgcagtggctgaggaaacaaacctaccctttgtgacagcagagaacaagtttgaagctttggcagcacatgacgcttttgttgagagcagtggtgccgtaaatacaatttctgcatctcttatgaagatagcaaacgacatacgtttgctaggaagtggtcctcggtgtggtcttggtgaactaatcctaccagaaaatgagcctgggagcagcattatgcctgggaaagttaatccaacccagtgtgaggctctgacaatggtttgtgcacaggttatgggtaatcatgttggtgttacaattggtggtgccaatgggcattttgaactgaatgtttttaagccaatgatcgcagccggattacttcgatcattgaggttgttaggggatgcatccgtgtcctttgagaaaaattgtgtcaggggaattcaagcaaaccacaagagaatttcacaacttttgcatgagtctctgatgttagtgacatctttgaaccctaaaattggctatgacaatgctgcagctgttgctaagaaagcccacaaagaaggaaccacgttgaaggaagctgcattagaccttggagtattaacggagcaagaattccatgagcttgtcgtcccggagaaaatgattggtccttctgattgataaccccatgttcactatgtttctttgaagcattcaggttgccacatccgcgagttctggtggccctgtgtttccaagttaatgattctagcgcacccataaataaagcaaataatttttcatatggtcattaggtcctcaccgtaccgcactagagaaatgatttttgcatggcggatggtatctgagaaaacagttgtattcttgttcaaatagggagcagtgcactttgattcatgaggcgccttccattatcttggcatcagtcaaccttttcttgccaagtagctagtgctatgtaacaagtgacatggcaaccatgtatagaaattatttgcatgggtttgtgttcttgccaggtagctaatgttatgtaataagtgacaaggaaacaatgtcatgaattatttgcattgggttttgacgagtgaaatagaaatatacgccctgttttagttttctttttagggctagtttgacc

SEQ ID NO: 1655 - DNA, 830 bp, Zea Mays
catacttcaatacggttaatttactatagggactctttctagcctcataaccctcttgttgatttagtcattgaggttgttaggggatgcatccgtgtcctttgagaaaaattgtgtcaggggaattcaagcaaaccacaagagaatttcacaacttttgcatgagtctctgatgttagtgacatctttgaaccctaaaattggctatgacaatgctgcagctgttgctaagaaagcccacaaagaaggaaccacgttgaaggaagctgcattagaccttggagtattaacggagcaagaattccatgagcttgtcgtcccggagaaaatgattggtccttctgattgataaccccatgttcactatgtttctttgaagcattcaggttgccacatccgcgagttctggtggccctgtgtttccaagttaatgattctagcgcacccataaataaagcaaataatttttcatatggtcattaggtcctcaccgtaccgcactagagaaatgatttttgcatggcggatggtatctgagaaaacagttgtattcttgttcaaatagggagcagtgcactttgattcatgaggcgccttccattatcttggcatcagtcaaccttttcttgccaagtagctagtgctatgtaacaagtgacatggcaaccatgtatagaaattatttgcatgggtttgtgttcttgccaggtagctaatgttatgtaataagtgacaaggaaacaatgtcatgaattatttgcattgggttttgacgagtgaaatagaaatatacgccctgttttagttttctttttagggctagtttgacc

SEQ ID NO: 1656 - DNA, 923 bp, Zea Mays
ccacaatgcaaccaaggcgacagcaacctcgatcgtagctacagctagcagccgcggcgcagcgtagactgctcggctgatccgctatactataaaacgggatcgaacccacacgcatcctcccagcaggtggctgtctgtggctctcgccttggtatatcctcctccgaccgggctccggcaatccgtcatggctgccgccagctccgtccacggcttcaccgtcaaggacgcaagcggcgaagacgtgcacctgagcaccttcaagggcaaggttctcctcatcgtcaacgtcgcatcacagtgtggcctgaccaactccaactacacggagctcgcccagctacacgagatgtacaaggaccaggatttcgagatccttgcgtgttgcgttcccgtgcaaccagttcggcgggcaggagcccggcacgagcgaggagatcgcccagctcgtctgcgctcgcttcaaggccaagtacccgattcttcacaaggtcgatgtgaacggcgaggacgctgcgcccatctacaagtttctgaagtccagcaagaccggccccatgggcgaagacatcaagtggaacttcgccaagttcttggtggacagacaggggcatgtcgccgagcgaaggacatcaagaagctgctcggcgggagctattgaattgaatatccggagacaatagatagatgcatgcactgccacttgaaacgcctgaaataagcttgctatgtttctaccagatagttttgataaataacatggtcgtcgcctcgtttgtaaattagcatgcatcagaatcggttgaaagaagcttgtaaactgtaaccgtgcatggctccttccttcttccgaattatatattgggatagcaatctatttctctcgcaatctaaaaaaactctctagcaaatattgatct

SEQ ID NO: 1657 - DNA, 1109 bp, Zea Mays
ctttgatccagggtcgaattctgttctggacatatggagcaaaggcaatgaggccgcgcttatattagtcggcgtgaactacaatgccgggcagctggaggaagatgctgagatgatggcgcaacaccaaccacaatgcaaccaaggcgacagcaacctcgatcgtagctacagccagcagagccgcggcgcagcgtagactgctcggctgatccgctatataaaacgggatcgaacccccacacgcatctcccagcaggtggctgtctctgtggctctcgatcgccttggtatatcctcctccgaccgggctccggcaatccgccatggctgccgccagctccgtccacggcttcaccgtcaaggacgcaagcggcgaagacgtgcacctgagcaccttcaagggcaaggttctcctcatcgtcaacgtcgcatcacagtgtggcctgaccaactccaactacacggagcttgcccagctacacgagatgtacaaggaccaggatttcgagatccttgcgttcccgtgcaaccagttcggcgggcaggagcccggcacgagcgaggagatcgtccagctcgtctgcgctcgcttcaaggccaagtacccgattcttcacaaggtcgatgtgaacggcgaggacgctgcgcccatctacaagtttctgaaatccagcaagaccggccccatgggcgaagacatcaagtggaacttcgccaagttcttggtggacagacaggggcatgtcgccgagcggtatgctccgaccacctacccactcagcatccagaaggacatcaagaagctgctcggcgggagctattgaattgaatatccggagacaatagatagatgcatgcactgccacttgaaacgcctgaaataagcttgctatgtttctaccagatagttttgataaataacatggtcgtcgcctcgtctttcttgtagtactagtttgtaaactaattagcatgcatcagaatcggttgaaattaaataagcttgtaaactgtaaccgtgcatggctccttccttcttccgaattatatattgggatagcaatctatttctcccacaaactaaaaaaaaaatccctagcaaatat

SEQ ID NO: 1658 - DNA, 1775 bp, Zea Mays
ttcccgaagtggacagatactcagataccccaacggaggggaaaggaaaaaaatcaaacgagaaggaagccaccgctccccaatcgcctgcttgccttcccatcctcctcgtagatctccggcaccgggcaccatgagctcctactccggcgaccgctcctcctcctcctccttgcgccccaccaacacctccttcgactcctacaagttcgacttcggcatcaactcctcccgctcctccggctctcgccccctccgcgaccagcggccgggcgcggctaccaaccctccaacgaggcccgccaccggcgccacgtggatgcaccagcccgccagcgccaagccgtcgtggacccaccagccttcccccgccgcggcgtcggcgcccaccatggcggggcctggatccgggccaacctccatggtcggcgacatctttggccggagctggtcctccgccgcgccctcctctgggttcggcatccctcaggccaacaaccccggcctcttcagcgatctcctcggctccgcgctcggctcctcccgctcccagtccaacgcgccgctcagatccgccgccgcgccacaggcatccaggccagccggtgagaagcccaatgtcaacgctagcagctctcccttctcgatgggcggcatggcgggcgcgctcccgaaaactacgggagcaccgatgggctccggtggatacggcgttggtggccggccgatgaaacccgtgggcatggccgcgacggctgctgcgcagccgatggggcagcagagggatccatttggctcaatagacccctttgccgcaaagcctgggtccatgaacgcggtgaagcaggccaattcggtcaagccggatcagggatttggagctttccagggtgtgaattccagtgtcgctgctggatttgggagcttccagagtactgatgctggatctggtggtttccaaagcgctggcacgaccacaccttctaactttacaccaccgccagcaccagcttcaatgcctactcctgtgtctgcagcagttaactcaagcatggatcctctggataatctttttgcttcaaccacaagtgcaccgactgcagctgccgctagtaatggtgacagtggcggtgacatgtttggtgagatggatggttgggtcgatgtggaggcagagtttgctggtggtgatagtggtggcacaaccacagagctggatggcctgccaccgccaccatccggattgacaatatcagctgccaaggccaaagggatggatagctacaagggagggcagtatgctgatgctatcaagtggttgtcatgggctgttgttctaattgagaaatcagggaaagatgctgacattgttgaggtgttgtcttcaagagcttcttcatataaggaggttggtgagtacaagaaggccatcactgactgctcgaaggtgctggatcaagataaggataatgtctcagtgctagtgcagcgtgctctcctttatgaaagcacagagaaatataggcttggtgccgaggacctgcgtttggttctgaagattgatcctacaaataggcttgccaggagtacaattcaccgcctgaacaagttggctgactagtgatgtctttctagcgccctgatgtaatattgtactaccactgtactgcatccttctcacatgagatattgagatctcacatggaatgacgttcttttggcacctccagcagttaaatgattacttctcaaatgatttttttcacgttatccag

SEQ ID NO: 1659 - DNA, 3836 bp, Zea Mays
acgcacgcaagcacccctcctgttccatttcaccacggccgcggcctttgtgtggctgtggcctccgtctcgtgctatctcttcttcgagttcttccgcctcccctccccttcctccccccctcggcaaagcccgccttctctctcggtctcgacgcgacccgccgctccctgcggctgcgcgcccaattcacgccccactggaggcggcggcgagcgcacgagtgcctcagcgccgccgatgaggctgcgccgcgccatgcagacctcgccgcccaccgtgtccgcgtcgtctctagagtgcgtgagctcgtgcagggccgcctcgtggaaggggggcggaaggccctacgaatgcagcgtactcttgtgcgcgtggaacgcgccgcgcgcgctcacgggcgcgctcgccagcaccgcgcagtgctcgtcgtgcggccacgccgaggccggaggcggctggaggaggcgcgggcggtcgcgtcggagtaacaactcgttaccgcgcatcaccctggatgaggacatcaatagagggaaatttggttatgatccatcgcgtgcctactctacaagttttgtcagatcttggtctactattgttgaccgaacatggagatcttactgctattcatcatctgattctttcatctctccagagactttgtgggaggatctcaaaccagctgtttcatatcttcaacctgaagagttaaaatttgtgcatgatgctttgaagttggcatatgaagcacacagtggacaaaaacggcgaagtggagaaccattcattattcatcctgttgaagttgctcgtattcttggagagcatgaacttgactgggaatccatcgctgctggtttattgcatgacactgttgaagatacgaatgtggttacttttgaaagaatagaaaatgagtttgggccaactgtgcgacgtattgttgaaggggagacaaaggtgtctaagttggggaaacttcagtgtaaaagtgagggtagcacaaaacaagatattaaagcagaagacctaaggcagatgtttcttgccatgacagaagaggttcgtgtgattattgtcaaactggcagacaggttgcataacatgcgcactctcacacatatgcctcagcacaagcagtatgccatcgccgtggagacactgcaggtctttgcccctttagcaaaactccttgggatgtaccggataaagtctgagctggaatatctatccttcatgtacgttaaccccactggttttgctgaactaaggaaaagagttgaagacttgtacaagtcccatgaacaagaattggaagaggcaaatagaattttaaggcaaaagattgctgaggatgagtttctcgatcttgttagtgttgaaaccgaagtgcgttcagtttacaaagagctctacagcatttacaaaactacactcaaatccaagagttcaataaatgaggtgaatcaggttgctcagctgagaatcatcataaaaccaaaatcttgcaatggtgttggcccattgtgcactgcacaacagatctgctatcatgttcttggccttgttcatggcatatggacacccattcctcaagctgtggaagattacattgcaactccaaaacctaatgggtaccaaagtctacacacaacagtgataccatttcttaacgagagtatgttccatttggaagttcagataagaacagaagatatggatttaatagcagaaagaggcattgctgcacattacagtggaagaagggtggcttctggacctgttggccttggaatatcaagtggaagaaatgccaaggggaaagtaatctgcttgaacaacacagactttgctctgaggattggttggctcaatgcaatccgcgagtggcaagaagagtttgttggtaatatgagttctagggaatttgttgatactatcacccgagatcttctaggaagccgtgtctttgtgtttactcctaaaggcgagattaaaaacctgcctaagggagccacggtggttgattatgcttatctgattcatactgaaatcggcaacaaaatgattgcagcaaaggtgaatggcaatctggtttcaccaattcatgtacttgcaaatgctgaagtggtggagattataacttatgataaattatctagtaagtatgcattccagcgtcaccagcagtggctacagcacgcaaaaactcgcagtgctagacacaaaattatgagattcttaagggagcaagctgctctttctgctgctgaaattactgctgacgcagttaatagttttgttgctgatcttgaagatgaaagtgatagtgagctttcacttccaagcaccaagaaagaagatagtaaattcaactgggagaagatattaagttctgataaattattctttgtcaacaaaagtagtgatggctttttacctgttaataatgtctatccaaaggtcaatgggaagcaaaacaaaactgttaaggatttgggcatcaaaatcaatggtcattctacaattcgaggtgatagcttcagtgagttaatgcaccctagcaattccacctgcaaggaagttttccctggtttggatgactggaaatctggtaaaatttctggttggcataatacggaaggcaactctgtccaatggctttgcatagcctgtgttgatcgaaaagggatgatggcggaggttacatctgctcttacagcttgtggaattactgtatgttcctgtgtggcagaagtcagtaaaaggaggggaatgggtgctatgctgttccattttgagggaagctatgagaacgtggtcagtgcttgtttgagtgttgacatgatttttggtgttcttggttggtctgtggggtgtagctggtgtccattgggtgctcttgagtgctaatgggtatcaagagacgtatactgcagtagttcaccactaatactatcttcctccaagatgatgataatgttggaagcaccaagacatcggtggctcaaaattttgttggtcagatccttaaaatctgggaacatagagcttgtccatattcctcattttggaaacgttcgtccgttccggagacgtgggaacaatctcgtcccccatctcatccttgtagtgttaaaatcctttttaagcacgttcccgttcctcaacctcatcgatccagaaacttggttgctaaggtcagatcatgattggacaggtgagcgagtggaatcctttacttctctgtcaaatcagaaagtgagggtgagcaaagtagaactagatatatatggttcattctgaaagtgagtgtacatagcagagtgagtagggttgggctatggctaacaaatcgtacatatgatcatgtaaaacactgttttgcattgcgaattacactgtttacattgtgtagtttgaaataagagatagagatgaataagctgccgactatggagagtcagtgcatgctgggattgattggattatacagaaggccttgtaaaagattgttaagggcggttcttctcactttgtggttcgcatatactagtttgcttaaatgtgcagctagaattttgacctggacgctaattccaaattttgtctgtgtttagtttcctacctctgcatgtaaatgttattgtatagcttcagttttgcgagtcaaaatttgagcatacttaactggcagatgcacgcttctggattacttgccatttcctgcagtatgaatggtaacttaattagaggtttggttctgatgatggtgaccctttcatgaacatctccaaataagatgatggtgaccctttttggattaattgtat

SEQ ID NO: 1660 - DNA, 3641 bp, Zea Mays
cggcaaagcccgccttctctctcggtctcgacgcgacccgccgctccctgcggctgcgcgcccaattcacgccccactggaggcggcggcgagcgcacgagtgcctcagcgccgccgatgaggctgcgccgcgccatgcagacctcgccgcccaccgtgtccgcgtcgtctctagagtgcgtgagctcgtgcagggccgcctcgtggaaggggggcggaaggccctacgaatgcagcgtactcttgtgcgcgtggaacgcgccgcgcgcgctcacgggcgcgctcgccagcaccgcgcagtgctcgtcgtgcggccacgccgaggccggaggcggctggaggaggcgcgggcggtcgcgtcggagtaacaactcgttaccgcgcatcaccctggatgaggacatcaatagagggaaatttggttatgatccatcgcgtgcctactctacaagttttgtcagatcttggtctactattgttgaccgaacatggagatcttactgctattcatcatctgattctttcatctctccagagactttgtgggaggatctcaaaccagctgtttcatatcttcaacctgaagagttaaaatttgtgcatgatgctttgaagttggcatatgaagcacacagtggacaaaaacggcgaagtggagaaccattcattattcatcctgttgaagttgctcgtattcttggagagcatgaacttgactgggaatccatcgctgctggtttattgcatgacactgttgaagatacgaatgtggttacttttgaaagaatagaaaatgagtttgggccaactgtgcgacgtattgttgaaggggagacaaaggtgtctaagttggggaaacttcagtgtaaaagtgagggtagcacaaaacaagatattaaagcagaagacctaaggcagatgtttcttgccatgacagaagaggttcgtgtgattattgtcaaactggcagacaggttgcataacatgcgcactctcacacatatgcctcagcacaagcagtctgagctggaatatctatccttcatgtacgttaaccccactggttttgctgaactaaggaaaagagttgaagacttgtacaagtcccatgaacaagaattggaagaggcaaatagaattttaaggcaaaagattgctgaggatgagtttctcgatcttgttagtgttgaaaccgaagtgcgttcagtttacaaagagctctacagcatttacaaaactacactcaaatccaagagttcaataaatgaggtgaatcaggttgctcagctgagaatcatcataaaaccaaaatcttgcaatggtgttggcccattgtgcactgcacaacagatctgctatcatgttcttggccttgttcatggcatatggacacccattcctcaagctgtggaagattacattgcaactccaaaacctaatgggtaccaaagtctacacacaacagtgataccatttcttaacgagagtatgttccatttggaagttcagataagaacagaagatatggatttaatagcagaaagaggcattgctgcacattacagtggaagaagggtggcttctggacctgttggccttggaatatcaagtggaagaaatgccaaggggaaagtaatctgcttgaacaacacagactttgctctgaggattggttggctcaatgcaatccgcgagtggcaagaagagtttgttggtaatatgagttctagggaatttgttgatactatcacccgagatcttctaggaagccgtgtctttgtgtttactcctaaaggcgagattaaaaacctgcctaagggagccacggtggttgattatgcttatctgattcatactgaaatcggcaacaaaatgattgcagcaaaggtgaatggcaatctggtttcaccaattcatgtacttgcaaatgctgaagtggtggagattataacttatgataaattatctagtaagtatgcattccagcgtcaccagcagtggctacagcacgcaaaaactcgcagtgctagacacaaaattatgagattcttaagggagcaagctgctctttctgctgctgaaattactgctgacgcagttaatagttttgttgctgatcttgaagatgaaagtgatagtgagctttcacttccaagcaccaagaaagaagatagtaaattcaactgggagaagatattaagttctgataaattattctttgtcaacaaaagtagtgatggctttttacctgttaataatgtctatccaaaggtcaatgggaagcaaaacaaaactgttaaggatttgggcatcaaaatcaatggtcattctacaattcgaggtgatagcttcagtgagttaatgcaccctagcaattccacctgcaaggaagttttccctggtttggatgactggaaatctggtaaaatttctggttggcataatacggaaggcaactctgtccaatggctttgcatagcctgtgttgatcgaaaagggatgatggcggaggttacatctgctcttacagcttgtggaattactgtatgttcctgtgtggcagaagtcagtaaaaggaggggaatgggtgctatgctgttccattttgagggaagctatgagaacgtggtcagtgcttgtttgagtgttgacatgatttttggtgttcttggttggtctgtggggtgtagctggtgtccattgggtgctcttgagtgctaatgggtatcaagagacgtatactgcagtagttcaccactaatactatcttcctccaagatgatgataatgttggaagcaccaagacatcggtggctcaaaattttgttggtcagatccttaaaatctgggaacatagagcttgtccatattcctcattttggaaacgttcgtccgttccggagacgtgggaacaatctcgtcccccatctcatccttgtagtgttaaaatcctttttaagcacgttcccgttcctcaacctcatcgatccagaaacttggttgctaaggtcagatcatgattggacaggtgagcgagtggaatcctttacttctctgtcaaatcagaaagtgagggtgagcaaagtagaactagatatatatggttcattctgaaagtgagtgtacatagcagagtgagtagggttgggctatggctaacaaatcgtacatatgatcatgtaaaacactgttttgcattgcgaattacactgtttacattgtgtagtttgaaataagagatagagatgaataagctgccgactatggagagtcagtgcatgctgggattgattggattatacagaaggccttgtaaaagattgttaagggcggttcttctcactttgtggttcgcatatactagtttgcttaaatgtgcagctagaattttgacctggacgctaattccaaattttgtctgtgtttagtttcctacctctgcatgtaaatgttattgtatagcttcagttttgcgagtcaaaatttgagcatacttaactggcagatgcacgcttctggattacttgccatttcctgcagtatgaatggtaacttaattagaggtttggttctgatgatggtgaccctttcatgaacatctccaaataagatgatggtgaccctttttggattaattgtat

SEQ ID NO: 1661 - DNA, 3657 bp, Zea Mays
cggcaaagcccgccttctctctcggtctcgacgcgacccgccgctccctgcggctgcgcgcccaattcacgccccactggaggcggcggcgagcgcacgagtgcctcagcgccgccgatgaggctgcgccgcgccatgcagacctcgccgcccaccgtgtccgcgtcgtctctagagtgcgtgagctcgtgcagggccgcctcgtggaaggggggcggaaggccctacgaatgcagcgtactcttgtgcgcgtggaacgcgccgcgcgcgctcacgggcgcgctcgccagcaccgcgcagtgctcgtcgtgcggccacgccgaggccggaggcggctggaggaggcgcgggcggtcgcgtcggagtaacaactcgttaccgcgcatcaccctggatgaggacatcaatagagggaaatttggttatgatccatcgcgtgcctactctacaagttttgtcagatcttggtctactattgttgaccgaacatggagatcttactgctattcatcatctgattctttcatctctccagagactttgtgggaggatctcaaaccagctgtttcatatcttcaacctgaagagttaaaatttgtgcatgatgctttgaagttggcatatgaagcacacagtggacaaaaacggcgaagtggagaaccattcattattcatcctgttgaagttgctcgtattcttggagagcatgaacttgactgggaatccatcgctgctggtttattgcatgacactgttgaagatacgaatgtggttacttttgaaagaatagaaaatgagtttgggccaactgtgcgacgtattgttgaaggggagacaaaggtgtctaagttggggaaacttcagtgtaaaagtgagggtagcacaaaacaagatattaaagcagaagacctaaggcagatgtttcttgccatgacagaagaggttcgtgtgattattgtcaaactggcagacaggttgcataacatgcgcactctcacacatatgcctcagcacaagcagtatgccatcgccgtggagacactgcaggtctttgcccctttagcaaaactccttgggatgtaccggataaagtctgagctggaatatctatccttcatgtacgttaaccccactggttttgctgaactaaggaaaagagttgaagacttgtacaagtcccatgaacaagaattggaagaggcaaatagaattttaaggcaaaagattgctgaggatgagtttctcgatcttgttagtgttgaaaccgaagtgcgttcagtttacaaagagctctacagcatttacaaaactacactcaaatccaagagttcaataaatgaggtgaatcaggttgctcagctgagaatcatcataaaaccaaaatcttgcaatggtgttggcccattgtgcactgcacaacagatctgctatcatgttcttggccttgttcatggcatatggacacccattcctcaagctgtggaagattacattgcaactccaaaacctaatgggtaccaaagtctacacacaacagtgataccatttcttaacgagagtatgttccatttggaagttcagataagaacagaagatatggatttaatagcagaaagaggcattgctgcacattacagtggaagaagggtggcttctggacctgttggccttggaatatcaagtggaagaaatgccaaggggaaagtaatctgcttgaacaacacagactttgctctgaggattggttggctcaatgcaatccgcgagtggcaagaagagtttgttggtaatatgagttctagggaatttgttgatactatcacccgagatcttctaggaagccgtgtctttgtgtttactcctaaaggcgagattaaaaacctgcctaagggagccacggtggttgattatgcttatctgattcatactgaaatcggcaacaaaatgattgcagcaaaggtgaatggcaatctggtttcaccaattcatgtacttgcaaatgctgaagtggtggagattataacttatgataaattatctagtaagtatgcattccagcgtcaccagcagtggctacagcacgcaaaaactcgcagtgctagacacaaaattatgagattaatagttttgttgctgatcttgaagatgaaagtgatagtgagctttcacttccaagcaccaagaaagaagatagtaaattcaactgggagaagatattaagttctgataaattattctttgtcaacaaaagtagtgatggctttttacctgttaataatgtctatccaaaggtcaatgggaagcaaaacaaaactgttaaggatttgggcatcaaaatcaatggtcattctacaattcgaggtgatagcttcagtgagttaatgcaccctagcaattccacctgcaaggaagttttccctggtttggatgactggaaatctggtaaaatttctggttggcataatacggaaggcaactctgtccaatggctttgcatagcctgtgttgatcgaaaagggatgatggcggaggttacatctgctcttacagcttgtggaattactgtatgttcctgtgtgaagtcagtaaaaggaggggaatgggtgctatgctgttccattttgagggaagctatgagaacgtggtcagtgcttgtttgagtgttgacatgatttttggtgttcttggttggtctgtggggtgtagctggtgtccattgggtgctcttgagtgctaatgggtatcaagagacgtatactgcagtagttcaccactaatactatcttcctccaagatgatgataatgttggaagcaccaagacatcggtggctcaaaattttgttggtcagatccttaaaatctgggaacatagagcttgtccatattcctcattttggaaacgttcgtccgttccggagacgtgggaacaatctcgtcccccatctcatccttgtagtgttaaaatcctttttaagcacgttcccgttcctcaacctcatcgatccagaaacttggttgctaaggtcagatcatgattggacaggtgagcgagtggaatcctttacttctctgtcaaatcagaaagtgagggtgagcaaagtagaactagatatatatggttcattctgaaagtgagtgtacatagcagagtgagtagggttgggctatggctaacaaatcgtacatatgatcatgtaaaacactgttttgcattgcgaattacactgtttacattgtgtagtttgaaataagagatagagatgaataagctgccgactatggagagtcagtgcatgctgggattgattggattatacagaaggccttgtaaaagattgttaagggcggttcttctcactttgtggttcgcatatactagtttgcttaaatgtgcagctagaattttgacctggacgctaattccaaattttgtctgtgtttagtttcctacctctgcatgtaaatgttattgtatagcttcagttttgcgagtcaaaatttgagcatacttaactggcagatgcacgcttctggattacttgccatttcctgcagtatgaatggtaacttaattagaggtttggttctgatgatggtgaccctttcatgaacatctccaaataagatgatggtgaccctttttggattaattgtat

SEQ ID NO: 1662 - DNA, 3466 bp, Zea Mays
cggcaaagcccgccttctctctcggtctcgacgcgacccgccgctccctgcggctgcgcgcccaattcacgccccactggaggcggcggcgagcgcacgagtgcctcagcgccgccgatgaggctgcgccgcgccatgcagacctcgccgcccaccgtgtccgcgtcgtctctagagtgcgtgagctcgtgcagggccgcctcgtggaaggggggcggaaggccctacgaatgcagcgtactcttgtgcgcgtggaacgcgccgcgcgcgctcacgggcgcgctcgccagcaccgcgcagtgctcgtcgtgcggccacgccgaggccggaggcggctggaggaggcgcgggcggtcgcgtcggagtaacaactcgttaccgcgcatcaccctggatgaggacatcaatagagggaaatttggttatgatccatcgcgtgcctactctacaagttttgtcagatcttggtctactattgttgaccgaacatggagatcttactgctattcatcatctgattctttcatctctccagagactttgtgggaggatctcaaaccagctgtttcatatcttcaacctgaagagttaaaatttgtgcatgatgctttgaagttggcatatgaagcacacagtggacaaaaacggcgaagtggagaaccattcattattcatcctgttgaagttgctcgtattcttggagagcatgaacttgactgggaatccatcgctgctggtttattgcatgacactgttgaagatacgaatgtggttacttttgaaagaatagaaaatgagtttgggccaactgtgcgacgtattgttgaaggggagacaaaggtgtctaagttggggaaacttcagtgtaaaagtgagggtagcacaaaacaagatattaaagcagaagacctaaggcagatgtttcttgccatgacagaagagacaggttgcataacatgcgcactctcacacatatgcctcagcacaagcagtatgccatcgccgtggagacactgcaggtctttgcccctttagcaaaactccttgggatgtaccggataaagtctgagctggaatatctatccttcatgtacgttaaccccactggttttgctgaactaaggaaaagagttgaagacttgtacaagtcccatgaacaagaattggaagaggcaaatagaattttaaggcaaaagattgctgaggatgagtttctcgatcttgttagtgttgaaaccgaagtgcgttcagtttacaaagagctctacagcatttacaaaactacactcaaatccaagagttcaataaatgaggtgaatcaggttgctcagctgagaatcatcataaaaccaaaatcttgcaatggtgttggcccattgtgcactgcacaacagatctgctatcatgttcttggccttgttcatggcatatggacacccattcctcaagctgtggaagattacattgcaactccaaaacctaatgggtaccaaagtctacacacaacagtgataccatttcttaacgagagtatgttccatttggaagttcagataagaacagaagatatggatttaatagcagaaagaggcattgctgcacattacagtggaagaagggtggcttctggacctgttggccttggaatatcaagtggaagaaatgccaaggggaaagtaatctgcttgaacaacacagactttgctctgagggtgaatggcaatctggtttcaccaattcatgtacttgcaaatgctgaagtggtggagattataacttatgataaattatctagtaagtatgcattccagcgtcaccagcagtggctacagcacgcaaaaactcgcagtgctagacacaaaattatgagattcttaagggagcaagctgctctttctgctgctgaaattactgctgacgcagttaatagttttgttgctgatcttgaagatgaaagtgatagtgagctttcacttccaagcaccaagaaagaagatagtaaattcaactgggagaagatattaagttctgataaattattctttgtcaacaaaagtagtgatggctttttacctgttaataatgtctatccaaaggtcaatgggaagcaaaacaaaactgttaaggatttgggcatcaaaatcaatggtcattctacaattcgaggtgatagcttcagtgagttaatgcaccctagcaattccacctgcaaggaagttttccctggtttggatgactggaaatctggtaaaatttctggttggcataatacggaaggcaactctgtccaatggctttgcatagcctgtgttgatcgaaaagggatgatggcggaggttacatctgctcttacagcttgtggaattactgtatgttcctgtgtggcagaagtcagtaaaaggaggggaatgggtgctatgctgttccattttgagggaagctatgagaacgtggtcagtgcttgtttgagtgttgacatgatttttggtgttcttggttggtctgtggggtgtagctggtgtccattgggtgctcttgagtgctaatgggtatcaagagacgtatactgcagtagttcaccactaatactatcttcctccaagatgatgataatgttggaagcaccaagacatcggtggctcaaaattttgttggtcagatccttaaaatctgggaacatagagcttgtccatattcctcattttggaaacgttcgtccgttccggagacgtgggaacaatctcgtcccccatctcatccttgtagtgttaaaatcctttttaagcacgttcccgttcctcaacctcatcgatccagaaacttggttgctaaggtcagatcatgattggacaggtgagcgagtggaatcctttacttctctgtcaaatcagaaagtgagggtgagcaaagtagaactagatatatatggttcattctgaaagtgagtgtacatagcagagtgagtagggttgggctatggctaacaaatcgtacatatgatcatgtaaaacactgttttgcattgcgaattacactgtttacattgtgtagtttgaaataagagatagagatgaataagctgccgactatggagagtcagtgcatgctgggattgattggattatacagaaggccttgtaaaagattgttaagggcggttcttctcactttgtggttcgcatatactagtttgcttaaatgtgcagctagaattttgacctggacgctaattccaaattttgtctgtgtttagtttcctacctctgcatgtaaatgttattgtatagcttcagttttgcgagtcaaaatttgagcatacttaactggcagatgcacgcttctggattacttgccatttcctgcagtatgaatggtaacttaattagaggtttggttctgatgatggtgaccctttcatgaacatctccaaataagatgatggtgaccctttttggattaattgtat

SEQ ID NO: 1663 - DNA, 4008 bp, Zea Mays
ctggttttgagctgcaccctctcattgaagatagacacatctttagtatagccccagatggaaaatattcagcgaaggcagcttacaagggtctcttcctgggatcctgtacatttggacactataagcgggtttggaaaaattgggctccatcaaaatgtcgtttcttcctctggctggtggcccataacaggtgctggactgctgacagattagcaaaaagggggctcaatcatcctagcagctgtccactgtgtgatcaagaacctgaaactattaaccacctgctggtctcatgtgtgtttgcaaggattttctggtataatctgctcagaaagttcgggttggataacttggctccccagccgggcctgacttccttcctggaatggtgggagatagcttctgaaacagttcagggaatggtcaagaaaggtctgagttcgctgatctctttgggggcctgaacgatctggaatcaccgcaacagatgcgtgtttgatggacagactcccagtctcccctctatccttcggcaggctgatgatgagagaagactttgggaattagctggggccaagggtctctccttcttggcagcttctttgacaaatggctgaaccctactgtttctattttagtagttttttgagtctggcattcttagactctttcacttatgtgcggtactggcctccttaccgcgcatcaccctggatgaggacatcaatagagggaaatttggttatgatccatcgcgtgcctactctacaagttttgtcagatcttggtctactattgttgaccgaacatggagatcttactgctattcatcatctgattctttcatctctccagagactttgtgggaggatctcaaaccagctgtttcatatcttcaacctgaagagttaaaatttgtgcatgatgctttgaagttggcatatgaagcacacagtggacaaaaacggcgaagtggagaaccattcattattcatcctgttgaagttgctcgtattcttggagagcatgaacttgactgggaatccatcgctgctggtttattgcatgacactgttgaagatacgaatgtggttacttttgaaagaatagaaaatgagtttgggccaactgtgcgacgtattgttgaaggggagacaaaggtgtctaagttggggaaacttcagtgtaaaagtgagggtagcacaaaacaagatattaaagcagaagacctaaggcagatgtttcttgccatgacagaagagacaggttgcataacatgcgcactctcacacatatgcctcagcacaagcagtatgccatcgccgtggagacactgcaggtctttgcccctttagcaaaactccttgggatgtaccggataaagtctgagctggaatatctatccttcatgtacgttaaccccactggttttgctgaactaaggaaaagagttgaagacttgtacaagtcccatgaacaagaattggaagaggcaaatagaattttaaggcaaaagattgctgaggatgagtttctcgatcttgttagtgttgaaaccgaagtgcgttcagtttacaaagagctctacagcatttacaaaactacactcaaatccaagagttcaataaatgaggtgaatcaggttgctcagctgagaatcatcataaaaccaaaatcttgcaatggtgttggcccattgtgcactgcacaacagatctgctatcatgttcttggccttgttcatggcatatggacacccattcctcaagctgtggaagattacattgcaactccaaaacctaatgggtaccaaagtctacacacaacagtgataccatttcttaacgagagtatgttccatttggaagttcagataagaacagaagatatggatttaatagcagaaagaggcattgctgcacattacagtggaagaagggtggcttctggacctgttggccttggaatatcaagtggaagaaatgccaaggggaaagtaatctgcttgaacaacacagactttgctctgaggattggttggctcaatgcaatccgcgagtggcaagaagagtttgttggtaatatgagttctagggaatttgttgatactatcacccgagatcttctaggaagccgtgtctttgtgtttactcctaaaggcgagattaaaaacctgcctaagggagccacggtggttgattatgcttatctgattcatactgaaatcggcaacaaaatgattgcagcaaaggtgaatggcaatctggtttcaccaattcatgtacttgcaaatgctgaagtggtggagattataacttatgataaattatctagtaagtatgcattccagcgtcaccagcagtggctacagcacgcaaaaactcgcagtgctagacacaaaattatgagattcttaagggagcaagctgctctttctgctgctgaaattactgctgacgcagttaatagttttgttgctgatcttgaagatgaaagtgatagtgagctttcacttccaagcaccaagaaagaagatagtaaattcaactgggagaagatattaagttctgataaattattctttgtcaacaaaagtagtgatggctttttacctgttaataatgtctatccaaaggtcaatgggaagcaaaacaaaactgttaaggatttgggcatcaaaatcaatggtcattctacaattcgaggtgatagcttcagtgagttaatgcaccctagcaattccacctgcaaggaagttttccctggtttggatgactggaaatctggtaaaatttctggttggcataatacggaaggcaactctgtccaatggctttgcatagcctgtgttgatcgaaaagggatgatggcggaggttacatctgctcttacagcttgtggaattactgtatgttcctgtgtggcagaagtcagtaaaaggaggggaatgggtgctatgctgttccattttgagggaagctatgagaacgtggtcagtgcttgtttgagtgttgacatgatttttggtgttcttggttggtctgtggggtgtagctggtgtccattgggtgctcttgagtgctaatgggtatcaagagacgtatactgcagtagttcaccactaatactatcttcctccaagatgatgataatgttggaagcaccaagacatcggtggctcaaaattttgttggtcagatccttaaaatctgggaacatagagcttgtccatattcctcattttggaaacgttcgtccgttccggagacgtgggaacaatctcgtcccccatctcatccttgtagtgttaaaatcctttttaagcacgttcccgttcctcaacctcatcgatccagaaacttggttgctaaggtcagatcatgattggacaggtgagcgagtggaatcctttacttctctgtcaaatcagaaagtgagggtgagcaaagtagaactagatatatatggttcattctgaaagtgagtgtacatagcagagtgagtagggttgggctatggctaacaaatcgtacatatgatcatgtaaaacactgttttgcattgcgaattacactgtttacattgtgtagtttgaaataagagatagagatgaataagctgccgactatggagagtcagtgcatgctgggattgattggattatacagaaggccttgtaaaagattgttaagggcggttcttctcactttgtggttcgcatatactagtttgcttaaatgtgcagctagaattttgacctggacgctaattccaaattttgtctgtgtttagtttcctacctctgcatgtaaatgttattgtatagcttcagttttgcgagtcaaaatttgagcatacttaactggcagatgcacgcttctggattacttgccatttcctgcagtatgaatggtaacttaattagaggtttggttctgatgatggtgaccctttcatgaacatctccaaataagatgatggtgaccctttttggattaattgtat

SEQ ID NO: 1664 - DNA, 3169 bp, Zea Mays
aaaatggaccaaagtacaatgccataaaagacagaacacgagaccaccaaactcctgctgcgcacagtactccagcctccttctgcgcatgaaaagaacatgacacaaaaggagacaaacaacagatttggtgtcttaagtaaaaaaaaaaactcggccgagaggaacttgactgggaatccatcgctgctggtttattgcatgacactgttgaagatacgaatgtggttacttttgaaagaatagaaaatgagtttgggccaactgtgcgacgtattgttgaaggggagacaaaggtgtctaagttggggaaacttcagtgtaaaagtgagggtagcacaaaacaagatattaaagcagaagacctaaggcagatgtttcttgccatgacagaagaggttcgtgtgattattgtcaaactggcagacaggttgcataacatgcgcactctcacacatatgcctcagcacaagcagtatgccatcgccgtggagacactgcaggtctttgcccctttagcaaaactccttgggatgtaccggataaagtctgagctggaatatctatccttcatgtacgttaaccccactggttttgctgaactaaggaaaagagttgaagacttgtacaagtcccatgaacaagaattggaagaggcaaatagaattttaaggcaaaagattgctgaggatgagtttctcgatcttgttagtgttgaaaccgaagtgcgttcagtttacaaagagctctacagcatttacaaaactacactcaaatccaagagttcaataaatgaggtgaatcaggttgctcagctgagaatcatcataaaaccaaaatcttgcaatggtgttggcccattgtgcactgcacaacagatctgctatcatgttcttggccttgttcatggcatatggacacccattcctcaagctgtggaagattacattgcaactccaaaacctaatgggtaccaaagtctacacacaacagtgataccatttcttaacgagagtatgttccatttggaagttcagataagaacagaagatatggatttaatagcagaaagaggcattgctgcacattacagtggaagaagggtggcttctggacctgttggccttggaatatcaagtggaagaaatgccaaggggaaagtaatctgcttgaacaacacagactttgctctgaggattggttggctcaatgcaatccgcgagtggcaagaagagtttgttggtaatatgagttctagggaatttgttgatactatcacccgagatcttctaggaagccgtgtctttgtgtttactcctaaaggcgagattaaaaacctgcctaagggagccacggtggttgattatgcttatctgattcatactgaaatcggcaacaaaatgattgcagcaaaggtgaatggcaatctggtttcaccaattcatgtacttgcaaatgctgaagtggtggagattataacttatgataaattatctagtaagtatgcattccagcgtcaccagcagtggctacagcacgcaaaaactcgcagtgctagacacaaaattatgagattcttaagggagcaagctgctctttctgctgctgaaattactgctgacgcagttaatagttttgttgctgatcttgaagatgaaagtgatagtgagctttcacttccaagcaccaagaaagaagatagtaaattcaactgggagaagatattaagttctgataaattattctttgtcaacaaaagtagtgatggctttttacctgttaataatgtctatccaaaggtcaatgggaagcaaaacaaaactgttaaggatttgggcatcaaaatcaatggtcattctacaattcgaggtgatagcttcagtgagttaatgcaccctagcaattccacctgcaaggaagttttccctggtttggatgactggaaatctggtaaaatttctggttggcataatacggaaggcaactctgtccaatggctttgcatagcctgtgttgatcgaaaagggatgatggcggaggttacatctgctcttacagcttgtggaattactgtatgttcctgtgtggcagaagtcagtaaaaggaggggaatgggtgctatgctgttccattttgagggaagctatgagaacgtggtcagtgcttgtttgagtgttgacatgatttttggtgttcttggttggtctgtggggtgtagctggtgtccattgggtgctcttgagtgctaatgggtatcaagagacgtatactgcagtagttcaccactaatactatcttcctccaagatgatgataatgttggaagcaccaagacatcggtggctcaaaattttgttggtcagatccttaaaatctgggaacatagagcttgtccatattcctcattttggaaacgttcgtccgttccggagacgtgggaacaatctcgtcccccatctcatccttgtagtgttaaaatcctttttaagcacgttcccgttcctcaacctcatcgatccagaaacttggttgctaaggtcagatcatgattggacaggtgagcgagtggaatcctttacttctctgtcaaatcagaaagtgagggtgagcaaagtagaactagatatatatggttcattctgaaagtgagtgtacatagcagagtgagtagggttgggctatggctaacaaatcgtacatatgatcatgtaaaacactgttttgcattgcgaattacactgtttacattgtgtagtttgaaataagagatagagatgaataagctgccgactatggagagtcagtgcatgctgggattgattggattatacagaaggccttgtaaaagattgttaagggcggttcttctcactttgtggttcgcatatactagtttgcttaaatgtgcagctagaattttgacctggacgctaattccaaattttgtctgtgtttagtttcctacctctgcatgtaaatgttattgtatagcttcagttttgcgagtcaaaatttgagcatacttaactggcagatgcacgcttctggattacttgccatttcctgcagtatgaatggtaacttaattagaggtttggttctgatgatggtgaccctttcatgaacatctccaaataagatgatggtgaccctttttggattaattgtat

SEQ ID NO: 1665 - DNA, 2906 bp, Zea Mays
caccaaactcctgctgcgcacagtactccagcctccttctgcgcatgaaaagaacatgacacaaaaggagacaaacaacagatttggtgtcttaagtaaaaaaaaaaactcggccgagaggaacttgactgggaatccatcgctgctggtttattgcatgacactgttgaagatacgaatgtggttacttttgaaagaatagaaaatgagtttgggccaactgtgcgacgtattgttgaaggggagacaaaggtgtctaagttggggaaacttcagtgtaaaagtgagggtagcacaaaacaagatattaaagcagaagacctaaggcagatgtttcttgccatgacagaagaggttcgtgtgattattgtcaaactggcagacaggttgcataacatgcgcactctcacacatatgcctcagcacaagcagtatgccatcgccgtggagacactgcaggtctttgcccctttagcaaaactccttgggatgtaccggataaagtctgagctggaatatctatccttcatgtacgttaaccccactggttttgctgaactaaggaaaagagttgaagacttgtacaagtcccatgaacaagaattggaagaggcaaatagaattttaaggcaaaagattgctgaggatgagtttctcgatcttgttagtgttgaaaccgaagtgcgttcagtttacaaagagctctacagcatttacaaaactacactcaaatccaagagttcaataaatgaggtgaatcaggttgctcagctgagaatcatcataaaaccaaaatcttgcaatggtgttggcccattgtgcactgcacaacagatctgctatcatgttcttggccttgttcatggcatatggacacccattcctcaagctgtggaagattacattgcaactccaaaacctaatgggtaccaaagtctacacacaacagtgataccatttcttaacgagagtatgttccatttggaagttcagataagaacagaagatatggatttaatagcagaaagaggcattgctgcacattacagtggaagaagggtggcttctggacctgttggccttggaatatcaagtggaagaaatgccaaggggaaagtaatctgcttgaacaacacagactttgctctgagggtgaatggcaatctggtttcaccaattcatgtacttgcaaatgctgaagtggtggagattataacttatgataaattatctagtaagtatgcattccagcgtcaccagcagtggctacagcacgcaaaaactcgcagtgctagacacaaaattatgagattcttaagggagcaagctgctctttctgctgctgaaattactgctgacgcagttaatagttttgttgctgatcttgaagatgaaagtgatagtgagctttcacttccaagcaccaagaaagaagatagtaaattcaactgggagaagatattaagttctgataaattattctttgtcaacaaaagtagtgatggctttttacctgttaataatgtctatccaaaggtcaatgggaagcaaaacaaaactgttaaggatttgggcatcaaaatcaatggtcattctacaattcgaggtgatagcttcagtgagttaatgcaccctagcaattccacctgcaaggaagttttccctggtttggatgactggaaatctggtaaaatttctggttggcataatacggaaggcaactctgtccaatggctttgcatagcctgtgttgatcgaaaagggatgatggcggaggttacatctgctcttacagcttgtggaattactgtatgttcctgtgtggcagaagtcagtaaaaggaggggaatgggtgctatgctgttccattttgagggaagctatgagaacgtggtcagtgcttgtttgagtgttgacatgatttttggtgttcttggttggtctgtggggtgtagctggtgtccattgggtgctcttgagtgctaatgggtatcaagagacgtatactgcagtagttcaccactaatactatcttcctccaagatgatgataatgttggaagcaccaagacatcggtggctcaaaattttgttggtcagatccttaaaatctgggaacatagagcttgtccatattcctcattttggaaacgttcgtccgttccggagacgtgggaacaatctcgtcccccatctcatccttgtagtgttaaaatcctttttaagcacgttcccgttcctcaacctcatcgatccagaaacttggttgctaaggtcagatcatgattggacaggtgagcgagtggaatcctttacttctctgtcaaatcagaaagtgagggtgagcaaagtagaactagatatatatggttcattctgaaagtgagtgtacatagcagagtgagtagggttgggctatggctaacaaatcgtacatatgatcatgtaaaacactgttttgcattgcgaattacactgtttacattgtgtagtttgaaataagagatagagatgaataagctgccgactatggagagtcagtgcatgctgggattgattggattatacagaaggccttgtaaaagattgttaagggcggttcttctcactttgtggttcgcatatactagtttgcttaaatgtgcagctagaattttgacctggacgctaattccaaattttgtctgtgtttagtttcctacctctgcatgtaaatgttattgtatagcttcagttttgcgagtcaaaatttgagcatacttaactggcagatgcacgcttctggattacttgccatttcctgcagtatgaatggtaacttaattagaggtttggttctgatgatggtgaccctttcatgaacatctccaaataagatgatggtgaccctttttggattaattgtat

SEQ ID NO: 1666 - DNA, 3066 bp, Zea Mays
cctccttctgcgcatgaaaagaacatgacacaaaaggagacaaacaacagatttggtgtcttaagtaaaaaaaaaaactcggccgagaggaacttgactgggaatccatcgctgctggtttattgcatgacactgttgaagatacgaatgtggttacttttgaaagaatagaaaatgagtttgggccaactgtgcgacgtattgttgaaggggagacaaaggtgtctaagttggggaaacttcagtgtaaaagtgagggtagcacaaaacaagatattaaagcagaagacctaaggcagatgtttcttgccatgacagaagagacaggttgcataacatgcgcactctcacacatatgcctcagcacaagcagtatgccatcgccgtggagacactgcaggtctttgcccctttagcaaaactccttgggatgtaccggataaagtctgagctggaatatctatccttcatgtacgttaaccccactggttttgctgaactaaggaaaagagttgaagacttgtacaagtcccatgaacaagaattggaagaggcaaatagaattttaaggcaaaagattgctgaggatgagtttctcgatcttgttagtgttgaaaccgaagtgcgttcagtttacaaagagctctacagcatttacaaaactacactcaaatccaagagttcaataaatgaggtgaatcaggttgctcagctgagaatcatcataaaaccaaaatcttgcaatggtgttggcccattgtgcactgcacaacagatctgctatcatgttcttggccttgttcatggcatatggacacccattcctcaagctgtggaagattacattgcaactccaaaacctaatgggtaccaaagtctacacacaacagtgataccatttcttaacgagagtatgttccatttggaagttcagataagaacagaagatatggatttaatagcagaaagaggcattgctgcacattacagtggaagaagggtggcttctggacctgttggccttggaatatcaagtggaagaaatgccaaggggaaagtaatctgcttgaacaacacagactttgctctgaggattggttggctcaatgcaatccgcgagtggcaagaagagtttgttggtaatatgagttctagggaatttgttgatactatcacccgagatcttctaggaagccgtgtctttgtgtttactcctaaaggcgagattaaaaacctgcctaagggagccacggtggttgattatgcttatctgattcatactgaaatcggcaacaaaatgattgcagcaaaggtgaatggcaatctggtttcaccaattcatgtacttgcaaatgctgaagtggtggagattataacttatgataaattatctagtaagtatgcattccagcgtcaccagcagtggctacagcacgcaaaaactcgcagtgctagacacaaaattatgagattcttaagggagcaagctgctctttctgctgctgaaattactgctgacgcagttaatagttttgttgctgatcttgaagatgaaagtgatagtgagctttcacttccaagcaccaagaaagaagatagtaaattcaactgggagaagatattaagttctgataaattattctttgtcaacaaaagtagtgatggctttttacctgttaataatgtctatccaaaggtcaatgggaagcaaaacaaaactgttaaggatttgggcatcaaaatcaatggtcattctacaattcgaggtgatagcttcagtgagttaatgcaccctagcaattccacctgcaaggaagttttccctggtttggatgactggaaatctggtaaaatttctggttggcataatacggaaggcaactctgtccaatggctttgcatagcctgtgttgatcgaaaagggatgatggcggaggttacatctgctcttacagcttgtggaattactgtatgttcctgtgtggcagaagtcagtaaaaggaggggaatgggtgctatgctgttccattttgagggaagctatgagaacgtggtcagtgcttgtttgagtgttgacatgatttttggtgttcttggttggtctgtggggtgtagctggtgtccattgggtgctcttgagtgctaatgggtatcaagagacgtatactgcagtagttcaccactaatactatcttcctccaagatgatgataatgttggaagcaccaagacatcggtggctcaaaattttgttggtcagatccttaaaatctgggaacatagagcttgtccatattcctcattttggaaacgttcgtccgttccggagacgtgggaacaatctcgtcccccatctcatccttgtagtgttaaaatcctttttaagcacgttcccgttcctcaacctcatcgatccagaaacttggttgctaaggtcagatcatgattggacaggtgagcgagtggaatcctttacttctctgtcaaatcagaaagtgagggtgagcaaagtagaactagatatatatggttcattctgaaagtgagtgtacatagcagagtgagtagggttgggctatggctaacaaatcgtacatatgatcatgtaaaacactgttttgcattgcgaattacactgtttacattgtgtagtttgaaataagagatagagatgaataagctgccgactatggagagtcagtgcatgctgggattgattggattatacagaaggccttgtaaaagattgttaagggcggttcttctcactttgtggttcgcatatactagtttgcttaaatgtgcagctagaattttgacctggacgctaattccaaattttgtctgtgtttagtttcctacctctgcatgtaaatgttattgtatagcttcagttttgcgagtcaaaatttgagcatacttaactggcagatgcacgcttctggattacttgccatttcctgcagtatgaatggtaacttaattagaggtttggttctgatgatggtgaccctttcatgaacatctccaaataagatgatggtgaccctttttggattaattgtat

SEQ ID NO: 1667 - DNA, 2681 bp, Zea Mays
tctctaagtcaagaggctctcgatgactatgcacgcattttcagcaaatctctctcacagtctgagctggaatatctatccttcatgtacgttaaccccactggttttgctgaactaaggaaaagagttgaagacttgtacaagtcccatgaacaagaattggaagaggcaaatagaattttaaggcaaaagattgctgaggatgagtttctcgatcttgttagtgttgaaaccgaagtgcgttcagtttacaaagagctctacagcatttacaaaactacactcaaatccaagagttcaataaatgaggtgaatcaggttgctcagctgagaatcatcataaaaccaaaatcttgcaatggtgttggcccattgtgcactgcacaacagatctgctatcatgttcttggccttgttcatggcatatggacacccattcctcaagctgtggaagattacattgcaactccaaaacctaatgggtaccaaagtctacacacaacagtgataccatttcttaacgagagtatgttccatttggaagttcagataagaacagaagatatggatttaatagcagaaagaggcattgctgcacattacagtggaagaagggtggcttctggacctgttggccttggaatatcaagtggaagaaatgccaaggggaaagtaatctgcttgaacaacacagactttgctctgaggattggttggctcaatgcaatccgcgagtggcaagaagagtttgttggtaatatgagttctagggaatttgttgatactatcacccgagatcttctaggaagccgtgtctttgtgtttactcctaaaggcgagattaaaaacctgcctaagggagccacggtggttgattatgcttatctgattcatactgaaatcggcaacaaaatgattgcagcaaaggtgaatggcaatctggtttcaccaattcatgtacttgcaaatgctgaagtggtggagattataacttatgataaattatctagtaagtatgcattccagcgtcaccagcagtggctacagcacgcaaaaactcgcagtgctagacacaaaattatgagattcttaagggagcaagctgctctttctgctgctgaaattactgctgacgcagttaatagttttgttgctgatcttgaagatgaaagtgatagtgagctttcacttccaagcaccaagaaagaagatagtaaattcaactgggagaagatattaagttctgataaattattctttgtcaacaaaagtagtgatggctttttacctgttaataatgtctatccaaaggtcaatgggaagcaaaacaaaactgttaaggatttgggcatcaaaatcaatggtcattctacaattcgaggtgatagcttcagtgagttaatgcaccctagcaattccacctgcaaggaagttttccctggtttggatgactggaaatctggtaaaatttctggttggcataatacggaaggcaactctgtccaatggctttgcatagcctgtgttgatcgaaaagggatgatggcggaggttacatctgctcttacagcttgtggaattactgtatgttcctgtgtggcagaagtcagtaaaaggaggggaatgggtgctatgctgttccattttgagggaagctatgagaacgtggtcagtgcttgtttgagtgttgacatgatttttggtgttcttggttggtctgtggggtgtagctggtgtccattgggtgctcttgagtgctaatgggtatcaagagacgtatactgcagtagttcaccactaatactatcttcctccaagatgatgataatgttggaagcaccaagacatcggtggctcaaaattttgttggtcagatccttaaaatctgggaacatagagcttgtccatattcctcattttggaaacgttcgtccgttccggagacgtgggaacaatctcgtcccccatctcatccttgtagtgttaaaatcctttttaagcacgttcccgttcctcaacctcatcgatccagaaacttggttgctaaggtcagatcatgattggacaggtgagcgagtggaatcctttacttctctgtcaaatcagaaagtgagggtgagcaaagtagaactagatatatatggttcattctgaaagtgagtgtacatagcagagtgagtagggttgggctatggctaacaaatcgtacatatgatcatgtaaaacactgttttgcattgcgaattacactgtttacattgtgtagtttgaaataagagatagagatgaataagctgccgactatggagagtcagtgcatgctgggattgattggattatacagaaggccttgtaaaagattgttaagggcggttcttctcactttgtggttcgcatatactagtttgcttaaatgtgcagctagaattttgacctggacgctaattccaaattttgtctgtgtttagtttcctacctctgcatgtaaatgttattgtatagcttcagttttgcgagtcaaaatttgagcatacttaactggcagatgcacgcttctggattacttgccatttcctgcagtatgaatggtaacttaattagaggtttggttctgatgatggtgaccctttcatgaacatctccaaataagatgatggtgaccctttttggattaattgtat

SEQ ID NO: 1668 - DNA, 2712 bp, Zea Mays
gaggcgtgcgtgcgctcgtgtttcccagaaacgatacagcagcactagccaatgcaaacacctttttccctgcgcttatatatagcgctctccagtcctagtgtccgcgtcctcgtaatctctcctgcgtccatcctctcctcgcggcgggggaagaatggccgacccgagcttcctcgtcgggatcgtagggaacgtaatctccatcctcgtcttcgcgtcgccgatagcgacgttccggcgcatcgtgaggagcaggagcacggaggacttcaggtggctgccgtacgtcaccaccctgctcagcaccagcctctggaccttctacggcctcctcaagcccggcggcctcctcgtcgtcaccgtcaacggcgccggcgccgcgctcgaggccgcctacgtcgcgctctacctcgtctacgcgccaagggagaccaaggcgaagatggccaaggtggtggtggccgtgaacgtcgccttccttgccgcggtcgtcgcggtggcgctgctggcgctgcacggcggcgcccgcctgttcgcggtgggcctgctgtgcgccgcgctcacggtcgggatgtacgcggcaccgctcggcgcgatggtcagtatactctatactccccagtaggcagtatctcacttcctgtgctagctgtggccgttcttcagggaacaaaacctagtttctggctcacgaacacgcccggccagtgctagctgctgcacgtacgtatggattttgtttcgcacttttggtagtaacttgcttcggtgtctctgtttctctggcgtgtggcgagacaccatacgctcctttttctagagtgtgcctacctggctacaccttataatgctaagagcaaaaaaaccgctcgcatctactctactgaccggtcattgagtgtttggtctgatgtcattttctcggacttatagcgcaccacaagcgttaatgcatgtctgtctagcacgaactcagatgcctatgaaggtttaatttgtactccctccgtttctttttagttgtcgttagatagttcaattttgcactattcagcgacaactaaaacgaaacggagggaatacctaataaccacacttacttaaatctcttcatatagtagagggctaatttgttgtagctctcactctccggtcggtcacaccgaagcaatgtacatatcagacaccgagataccccgttaaaatccatcttttttgttaggctacgaggagattttaggggctgtttcgttcgtgactaaatgtgtcacactttgtctaaggttagtcgttcgaattgaagaactaaccttagtcataaaagttaggcaaagtgtggcaagttagccatcaaaccaaacaggcccttagtcttcaccagtatagattaaggaaaattcttccccgttggatatggtaggtgcggacatggggaagcagaatccgaactcatttatccatgtgtaatattcacttaataaaattagatgtgtaccgtctttagcagttcacctatatattcacctaaaactttgttttgcactgtatatattgtacgtagaataaagattgaatatagtgatgtgggtagaaaagctgctcgagatagtaggctgagtagtatacttaaaataatgcattatatatatattgtctatgtaccacagattaattctagttggtataaaaatatatatgaccagcaactgacatttacaatagagcactagtaatctggggtgatacatacatcaaactccatgcatgcagcggacggtggtgaagacccggagcgtggagtacatgcccttctccctctccttcttcctcttcctcaacggcggcgtctggagcatctactccctgctcgtcaaggactacttcatcggggtgcgtacagcgtccgcgttgcttcacaccctctccatttcctgatctactcgcaagcacacacacatatcacatatgtacacgtataataccaccacgcacacaggtccccaacgccatcggcctcgtcctgggcacggcgcagctgctgctgtacctggcgtaccggaaggcgccggcgagcaaggacgacgacgaggaggcggccgctgctgcgtcgggggacgacggcgacgacgaggaggaggaggaagggctgacgcacctgatggggcagcaggtggagatggcgcagcgcggccgcctgcgcctgcacaaggggcagagcctgcccaagccgccgccgggcgggccgctgtcgtcgccgcgccacgggttcgggagcatcatcaagtccctgtccgccacccccgtcgagctgcactccgtcctgtaccagcacgcccggttccagcccgtcaagaaggacgacgacgacgtggaggccaacgactgactgatatgatgcattaattgatgctgctattgttcgaccgacgtggtagcggtacagaggcgcccttttagtattcaggccagggtagcgttccaatggacagggtttgagtgtgttcttcacatatttgcaggttcgaaacccagatgaattaatatgtttgagttagatcgataggtgaaaatttgtccaccaactgcgtttgtttttctctctccgaattgcacaaggcagtgaaggcacacacataaatcttacgtacacctataatcataatgttgttaaattctaaaatatttgcttttataaaaaacaataaacaa

SEQ ID NO: 1669 - DNA, 3103 bp, Zea Mays
agccgccagccgctcaacacgcccgagacctcaactcccgacgccttctgtttcagcgtcctgctaggccgccgcagttcccctgctaggccgccgcagttccctctccgctccgccggatccatccctcgctctgctcatcgccccaatgccgaaaaaggtcgccatgcggcgaggtaagcccgcccccgaccaagggaagaggcggcgccacgggccgcggctgtccaaggtgatgcttcgggagctcgacgcgatggggcctggccctgcccgcggctccgatggtgaggaggacgggtccgacgcggttgccgaggacgtgtacgagtacgaggaaggggtgcccgaggaggaggccggcaagaacggccgctatgacaccgtcgccaagtacgagtacaacttcgacagcgacgcctccgatgcggatgaggatgtgccttcggaggaaggcgaggatatggacgaagatgacaatgacgacggtgatgatgaggagaagcagataagaatacttcaggagacgaccggaatgcccagagaagccttcgatggaaagaagaggaaacagccatcggagctgcacctgcagcatggcgatggagatggtcctgtcacaattcatgatctcttggacaatgtccaggggaaacctggttatagcaagatccgtaagaggctgcagcagcaggagaaaaaaccgatggtcgtgctagccccacttccaaaagtagagagggacaagatcgagcgcagcgtgacgtttcagaaatccaagaatgagctaacaaagtgggaaggaatcgtgaagagtaacagggaagctcctgtactatactttgaaaatgataccaacttgggtgtgaacactgttgcggcaattgctagcgaatttaaaccaaggactgagtttgagaagaagattgctgagattacgcaaagcactgaaataatagaagcacacaagaacgatggtgccaaaatcctggaacttaacaagattgatgcagaagatgtgagagaacaccaaaaccgtcttgctaagatgcgcagccttctattccgtcatgaaatgaaagcaaagcgtatgaagaagatcaagtccaggacatatcatcggatgttgaagaaggacaaattgaaggcagcatcagcagatttcgaggcagatcctgaagctgtcacagatcatgctaggaaacaagaatttaaacgggcagaggaaaggatgacattaaagcacaagaatacatcacaatgggcaaagcgcatcctcaagcgtggattgtctgttcaagatgaaggcacccgagctgccattgcagcacagctccaacaaaatactcttctgactagaaaaatgaattccatgaaggatgattctagtagtgaagaaagttcagatgatgatgacgacgagagtgactcagaagcaaaaatcttaaacagagggaaagaaaagattcttaaagctcttgaagaagacaatgagataccgaattctggagttttttcgttgcctttcatggagcgtgctatgaaaaagcgcgaggaagcaacttatgaggaagcacgacaggctcttgaagaatacgatgattccttgaagaaattagaggacaataacactgaacaaaacgaagacaaagttaaggtgtcaggtaaaagaacgtttgggcctaccaaaaatacgcacgaagagttagtgaagaggaaaaaattacaagatactgaaaacagcagtgatagcgagtatgattctgagccagcccagcctttgagcaataatgaagtaactatgaaacatgatgatacccaatttgggagtgcactactggatgatgaaccacagaatgatatatacagaaactttactgatatcataaaaaatcctggtcctaagacaactttcgaagttggaatgttagctggtgattcatggaagaaaggtagccattctggtatcttgcggtcaagagcgacaaaggaaaggaccacagcaatgccaatgacattaccaataaatccaaaataccggttccttctattgtagacccacagcctaaggatcacaattccgattcagattctgaggaagagatggttgaaggcaacttgaccatccctgacagaaaggagagctatgaacttccatcgcaagctgatctcatacgtcaggcttttgctggtgatgatgttgaagctgaatttgagaaagacaaaatggatgttttaaatgaggagaatcctgaacctgaaaagcctgctcttgttcctggctggggccagtggacagacatccaacagaaaaaaggacttccctcatggatgataaaagaacatgaagttgctaaaagaaatagagaagaagccttgaagaggaggaaagactcgaagcttaagcatgtcattatttctgaacatgtagataagaagactgaaaagtatttggtaaggaaactgcctttcccttacacttcgaaagatgtgtatgagcagagcattcgaatgcctattgggcctgatttcaacccagcgatatcagtttctgctctcaatcgacctgcgattgttaagaagcctggtgttatcattaaaccaatacaatacgaggaggttaatccccatgagaagctcgatgaaccaaaacgtgtcattcagagagcaaccccaaaccggaatgcaaagaaagcctttgccaaacaaggaaaaagcgtaacttcacaaaagagaaagtgacgagacagtcatcttctcgtcaatggcttcatttggacaaaggagagctcatccgaattttgttgcccccgccgaatttgcacatgcatggctccaggtgtgtgcagtgattcttccctttatgaaagttcccgcttcggcgcatgacccatgggcaaaaggtttcacaccactggtttatgagagcagagaaattttggtacaagtagttctgtatttgttatttattgcattcgccacgcatcgtccaaatgagacggatgctatatttcagttctgatgatggccactggttaactagagtcacctgtcttgtatggatccccacttttcagacgccggtaaatttgtatgatttgcg

SEQ ID NO: 1670 - DNA, 1751 bp, Zea Mays
ctgtctcgacttcgcgactgcaacagcagagtcctagctatctccggccacatttgtttataggcatggcaacatatacgatttatccacgtgcccacggataaaaaaaacctattaaacatggatccgggtataagttcctatatgtggatacgaatacggtatccgcaaatatttatggaacgagtataacaaagtagtatttatacccgaatatcccgattacccgctaacctgacatgtgggtcgctagggtttggaaagagtctcccaatcccactcatccggttcgcacacggcacactacagaccccgcccccaacctcggtctttcccagtcccagccgccaccgtgcgtctgtgcaagtggccttcggcggtgcgcagagcagagctggtgacgtggcccgtggtgcgcgtttccctgcagcctcgaggtctgcacgccgccggcctccctctcagcgccacgcgccgccggcctccgttgctcactaccggacttcgcacacgcccggcggcggccgaccatcctcggagccacggtccgggccggggaagaggcggggccgcggtccgcgcatccctgcggcgacgcttcagaagcagaaaacggcgttggcgaacgtcgaccagatcaccggcgccaagattccgaagagcttcgtattctcccgcggagaagaaacgaaataacctcaaggattttgtcaatgttgccggcccgatgggtgtgacacatttcttaatcctctcaaaccctcaaagcctgccacatttgcgctttgccaaatcaccgcagggcccaacattcacatttcagatagaggagtactcacttgcggcggacattgcaaactctcagaagcgcccaaggtgcccaccagggatattcaaaaactcaccactggttgtacttggtgggttgacaggtctcggcaaccctttcaggagtttggtcgaatacttccaacatatgttcccttccgttgacccaaccactgtcaagctggcaacatgccaaaggattctgttgttaaaacatgataaagagaaggatgttattgaattccggcattactccatcaagctccagcctgttggggtcagtcgcaggattagaaagctcatgcaaaacaatcaagtgcctgatctaggagaatttgaagatgttagtgagtttgtgaaaaaagctgggtatggatcagaaagtgaagcagacgatgaagcagcaatggtaagcttgccaagtgacattgacaaattaaaccgggcatccagaaaaagcgctgtcagactccaggagattggaccaaggatgactatgcgcctagttaaagttgaagctgggctatgttcaggagatgtcttatacccatggcctgtggaaaaggaagtggtgggaaagaaaggaacagaaactggggaagtagaagggcaagaagacgattctgaggccacagatgagtccgaggatgagatggtgtaggatttcagatgttttggacaggcagacgcaggtgttttgacagtcctggatgtttcatgctgaaaccaacgggccctgtgcccaataacgtggtgcattcatgccaattttgtcactgaaggtgcattgcattcgttgtaacgaagtgtaacattgttttgccgatggttacctcttttgtgttatgacaagtttggaggatagtttttggttcgcagtctaagatttctcattcttgtcggggtttcagagggatggacat

SEQ ID NO: 1671 - DNA, 1739 bp, Zea Mays
ctgtctcgacttcgcgactgcaacagcagagtcctagctatctccggccacatttgtttataggcatggcaacatatacgatttatccacgtgcccacggataaaaaaaacctattaaacatggatccgggtataagttcctatatgtggatacgaatacggtatccgcaaatatttatggaacgagtataacaaagtagtatttatacccgaatatcccgattacccgctaacctgacatgtgggtcgctagggtttggaaagagtctcccaatcccactcatccggttcgcacacggcacactacagaccccgcccccaacctcggtctttcccagtcccagccgccaccgtgcgtctgtgcaagtggccttcggcggtgcgcagagcagagctggtgacgtggcccgtggtgcgcgtttccctgcagcctcgaggtctgcacgccgccggcctccctctcagcgccacgcgccgccggcctccgttgctcactaccggacttcgcacacgcccggcggcggccgaccatcctcggagccacggtccgggccggggaagaggcggggccgcggtccgcgcatccctgcggcgacgcttcagaagcagaaaacggcgttggcgaacgtcgaccagatcaccggcgccaagattccgaagagcttcgtattctcccgcggtaaactcccctccacgcttcgccatcttcagcaggacctccgcaaggtcatgctcccctacactgctctcaatctcaaggagaagaaacgaaataacctcaaggattttgtcaatgttgccggcccgatggatagaggagtactcacttgcggcggacattgcaaactctcagaagcgcccaaggtgcccaccagggatattcaaaaactcaccactggttgtacttggtgggttgacaggtctcggcaaccctttcaggagtttggtcgaatacttccaacatatgttcccttccgttgacccaaccactgtcaagctggcaacatgccaaaggattctgttgttaaaacatgataaagagaaggatgttattgaattccggcattactccatcaagctccagcctgttggggtcagtcgcaggattagaaagctcatgcaaaacaatcaagtgcctgatctaggagaatttgaagatgttagtgagtttgtgaaaaaagctgggtatggatcagaaagtgaagcagacgatgaagcagcaatggtaagcttgccaagtgacattgacaaattaaaccgggcatccagaaaaagcgctgtcagactccaggagattggaccaaggatgactatgcgcctagttaaagttgaagctgggctatgttcaggagatgtcttatacccatggcctgtggaaaaggaagtggtgggaaagaaaggaacagaaactggggaagtagaagggcaagaagacgattctgaggccacagatgagtccgaggatgagatggtgtaggatttcagatgttttggacaggcagacgcaggtgttttgacagtcctggatgtttcatgctgaaaccaacgggccctgtgcccaataacgtggtgcattcatgccaattttgtcactgaaggtgcattgcattcgttgtaacgaagtgtaacattgttttgccgatggttacctcttttgtgttatgacaagtttggaggatagtttttggttcgcagtctaagatttctcattcttgtcggggtttcagagggatggacat

SEQ ID NO: 1672 - DNA, 1815 bp, Zea Mays
ctgtctcgacttcgcgactgcaacagcagagtcctagctatctccggccacatttgtttataggcatggcaacatatacgatttatccacgtgcccacggataaaaaaaacctattaaacatggatccgggtataagttcctatatgtggatacgaatacggtatccgcaaatatttatggaacgagtataacaaagtagtatttatacccgaatatcccgattacccgctaacctgacatgtgggtcgctagggtttggaaagagtctcccaatcccactcatccggttcgcacacggcacactacagaccccgcccccaacctcggtctttcccagtcccagccgccaccgtgcgtctgtgcaagtggccttcggcggtgcgcagagcagagctggtgacgtggcccgtggtgcgcgtttccctgcagcctcgaggtctgcacgccgccggcctccctctcagcgccacgcgccgccggcctccgttgctcactaccggacttcgcacacgcccggcggcggccgaccatcctcggaggtgcagttacgcgcgccgtaggaaggtttttcttccatcatttgtgtgttcgttcaactgagccgccatgcgccagccacggtccgggccggggaagaggcggggccgcggtccgcgcatccctgcggcgacgcttcagaagcagaaaacggcgttggcgaacgtcgaccagatcaccggcgccaagattccgaagagcttcgtattctcccgcggtaaactcccctccacgcttcgccatcttcagcaggacctccgcaaggtcatgctcccctacactgctctcaatctcaaggagaagaaacgaaataacctcaaggattttgtcaatgttgccggcccgatggatagaggagtactcacttgcggcggacattgcaaactctcagaagcgcccaaggtgcccaccagggatattcaaaaactcaccactggttgtacttggtgggttgacaggtctcggcaaccctttcaggagtttggtcgaatacttccaacatatgttcccttccgttgacccaaccactgtcaagctggcaacatgccaaaggattctgttgttaaaacatgataaagagaaggatgttattgaattccggcattactccatcaagctccagcctgttggggtcagtcgcaggattagaaagctcatgcaaaacaatcaagtgcctgatctaggagaatttgaagatgttagtgagtttgtgaaaaaagctgggtatggatcagaaagtgaagcagacgatgaagcagcaatggtaagcttgccaagtgacattgacaaattaaaccgggcatccagaaaaagcgctgtcagactccaggagattggaccaaggatgactatgcgcctagttaaagttgaagctgggctatgttcaggagatgtcttatacccatggcctgtggaaaaggaagtggtgggaaagaaaggaacagaaactggggaagtagaagggcaagaagacgattctgaggccacagatgagtccgaggatgagatggtgtaggatttcagatgttttggacaggcagacgcaggtgttttgacagtcctggatgtttcatgctgaaaccaacgggccctgtgcccaataacgtggtgcattcatgccaattttgtcactgaaggtgcattgcattcgttgtaacgaagtgtaacattgttttgccgatggttacctcttttgtgttatgacaagtttggaggatagtttttggttcgcagtctaagatttctcattcttgtcggggtttcagagggatggacat

SEQ ID NO: 1673 - DNA, 1782 bp, Zea Mays
ctgtctcgacttcgcgactgcaacagcagagtcctagctatctccggccacatttgtttataggcatggcaacatatacgatttatccacgtgcccacggataaaaaaaacctattaaacatggatccgggtataagttcctatatgtggatacgaatacggtatccgcaaatatttatggaacgagtataacaaagtagtatttatacccgaatatcccgattacccgctaacctgacatgtgggtcgctagggtttggaaagagtctcccaatcccactcatccggttcgcacacggcacactacagaccccgcccccaacctcggtctttcccagtcccagccgccaccgtgcgtctgtgcaagtggccttcggcggtgcgcagagcagagctggtgacgtggcccgtggtgcgcgtttccctgcagcctcgaggtctgcacgccgccggcctccctctcagcgccacgcgccgccggcctccgttgctcactaccggacttcgcacacgcccggcggcggccgaccatcctcggaggtgcagttacgcgcgccgtaggaaggtttttcttccatcatttgtgtgttcgttcaactgagccgccatgcgccagccacggtccgggccggggaagaggcggggccgcggtccgcgcatccctgcggcgacgcttcagaagcagaaaacggcgttggcgaacgtcgaccagatcaccggcgccaagattccgaagagcttcgtattctcccgcggtaaactcccctccacgcttcgccatcttcagcaggacctccgcaaggagaagaaacgaaataacctcaaggattttgtcaatgttgccggcccgatggatagaggagtactcacttgcggcggacattgcaaactctcagaagcgcccaaggtgcccaccagggatattcaaaaactcaccactggttgtacttggtgggttgacaggtctcggcaaccctttcaggagtttggtcgaatacttccaacatatgttcccttccgttgacccaaccactgtcaagctggcaacatgccaaaggattctgttgttaaaacatgataaagagaaggatgttattgaattccggcattactccatcaagctccagcctgttggggtcagtcgcaggattagaaagctcatgcaaaacaatcaagtgcctgatctaggagaatttgaagatgttagtgagtttgtgaaaaaagctgggtatggatcagaaagtgaagcagacgatgaagcagcaatggtaagcttgccaagtgacattgacaaattaaaccgggcatccagaaaaagcgctgtcagactccaggagattggaccaaggatgactatgcgcctagttaaagttgaagctgggctatgttcaggagatgtcttatacccatggcctgtggaaaaggaagtggtgggaaagaaaggaacagaaactggggaagtagaagggcaagaagacgattctgaggccacagatgagtccgaggatgagatggtgtaggatttcagatgttttggacaggcagacgcaggtgttttgacagtcctggatgtttcatgctgaaaccaacgggccctgtgcccaataacgtggtgcattcatgccaattttgtcactgaaggtgcattgcattcgttgtaacgaagtgtaacattgttttgccgatggttacctcttttgtgttatgacaagtttggaggatagtttttggttcgcagtctaagatttctcattcttgtcggggtttcagagggatggacat

SEQ ID NO: 1674 - DNA, 2105 bp, Zea Mays
ctcccctcccaaaattcttctccttgcggtctccctcgacgccaagcccacatccgccactctccacgctcgcacacgccgcctcctcctcctcgtcacctcttcgccgcagtggctcccgtcgtcccacgcctccctcgtcatgtcgaagaaggcgactctccatcccttccgagttccgagctcatgctcccctccgcccctggcatgggtgaagtctatgtgggaacactgaacctgcaaccgagatcgtagagattcgacaatatcacaagaggatcatacttctactccatgaaaactgtaacctactagagctgaaagaaatatagagcctataagaaggaaatgtatgagatgcaaccaatgtacagtaagcaacttaccatatttctttatgacattgttccaagaattaataagtattccagtgagcgtctcaaaaatggaatcaagagatgagatggtaactagctgaaaacagtaataattaaaacccaagagcgattttgcgacgccctgctgtgagccgaccctagcagtcaaggcttcgtaaatcagatttatctatcaggtaaagtcacaggaaatgttgtggcaaaggtatggcttaagagaaatcatgtacctagatgatttgttgtctatacgattagatggtgctgttcatcttcaattttgtcaaatttggcaccactccagtcaccaaccatacataaaaaagttttagtgaagtcaatgaagcaaacattttaatatttcattctatcaataaaagtgtagttttgcttccgataagacctccataaacaataaacacgggtaaaggagagtattgatggttggaatgagtggtggtagcagaatgatatctacatacattgattataggtaccagcacctcatttttttataaaaaaatatgtgcgaacttggaactttttaatatgtgaggaagatgggtagatactgttgttgtgggcagggcagggcacccgagcaaaagcatagatgcgaatgagatgaatctgggttagctctcttcccctatttattggagttggagggatacactgctgctatggtttggtctgtgatgtcgtctcattagaaaaacatttgcttggattgtatctcttttcctttcctttctcattagaggacttaaactgagcacatgcttggcgtatgcgtaatgtatgtggcaagcaaaagcaaatactattctattaatgtgctcctactaacctgctctgcccacaatttattatgggtagatactgttccaatttattatgcatgttggcttcttgcagggaatgaatacatctttcgtttatatcaattgtgattcagatgtatgtcagtcttagtaagactgttaagttgtgacatgaatgtgaattcgataatgtatttcataacttcatctacactacagatgtattgtgttattgttcccattcatcattgaaagtagttgttagatccaaattgatttcagttttacgaagtgatgctgctactgcttccttataagtgttgctcccatttgatttgtcagatcactggcttctgctactttcaagtagtgctgctgctttcgagtggtgctgctgctttcaagttgaagtgagttgctgttgacttccacaacaagctgccacttttagtggaagtgagtacaaaacatgttgttgctgcatctcgggcaaatagcaaagttgtttattctgctttcaaacagcagtgctggtgccaaaagaatgtttacaagaaaattcaaaaccaaacaaaagttgacaacaaacaggatgccataacaatctatttgctagcaccatccagaattttaaaaattcagtttgttgccatgaaacagtttgctaccaccgttcagaattcagccatgttcaagtttacaactgcgttataaaggaaattcagtttgctaccaccgtggcactgtccagaaatgtatattttgacaaacatacatgaccagaacgatctattttgacaattttaacgagacatggcccattttgtagagcggcaataaagagtgacccattttaacaaattcctcatcaaatgaattatct

SEQ ID NO: 1675 - DNA, 1423 bp, Zea Mays
caaaattcttctccttgcggtctccctcgacgccaagcccacatccgccactctccacgctcgcacacgccgcctcctcctcctcgtcacctcttcgccgcagtggctcccgtcgtcccacgcctccctcgtcatgtcgaagaaggcgactctccatcccttccgagttccgagctcatgctcccctccgcccctggcatgggtgaagtctatgtgggaacactgaacctgcaaccgagatcgtagagattcgacaatatcacaagaggatcatacttctactccatgaaaactgtaacctactagagctgaaagaaatatagagcctataagaaggaaatgtatgagatgcaaccaatgtacttctttgccactccttaacttatagtagcattttatgatttgctctctttgaccaattcctgcctaacttgcaattgaaccaccaaatggtttcatactattttctggattaagctggatcatttgttttctaaagttcaattaattgttatgtcattactcaattcatatcactgatcatatagagcatattatatacttccgtctgtattcttttatataatgtatacgcatatcaagattcaaattttgaaatatgtgaccaataaattatttatacctactataatactgcattcattcactaatgcaggtacagtaagcaacttaccatatttctttatgacattgttccaagaattaataagtattccagtgagcgtctcaaaaatggaatcaagagatgagatggtaactagctgaaaacagtaataattaaaacccaagagcgattttgcgacgccctgctgtgagccgaccctagcagtcaaggcttcgtaaatcagatttatctatcagatcactggcttctgctactttcaagtagtgctgctgctttcgagtggtgctgctgctttcaagttgaagtgagttgctgttgacttccacaacaagctgccacttttagtggaagtgagtacaaaacatgttgttgctgcatctcgggcaaatagcaaagttgtttattctgctttcaaacagcagtgctggtgccaaaagaatgtttacaagaaaattcaaaaccaaacaaaagttgacaacaaacaggatgccataacaatctatttgctagcaccatccagaattttaaaaattcagtttgttgccatgaaacagtttgctaccaccgttcagaattcagccatgttcaagtttacaactgcgttataaaggaaattcagtttgctaccaccgtggcactgtccagaaatgtatattttgacaaacatacatgaccagaacgatctattttgacaattttaacgagacatggcccattttgtagagcggcaataaagagtgacccattttaacaaattcctcatcaaatgaattatct

SEQ ID NO: 1676 - DNA, 2057 bp, Zea Mays
ctccctcgacgccaagcccacatccgccactctccacgctcgcacacgccgcctcctcctcctcgtcacctcttcgccgcagtggctcccgtcgtcccacgcctccctcgtcatgtcgaagaaggcgactctccatcccttccgagttccgagctcatgctcccctccgcccctggcatgggtgaagtctatgtgggaacactgaacctgcaaccgagatcgtagagattcgacaatatcacaagaggatcatacttctactccatgaaaactgtaacctactagagctgaaagaaatatagagcctataagaaggaaatgtacagtaagcaacttaccatatttctttatgacattgttccaagaattaataagtattccagtgagcgtctcaaaaatggaatcaagagatgagatggtaactagctgaaaacagtaataattaaaacccaagagcgattttgcgacgccctgctgtgagccgaccctagcagtcaaggcttcgtaaatcagatttatctatcaggtaaagtcacaggaaatgttgtggcaaaggtatggcttaagagaaatcatgtacctagatgatttgttgtctatacgattagatggtgctgttcatcttcaattttgtcaaatttggcaccactccagtcaccaaccatacataaaaaagttttagtgaagtcaatgaagcaaacattttaatatttcattctatcaataaaagtgtagttttgcttccgataagacctccataaacaataaacacgggtaaaggagagtattgatggttggaatgagtggtggtagcagaatgatatctacatacattgattataggtaccagcacctcatttttttataaaaaaatatgtgcgaacttggaactttttaatatgtgaggaagatgggtagatactgttgttgtgggcagggcagggcacccgagcaaaagcatagatgcgaatgagatgaatctgggttagctctcttcccctatttattggagttggagggatacactgctgctatggtttggtctgtgatgtcgtctcattagaaaaacatttgcttggattgtatctcttttcctttcctttctcattagaggacttaaactgagcacatgcttggcgtatgcgtaatgtatgtggcaagcaaaagcaaatactattctattaatgtgctcctactaacctgctctgcccacaatttattatgggtagatactgttccaatttattatgcatgttggcttcttgcagggaatgaatacatctttcgtttatatcaattgtgattcagatgtatgtcagtcttagtaagactgttaagttgtgacatgaatgtgaattcgataatgtatttcataacttcatctacactacagatgtattgtgttattgttcccattcatcattgaaagtagttgttagatccaaattgatttcagttttacgaagtgatgctgctactgcttccttataagtgttgctcccatttgatttgtcagatcactggcttctgctactttcaagtagtgctgctgctttcgagtggtgctgctgctttcaagttgaagtgagttgctgttgacttccacaacaagctgccacttttagtggaagtgagtacaaaacatgttgttgctgcatctcgggcaaatagcaaagttgtttattctgctttcaaacagcagtgctggtgccaaaagaatgtttacaagaaaattcaaaaccaaacaaaagttgacaacaaacaggatgccataacaatctatttgctagcaccatccagaattttaaaaattcagtttgttgccatgaaacagtttgctaccaccgttcagaattcagccatgttcaagtttacaactgcgttataaaggaaattcagtttgctaccaccgtggcactgtccagaaatgtatattttgacaaacatacatgaccagaacgatctattttgacaattttaacgagacatggcccattttgtagagcggcaataaagagtgacccattttaacaaattcctcatcaaatgaattatct

SEQ ID NO: 1677 - DNA, 959 bp, Zea Mays
gccaagcccacatccgccactctccacgctcgcacacgccgcctcctcctcctcgtcacctcttcgccgcagtggctcccgtcgtcccacgcctccctcgtcatgtcgaagaaggcgactctccatcccttccgagttccgagctcatgctcccctccgcccctggcatgggtgaagtctatgtgggaacactgaacctgcaaccgagatcgtagagattcgacaatatcacaagaggatcatacttctactccatgaaaactgtaacctactagagctgaaagaaatatagagcctataagaaggaaatgtatgagatgcaaccaatgtacagtaagcaacttaccatatttctttatgacattgttccaagaattaataagtattccagtgagcgtctcaaaaatggaatcaagagatcactggcttctgctactttcaagtagtgctgctgctttcgagtggtgctgctgctttcaagttgaagtgagttgctgttgacttccacaacaagctgccacttttagtggaagtgagtacaaaacatgttgttgctgcatctcgggcaaatagcaaagttgtttattctgctttcaaacagcagtgctggtgccaaaagaatgtttacaagaaaattcaaaaccaaacaaaagttgacaacaaacaggatgccataacaatctatttgctagcaccatccagaattttaaaaattcagtttgttgccatgaaacagtttgctaccaccgttcagaattcagccatgttcaagtttacaactgcgttataaaggaaattcagtttgctaccaccgtggcactgtccagaaatgtatattttgacaaacatacatgaccagaacgatctattttgacaattttaacgagacatggcccattttgtagagcggcaataaagagtgacccattttaacaaattcctcatcaaatgaattatct

SEQ ID NO: 1678 - DNA, 939 bp, Zea Mays
caagcccacatccgccactctccacgctcgcacacgccgcctcctcctcctcgtcacctcttcgccgcagtggctcccgtcgtcccacgcctccctcgtcatgtcgaagaaggcgactctccatcccttccgagttccgagctcatgctcccctccgcccctggcatgggtgaagtctatgtgggaacactgaacctgcaaccgagatcgtagagattcgacaatatcacaagaggatcatacttctactccatgaaaactgtaacctactagagctgaaagaaatatagagcctataagaaggaaatgtacagtaagcaacttaccatatttctttatgacattgttccaagaattaataagtattccagtgagcgtctcaaaaatggaatcaagagatcactggcttctgctactttcaagtagtgctgctgctttcgagtggtgctgctgctttcaagttgaagtgagttgctgttgacttccacaacaagctgccacttttagtggaagtgagtacaaaacatgttgttgctgcatctcgggcaaatagcaaagttgtttattctgctttcaaacagcagtgctggtgccaaaagaatgtttacaagaaaattcaaaaccaaacaaaagttgacaacaaacaggatgccataacaatctatttgctagcaccatccagaattttaaaaattcagtttgttgccatgaaacagtttgctaccaccgttcagaattcagccatgttcaagtttacaactgcgttataaaggaaattcagtttgctaccaccgtggcactgtccagaaatgtatattttgacaaacatacatgaccagaacgatctattttgacaattttaacgagacatggcccattttgtagagcggcaataaagagtgacccattttaacaaattcctcatcaaatgaattatct

SEQ ID NO: 1679 - DNA, 1457 bp, Zea Mays
cccacatccgccactctccacgctcgcacacgccgcctcctcctcctcgtcacctcttcgccgcagtggctcccgtcgtcccacgcctccctcgtcatgtcgaagaaggcgactctccatcccttccgagttccgagctcatgctcccctccgcccctggcatgtaagttttcgccaaacctatccgccatatcccttcgctccctcctccttccaatgtggactgaccaggtctgttcgtttgcctcaacacgccacgtcccacggaccgtactatcgcctccatagccgtggtcgctcggccacacgtaccggtcgcttcgcctgctgtcgctgtggcaacagtcgtgatacctgccttcgtcagcaacacgtcccaaaccgactaagcgtcccaggccaccgcgatacttcattttcgaaatcgctgcggctgcagcagttatgcctgccttgctccaaatatataacattgagactgagtagaaaatcaagttgaagtcatcggaagttgtcaaacctcttttttctcttttttggtatgttttttagagtccaattttgttggacctagaaataatggctacgacttggtccacccggcttccaacatatgaaacttcttgcgtcttcattaaattgtgctaatataatgtgtgtttcgttttgttttgtcctgccacaggggtgaagtctatgtgggaacactgaacctgcaaccgagatcgtagagattcgacaatatcacaagaggatcatacttctactccatgaaaactgtaacctactagagctgaaagaaatatagagcctataagaaggaaatgtacagtaagcaacttaccatatttctttatgacattgttccaagaattaataagtattccagtgagcgtctcaaaaatggaatcaagagatcactggcttctgctactttcaagtagtgctgctgctttcgagtggtgctgctgctttcaagttgaagtgagttgctgttgacttccacaacaagctgccacttttagtggaagtgagtacaaaacatgttgttgctgcatctcgggcaaatagcaaagttgtttattctgctttcaaacagcagtgctggtgccaaaagaatgtttacaagaaaattcaaaaccaaacaaaagttgacaacaaacaggatgccataacaatctatttgctagcaccatccagaattttaaaaattcagtttgttgccatgaaacagtttgctaccaccgttcagaattcagccatgttcaagtttacaactgcgttataaaggaaattcagtttgctaccaccgtggcactgtccagaaatgtatattttgacaaacatacatgaccagaacgatctattttgacaattttaacgagacatggcccattttgtagagcggcaataaagagtgacccattttaacaaattcctcatcaaatgaattatct

SEQ ID NO: 1680 - DNA, 2389 bp, Zea Mays
gccactctccacgctcgcacacgccgcctcctcctcctcgtcacctcttcgccgcagtggctcccgtcgtcccacgcctccctcgtcatgtcgaagaaggcgactctccatcccttccgagttccgagctcatgctcccctccgcccctggcatccgtggtcgctcggccacacgtaccggtcgcttcgcctgctgtcgctgtggcaacagtcgtgatacctgccttcgtcagcaacacgtcccaaaccgactaagcgtcccaggccaccgcgatacttcattttcgaaatcgctgcggctgcagcagttatgcctgccttgctccaaatatataacattgagactgagtagaaaatcaagttgaagtcatcggaagttgtcaaacctcttttttctcttttttggggtgaagtctatgtgggaacactgaacctgcaaccgagatcgtagagattcgacaatatcacaagaggatcatacttctactccatgaaaactgtaacctactagagctgaaagaaatatagagcctataagaaggaaatgtacagtaagcaacttaccatatttctttatgacattgttccaagaattaataagtattccagtgagcgtctcaaaaatggaatcaagaggtgaggaaagacatcgccccagttctgtagaggatgccttccttttcctcgggttttgttgtgtgtcctgcttaccaagcattgatagcaattcgccgattgatagatgagatggtaactagctgaaaacagtaataattaaaacccaagagcgattttgcgacgccctgctgtgagccgaccctagcagtcaaggcttcgtaaatcagatttatctatcaggtaaagtcacaggaaatgttgtggcaaaggtatggcttaagagaaatcatgtacctagatgatttgttgtctatacgattagatggtgctgttcatcttcaattttgtcaaatttggcaccactccagtcaccaaccatacataaaaaagttttagtgaagtcaatgaagcaaacattttaatatttcattctatcaataaaagtgtagttttgcttccgataagacctccataaacaataaacacgggtaaaggagagtattgatggttggaatgagtggtggtagcagaatgatatctacatacattgattataggtaccagcacctcatttttttataaaaaaatatgtgcgaacttggaactttttaatatgtgaggaagatgggtagatactgttgttgtgggcagggcagggcacccgagcaaaagcatagatgcgaatgagatgaatctgggttagctctcttcccctatttattggagttggagggatacactgctgctatggtttggtctgtgatgtcgtctcattagaaaaacatttgcttggattgtatctcttttcctttcctttctcattagaggacttaaactgagcacatgcttggcgtatgcgtaatgtatgtggcaagcaaaagcaaatactattctattaatgtgctcctactaacctgctctgcccacaatttattatgggtagatactgttccaatttattatgcatgttggcttcttgcagggaatgaatacatctttcgtttatatcaattgtgattcagatgtatgtcagtcttagtaagactgttaagttgtgacatgaatgtgaattcgataatgtatttcataacttcatctacactacagatgtattgtgttattgttcccattcatcattgaaagtagttgttagatccaaattgatttcagttttacgaagtgatgctgctactgcttccttataagtgttgctcccatttgatttgtcagatcactggcttctgctactttcaagtagtgctgctgctttcgagtggtgctgctgctttcaagttgaagtgagttgctgttgacttccacaacaagctgccacttttagtggaagtgagtacaaaacatgttgttgctgcatctcgggcaaatagcaaagttgtttattctgctttcaaacagcagtgctggtgccaaaagaatgtttacaagaaaattcaaaaccaaacaaaagttgacaacaaacaggatgccataacaatctatttgctagcaccatccagaattttaaaaattcagtttgttgccatgaaacagtttgctaccaccgttcagaattcagccatgttcaagtttacaactgcgttataaaggaaattcagtttgctaccaccgtggcactgtccagaaatgtatattttgacaaacatacatgaccagaacgatctattttgacaattttaacgagacatggcccattttgtagagcggcaataaagagtgacccattttaacaaattcctcatcaaatgaattatct

SEQ ID NO: 1681 - DNA, 247 bp, Zea Mays
caactcacaagaggtaaggtcttccattcccataacgtttatcagttacagagtcgaattacaaagataaataattagtgcagtgtctaaatcatctgtgaatctcaatagaaacaagaggaagggaaaacctacaatgacaaaataaaacgatgtgctagagagaagaggctcgttggatcttcacatatgacacctcaagtttctaaaccaccaaactactctggagtaccgccgccgccgccgc

SEQ ID NO: 1682 - DNA, 2174 bp, Zea Mays
caactgaaagtcgcctagaggggggtgaataggcggaatctaaaatttacaaacttaagcacacactacaagtcggagttagcgttagaattaaatttgagtccgaaaaagagggaaaaacaaatcaacagggaaagaaagcggatgaacacggtgatttaattttaccgaggttcggttcttgcaaacctactccccgttgaggtggtcacaaagaccgggtctctttcaatcatttccctctctcaaacggccacttagaccgagtgagcctttctcttcaatcaaatgggacacttagtccactacaaggaccaccacaacttggtgtctcttactttgattgcaagtgagttggaaacaaaaatagaggaagaagaaaagcaatccaagcgcaagagctcaaaggaacacaaaagtctctctctagtcactaatttgtttggagtgattccggacttgggagaggatttgatctctttgtttgtgtcttagaatgaagtctatagctcttgtatgaggtttgatggctgaaaacttggatgcaatgaagtgtggtggttggggggtatttatagccccaaccaccaaaatggcctttggtgagagcttctgtcgtatggcgcaccggacagtccggtgcgccagtcacgtcacctagccgttgggttccgaccgttggagctctgatatgtggggccaccagacagtccgatggtgcaccggacagtcactgttcactgtccggtgcgccttctggcgcctgctctgactctgcgcgcgcagtcgcgcactgttcactattcctgtagcttttgcagacgaccgttggtgcagttagccgttactccgctggcacaccggacagtctggtgaattatagcggaggggctccccgaattcccgaagctgagcagttcagagggattctccctggtgcaccggacagtccggtgcgccagaccagggcagcctttggttgctttgctcctttctttttgaaccctttctttgacctttgtattggtttattgtgaacctttgacacctgtagaacttataatctagagcaagctagttagtccaattgtttgtgttgggcaattcaaccaccaaaatcatttaggaaaaggtgtgagcctatttccctttcaatctccccctttttggtgattgatgccaacacaaaccaaagcaaatatataagtgcagaattgaactagtgtgcataaggtaagtgcaaaaggttacttggagttaaaccaatatacatcttataagatatgcatggatgctttcttctaattttaacattttggaccacgcttgcaccacttgttttgtttttgcaaatgttttggaaattctttttcaaagtcttttgcaaatagtcaaaggtatatggataagattttgagaagcattttcaagatttgaaattttctccccctgtttcaaatgccttttcctttgactaaacaaaactccccctcaatgaaattctcctcttagtgttcaagagggttttatatattaattttgaaaggtgtcataccaatttgaaattatattaaaaataagataccaattgaaaaacttctttaaattcaaattgaaagactacttttttgaaattggtggcggcgcggtccttttgcttttggctaatactttctccccctttggcatgaatcgccaaaaacggatacttgtgagtgaaatataaacccttttactttctcaccccctttgctaaacaatatatgagtgaagattataccaaattggagagcggtgcggagtgacgtcgaaggataaataattcgatggagtggagtggaagccttgtcttcgccgaagactccttttccctttcaatctatgacttagcataaaatacacttgaaaaccacattagtcatagcaaagaaagagatatgatcaaaggtatattaatgagctatgtgtgcaaggtatcaatcaaaattcctagaatcaagactattgagctcatgcctaagtttggtaaaagttttctcatctaatggcttgataaagatatcggctaattgttctttagtgttaatgtaagcaatctcgatatctctccgttgttggtgatcccttaaaaagtgataccgaatggctatgtgcttagtgcggctgtgctcaac

SEQ ID NO: 1683 - DNA, 1519 bp, Zea Mays
cgaacgcgtccttaaccgaaatggcggaatcggcctcgcagagggatagccggaggcccagaagcgtccggaaagacagcgcacgaagcaatctttccctttccccaagatgggattcggcttcgttcgtctcgccgcccgcgccgcggtttctcgccggggcatgacgccagcaacctccgcccgccgcgcgctcgccccacccgccgtgccggcggagccccgctgcgggccccactggctcgtggccgcccgcggccacgtgggccactcgcaccaccgcggcggggaggacgagggcgagacatccgagaggatctttcgtctgggactcgccgctgacgtcgtactcaccgcggggaaggccgtcacaggctatctctccggcagcaccgccatcgccgccgatgccgcccactccctctcggacatagtgcttagcggggtggctctgctgtcttacagggcggccaaggctcccagagacaaggaacatccctatgggcatggaaagtttgaaagtttaggagctcttggaatttcaagtatgctgttggttacttcagggagttatgtcttctgctcctgatataattggcaatacattgcatgcacaccatgaccatggtagcagtgggcatcatcatggaatagatttggaacatccagttcttgcattgagcatgacaactttagcaatatctatcaaagaagggctatactggataacaaaaagagctggggaaaaggaaggcagtggtctgatgaaagctaatgcatggcaccatcgtgcagatgctatttcatctgtcgttgccctagtaggggtaggtggttccattcttgggttgcctcttcttgatccactagctggacttgttgtctctggcatgattctgaaagctggtattaagactggatatgagaggggggtaagacagccctcgggcattatattaagaagaagctctcacgcaggtcgagaaaacccccgaacccctgccccacccatacacagcggcaccgtagcccatgtgagaagcgaccgggacgggacggcgggaccaggaccaggccttagacctgtgctttggcgtgggacagccggggagatttttgtaaccacaccctgaaattcgctcccacggggagtcgaacctaggacctgaggagtgctactcagaccgcctaaccaactcggctagaggctcttccacactgcaatctgattacatctgttgcttgtattaagtgattatttttctgtacttccagaaatattattgtcgatgtgtagctttctgaagccaatggctgaaaatattcatgaaataaaagatgacatatgctcattttctgtgtgcctgcgctgctaggatcattgctttttcagtctcattcagctgatatcacttttgaacctaataagcacaaacctttcaaatattaacaaattattcttatatacaatttagtatacatgatgcttcacctttgtagtttgcatgatgttacttat

SEQ ID NO: 1684 - DNA, 2641 bp, Zea Mays
cgaacgcgtccttaaccgaaatggcggaatcggcctcgcagagggatagccggaggcccagaagcgtccggaaagacagcgcacgaagcaatctttccctttccccaagatgggattcggcttcgttcgtctcgccgcccgcgccgcggtttctcgccggggcatgacgccagcaacctccgcccgccgcgcgctcgccccacccgccgtgccggcggagccccgctgcgggccccactggctcgtggccgcccgcggccacgtgggccactcgcaccaccgcggcggggaggacgagggcgagacatccgagaggatctttcgtctgggactcgccgctgacgtcgtactcaccgcggggaaggccgtcacaggctatctctccggcagcaccgccatcgccgccgatgccgcccactccctctcggacatagtgcttagcggggtggctctgctgtcttacagggcggccaaggctcccagagacaaggaacatccctatgggcatggaaagtttgaaagtttaggagctcttggaatttcaagtatgctgttggttacttcaggtgggattgcatggcatgcttttgaagttcttcagggagttatgtcttctgctcctgatataattggcaatacattgcatgcacaccatgaccatggtagcagtgggcatcatcatggaatagatttggaacatccagttcttgcattgagcatgacaactttagcaatatctatcaaagaagggctatactggataacaaaaagagctggggaaaaggaaggcagtggtctgatgaaagctaatgcatggcaccatcgtgcagatgctatttcatctgtcgttgccctagtaggggtaggtggttccattcttgggttgcctcttcttgatccactagctggacttgttgtctctggcatgattctgaaagctggtattaagactggatatgagagtgttctggaattagttgatgctgctgtggatccttcacttttagaaccaatcaaggaaactattttgagggttcacggtgtgaagggatgtcatcgattgaggggaagaaaagctgggacatcattatatcttgatgtgcatatagaggtatatccttttctgagtgttagtgcagcacatgatatcggtgaaactgttcgtcatcaaattcaaaaggagcacaatcaagttgctgaagttttcatacacatagatccctcgtacttagtaggcccgaccatggacctaaaaaggatcctgaaggactctgatggaacaaattcagaagctatcccacggcaacaaagtgcagaagccatcgtgtctaatattatttcatctcatttttcggaggcccagcgatggagcgatgatggtggtcttgcctcttttgcgggtgcttcagcggatagtcggcctcaggcctcttacaaagaggtgttgctttcctcccgaccccccatccatcatcctgctgctgaggttgatggcgacggttgggtgagagtcaaggatcgtcgtgcatgcttcagggatcatcgtgcctgccagcgtgatcttcgtcaccctggcctctctgcccccaaggctactcctattgacttgcaggggtggtgcttcaattgcttttcctcgtctcatcgtgcaatcagctgttgtcgtcaggacgcctgtccggtggcaccgtctttgagcccgcagatggcagctcttgaccaatcagtgagcgcgctccgaccttgctgtgtcatcaaacattccaggaggattatccaagctgaagagaatctgcggagtgctctgttcgtcaacgtagttgggccagaggattcaggtcgcaccgctgaggtcttgaacgcactcacacagaggtttggttttgaggatgatgtgatcgacctacgtcgcgtcgcgccgaattcctttcccagtgatgatctagctaatcgagtcttcaatggagtaatggcgccattcatttcgttcataactcctacaccggttcatgctgcggttgaggtccatgcctcagttaagtctgcatggttccaggctcctggtgtttcttctaatgcattggtcgagcacttgttgggaaatttgaccgtgtcagctcaggacttcggaatgcctcagattgagaagtgcgttgatggtttgggtgctgtgggtgcagtggttcttcactccccagcattaccttctgttcaggtctcccgatctggatctagcaaaatactgaaagtctatcacagaaggattcggcccaagcttcagcttcaggaggttaatacctgtgacatagctaacaactttatcgagatggtcaccaaacccctatcaactattttgtcgacaccagcatctcctaagccgaagaccagaaagaatatttcaccaaattttgttccaagaagatccaggcgtgtggccaagttacaccctttagtgtttgggttgaagaataagcatggctcactttcttctgctgatctggagcattgtgctcaggaattcagtaagtcagtatcccttaagcaagttaaagttctaagcaaggtggggctgcaggctttatcccccgggattgctgacattgttttccaggattggtggggtgggggggggggtggctga

SEQ ID NO: 1685 - DNA, 1386 bp, Zea Mays
cgaacgcgtccttaaccgaaatggcggaatcggcctcgcagagggatagccggaggcccagaagcgtccggaaagacagcgcacgaagcaatctttccctttccccaagatgggattcggcttcgttcgtctcgccgcccgcgccgcggtttctcgccggggcatgacgccagcaacctccgcccgccgcgcgctcgccccacccgccgtgccggcggagccccgctgcgggccccactggctcgtggccgcccgcggccacgtgggccactcgcaccaccgcggcggggaggacgagggcgagacatccgagaggatctttcgtctgggactcgccgctgacgtcgtactcaccgcggggaaggccgtcacaggctatctctccggcagcaccgccatcgccgccgatgccgcccactccctctcggacatagtgcttagcggggtggctctgctgtcttacagggcggccaaggctcccagagacaaggaacatccctatgggcatggaaagtttgaaagtttaggagctcttggaatttcaagtatgctgttggttacttcaggtgggattgcatggcatgcttttgaagttcttcagggagttatgtcttctgctcctgatataattggcaatacattgcatgcacaccatgaccatggtagcagtgggcatcatcatggaatagatttggaacatccagttcttgcattgagcatgacaactttagcaatatctatcaaagaagggctatactggataacaaaaagagctggggaaaaggaaggcagtggtctgatgaaagctaatgcatggcaccatcgtgcagatgctatttcatctgtcgttgccctagtaggggtaggtggttccattcttgggttgcctcttcttgatccactagctggacttgttgtctctggcatgattctgaaagctggtattaagactggatatgagagtgttctggaattagttgatgctgctgtggatccttcacttttagaaccaatcaaggaaactattttgagggttcacggtgtgaagggatgtcatcgattgaggggaagaaaagctgggacatcattatatcttgatgtgcatatagaggtatatccttttctgagtgttagtgcagcacatgatatcggtgaaactgttcgtcatcaaattcaaaaggagcacaatcaagttgctgaagttttcatacacatagatccctcgtacttagtaggcccgaccatggacctaaaaaggatcctgaaggactctgatggaacaaattcagaagctatcccacggcaacaaagtgcagaagccatcgtgtctaatattatttcatctcatttttcggaggtccttaggagtttgttttgtccccaagg

SEQ ID NO: 1686 - DNA, 2596 bp, Zea Mays
cgaacgcgtccttaaccgaaatggcggaatcggcctcgcagagggatagccggaggcccagaagcgtccggaaagacagcgcacgaagcaatctttccctttccccaagatgggattcggcttcgttcgtctcgccgcccgcgccgcggtttctcgccggggcatgacgccagcaacctccgcccgccgcgcgctcgccccacccgccgtgccggcggagccccgctgcgggccccactggctcgtggccgcccgcggccacgtgggccactcgcaccaccgcggcggggaggacgagggcgagacatccgagaggatctttcgtctgggactcgccgctgacgtcgtactcaccgcggggaaggccgtcacaggctatctctccggcagcaccgccatcgccgccgatgccgcccactccctctcggacatagtgcttagcggggtggctctgctgtcttacagggcggccaaggctcccagagacaaggaacatccctatgggcatggaaagtttgaaagtttaggagctcttggaatttcaagtatgctgttggttacttcaggtgggattgcatggcatgcttttgaagttcttcagggagttatgtcttctgctcctgatataattggcaatacattgcatgcacaccatgaccatggtagcagtgggcatcatcatggaatagatttggaacatccagttcttgcattgagcatgacaactttagcaatatctatcaaagaagggctatactggataacaaaaagagctggggaaaaggaaggcagtggtctgatgaaagctaatgcatggcaccatcgtgcagatgctatttcatctgtcgttgccctagtaggggtaggtggttccattcttgggttgcctcttcttgatccactagctggacttgttgtctctggcatgattctgaaagctggtattaagactggatatgagaggggggtaagacagccctcgggcattatattaagaagaagctctcacgcaggtcgagaaaacccccgaacccctgccccacccatacacagcggcaccgtagcccatgtgagaagcgaccgggacgggacggcgggaccaggaccaggccttagacctgtgctttggcgtgggacagccggggagatttttgtaaccacaccctgaaattcgctcccacggggagtcgaacctaggacctgaggagtgctactcagaccgcctaaccaactcggctagaggctcttccacactgcaatctgattacatctgttgcttgtattaagtgattatttttctgtacttccagaaatattattgtcgatgtgtagctttctgaagccaatggctgaaaatattcatgaaataaaagatgacatatgctcattttctgtgtgcctgcgctgctaggatcattgctttttcagtctcattcagctgatatcacttttgaacctaataagcacaaacctttcaaatattaacaaattattcttatatacaatttagtatacatgatgcttcacctttgtagtttgcatgatgttacttatggtgatgattctgcttgtttcgcttgcagtgttctggaattagttgatgctgctgtggatccttcacttttagaaccaatcaaggaaactattttgagggttcacggtgtgaagggatgtcatcgattgaggggaagaaaagctgggacatcattatatcttgatgtgcatatagaggtatatccttttctgagtgttagtgcagcacatgatatcggtgaaactgttcgtcatcaaattcaaaaggagcacaatcaagttgctgaagttttcatacacatagatccctcgtacttagtaggcccgaccatggacctaaaaaggatcctgaaggactctgatggaacaaattcagaagctatcccacggcaacaaagtgcagaagccatcgtgtctaatattatttcatctcatttttcggagaaaatggcgctcgaacatctaatgctgcattacgtgcaaggaagagtgttgctccaggtccaagtttcaatgtctccagaaattttgattcgggatgcaatggaagtcgcgaagcaagccgaagaggagatactcagggctgatgccagcataagccaaatcagcttgcagctaagattgggccaacaaatcaagcaacttcagctagcatcgcaagaacgtcgctgatctacatgcaggagatcactgatccatttgctggctgcttcatgagtctactcgggagtatttccttttgctaatttttctgacatacatgagcttggtctgctgatgaggcagtaggctataggattctaggaaccgactgtgtacattgtaatcagagtgttcggagacgtgaagctgagtttgtaataatacacaagcagccttgctcagaaatgtactgggcaacaaattgtctgccacatactgtcaatgtaaaatgtatgaacaagttcctcactggccccgctataataacaacgaaccatggctactgatgcaaaataaaatgaatattgttttttttctgtgcacatctcacatttatttcattccattaacgaaatactac

SEQ ID NO: 1687 - DNA, 1941 bp, Zea Mays
cgaacgcgtccttaaccgaaatggcggaatcggcctcgcagagggatagccggaggcccagaagcgtccggaaagacagcgcacgaagcaatctttccctttccccaagatgggattcggcttcgttcgtctcgccgcccgcgccgcggtttctcgccggggcatgacgccagcaacctccgcccgccgcgcgctcgccccacccgccgtgccggcggagccccgctgcgggccccactggctcgtggccgcccgcggccacgtgggccactcgcaccaccgcggcggggaggacgagggcgagacatccgagaggatctttcgtctgggactcgccgctgacgtcgtactcaccgcggggaaggccgtcacaggctatctctccggcagcaccgccatcgccgccgatgccgcccactccctctcggacatagtgcttagcggggtggctctgctgtcttacagggcggccaaggctcccagagacaaggaacatccctatgggcatggaaagtttgaaagtttaggagctcttggaatttcaagtatgctgttggttacttcagggagttatgtcttctgctcctgatataattggcaatacattgcatgcacaccatgaccatggtagcagtgggcatcatcatggaatagatttggaacatccagttcttgcattgagcatgacaactttagcaatatctatcaaagaagggctatactggataacaaaaagagctggggaaaaggaaggcagtggtctgatgaaagctaatgcatggcaccatcgtgcagatgctatttcatctgtcgttgccctagtaggggtaggtggttccattcttgggttgcctcttcttgatccactagctggacttgttgtctctggcatgattctgaaagctggtattaagactggatatgagagtgttctggaattagttgatgctgctgtggatccttcacttttagaaccaatcaaggaaactattttgagggttcacggtgtgaagggatgtcatcgattgaggggaagaaaagctgggacatcattatatcttgatgtgcatatagaggtatatccttttctgagtgttagtgcagcacatgatatcggtgaaactgttcgtcatcaaattcaaaaggagcacaatcaagttgctgaagttttcatacacatagatccctcgtacttagtaggcccgaccatggacctaaaaaggatcctgaaggactctgatggaacaaattcagaagctatcccacggcaacaaagtgcagaagccatcgtgtctaatattatttcatctcatttttcggagaaaatggcgctcgaacatctaatgctgcattacgtgcaaggaagagtgttgctccaggtccaagtttcaatgtctccagaaattttgattcgggatgcaatggaagtcgcgaagcaagccgaagaggagatactcagggctgatgccagcataagccaaatcagcttgcagctaagattgggccaacaaatcaagcaacttcagctagcatcgcaagaacgtcgctgatctacatgcaggagatcactgatccatttgctggctgcttcatgagtctactcgggagtatttccttttgctaatttttctgacatacatgagcttggtctgctgatgaggcagtaggctataggattctaggaaccgactgtgtacattgtaatcagagtgttcggagacgtgaagctgagtttgtaataatacacaagcagccttgctcagaaatgtactgggcaacaaattgtctgccacatactgtcaatgtaaaatgtatgaacaagttcctcactggccccgctataataacaacgaaccatggctactgatgcaaaataaaatgaatattgttttttttctgtgcacatctcacatttatttcattccattaacgaaatactac

SEQ ID NO: 1688 - DNA, 1972 bp, Zea Mays
cgaacgcgtccttaaccgaaatggcggaatcggcctcgcagagggatagccggaggcccagaagcgtccggaaagacagcgcacgaagcaatctttccctttccccaagatgggattcggcttcgttcgtctcgccgcccgcgccgcggtttctcgccggggcatgacgccagcaacctccgcccgccgcgcgctcgccccacccgccgtgccggcggagccccgctgcgggccccactggctcgtggccgcccgcggccacgtgggccactcgcaccaccgcggcggggaggacgagggcgagacatccgagaggatctttcgtctgggactcgccgctgacgtcgtactcaccgcggggaaggccgtcacaggctatctctccggcagcaccgccatcgccgccgatgccgcccactccctctcggacatagtgcttagcggggtggctctgctgtcttacagggcggccaaggctcccagagacaaggaacatccctatgggcatggaaagtttgaaagtttaggagctcttggaatttcaagtatgctgttggttacttcaggtgggattgcatggcatgcttttgaagttcttcagggagttatgtcttctgctcctgatataattggcaatacattgcatgcacaccatgaccatggtagcagtgggcatcatcatggaatagatttggaacatccagttcttgcattgagcatgacaactttagcaatatctatcaaagaagggctatactggataacaaaaagagctggggaaaaggaaggcagtggtctgatgaaagctaatgcatggcaccatcgtgcagatgctatttcatctgtcgttgccctagtaggggtggttccattcttgggttgcctcttcttgatccactagctggacttgttgtctctggcatgattctgaaagctggtattaagactggatatgagagtgttctggaattagttgatgctgctgtggatccttcacttttagaaccaatcaaggaaactattttgagggttcacggtgtgaagggatgtcatcgattgaggggaagaaaagctgggacatcattatatcttgatgtgcatatagaggtatatccttttctgagtgttagtgcagcacatgatatcggtgaaactgttcgtcatcaaattcaaaaggagcacaatcaagttgctgaagttttcatacacatagatccctcgtacttagtaggcccgaccatggacctaaaaaggatcctgaaggactctgatggaacaaattcagaagctatcccacggcaacaaagtgcagaagccatcgtgtctaatattatttcatctcatttttcggagaaaatggcgctcgaacatctaatgctgcattacgtgcaaggaagagtgttgctccaggtccaagtttcaatgtctccagaaattttgattcgggatgcaatggaagtcgcgaagcaagccgaagaggagatactcagggctgatgccagcataagccaaatcagcttgcagctaagattgggccaacaaatcaagcaacttcagctagcatcgcaagaacgtcgctgatctacatgcaggagatcactgatccatttgctggctgcttcatgagtctactcgggagtatttccttttgctaatttttctgacatacatgagcttggtctgctgatgaggcagtaggctataggattctaggaaccgactgtgtacattgtaatcagagtgttcggagacgtgaagctgagtttgtaataatacacaagcagccttgctcagaaatgtactgggcaacaaattgtctgccacatactgtcaatgtaaaatgtatgaacaagttcctcactggccccgctataataacaacgaaccatggctactgatgcaaaataaaatgaatattgttttttttctgtgcacatctcacatttatttcattccattaacgaaatactac

SEQ ID NO: 1689 - DNA, 1937 bp, Zea Mays
cgaacgcgtccttaaccgaaatggcggaatcggcctcgcagagggatagccggaggcccagaagcgtccggaaagacagcgcacgaagcaatctttccctttccccaagatgggattcggcttcgttcgtctcgccgcccgcgccgcggtttctcgccggggcatgacgccagcaacctccgcccgccgcgcgctcgccccacccgccgtgccggcggagccccgctgcgggccccactggctcgtggccgcccgcggccacgtgggccactcgcaccaccgcggcggggaggacgagggcgagacatccgagaggatctttcgtctgggactcgccgctgacgtcgtactcaccgcggggaaggccgtcacaggctatctctccggcagcaccgccatcgccgccgatgccgcccactccctctcggacatagtgcttagcggggtggctctgctgtcttacagggcggccaaggctcccagagacaaggaacatccctatgggcatggaaagtttgaaagtttaggagctcttggaatttcaagtatgctgttggttacttcagggagttatgtcttctgctcctgatataattggcaatacattgcatgcacaccatgaccatggtagcagtgggcatcatcatggaatagatttggaacatccagttcttgcattgagcatgacaactttagcaatatctatcaaagaagggctatactggataacaaaaagagctggggaaaaggaaggcagtggtctgatgaaagctaatgcatggcaccatcgtgcagatgctatttcatctgtcgttgccctagtaggggtggttccattcttgggttgcctcttcttgatccactagctggacttgttgtctctggcatgattctgaaagctggtattaagactggatatgagagtgttctggaattagttgatgctgctgtggatccttcacttttagaaccaatcaaggaaactattttgagggttcacggtgtgaagggatgtcatcgattgaggggaagaaaagctgggacatcattatatcttgatgtgcatatagaggtatatccttttctgagtgttagtgcagcacatgatatcggtgaaactgttcgtcatcaaattcaaaaggagcacaatcaagttgctgaagttttcatacacatagatccctcgtacttagtaggcccgaccatggacctaaaaaggatcctgaaggactctgatggaacaaattcagaagctatcccacggcaacaaagtgcagaagccatcgtgtctaatattatttcatctcatttttcggagaaaatggcgctcgaacatctaatgctgcattacgtgcaaggaagagtgttgctccaggtccaagtttcaatgtctccagaaattttgattcgggatgcaatggaagtcgcgaagcaagccgaagaggagatactcagggctgatgccagcataagccaaatcagcttgcagctaagattgggccaacaaatcaagcaacttcagctagcatcgcaagaacgtcgctgatctacatgcaggagatcactgatccatttgctggctgcttcatgagtctactcgggagtatttccttttgctaatttttctgacatacatgagcttggtctgctgatgaggcagtaggctataggattctaggaaccgactgtgtacattgtaatcagagtgttcggagacgtgaagctgagtttgtaataatacacaagcagccttgctcagaaatgtactgggcaacaaattgtctgccacatactgtcaatgtaaaatgtatgaacaagttcctcactggccccgctataataacaacgaaccatggctactgatgcaaaataaaatgaatattgttttttttctgtgcacatctcacatttatttcattccattaacgaaatactac

SEQ ID NO: 1690 - DNA, 1162 bp, Zea Mays
aatgctggtacttgccatgtcacaagaagggaactgctttagaatacgagtggtggttccattcttgggttgcctcttcttgatccactagctggacttgttgtctctggcatgattctgaaagctggtattaagactggatatgagagtgttctggaattagttgatgctgctgtggatccttcacttttagaaccaatcaaggaaactattttgagggttcacggtgtgaagggatgtcatcgattgaggggaagaaaagctgggacatcattatatcttgatgtgcatatagaggtatatccttttctgagtgttagtgcagcacatgatatcggtgaaactgttcgtcatcaaattcaaaaggagcacaatcaagttgctgaagttttcatacacatagatccctcgtacttagtaggcccgaccatggacctaaaaaggatcctgaaggactctgatggaacaaattcagaagctatcccacggcaacaaagtgcagaagccatcgtgtctaatattatttcatctcatttttcggagaaaatggcgctcgaacatctaatgctgcattacgtgcaaggaagagtgttgctccaggtccaagtttcaatgtctccagaaattttgattcgggatgcaatggaagtcgcgaagcaagccgaagaggagatactcagggctgatgccagcataagccaaatcagcttgcagctaagattgggccaacaaatcaagcaacttcagctagcatcgcaagaacgtcgctgatctacatgcaggagatcactgatccatttgctggctgcttcatgagtctactcgggagtatttccttttgctaatttttctgacatacatgagcttggtctgctgatgaggcagtaggctataggattctaggaaccgactgtgtacattgtaatcagagtgttcggagacgtgaagctgagtttgtaataatacacaagcagccttgctcagaaatgtactgggcaacaaattgtctgccacatactgtcaatgtaaaatgtatgaacaagttcctcactggccccgctataataacaacgaaccatggctactgatgcaaaataaaatgaatattgttttttttctgtgcacatctcacatttatttcattccattaacgaaatactac

SEQ ID NO: 1691 - DNA, 1755 bp, Zea Mays
gtgcaaagtgcaatcattgaaacaggtggttccattcttgggttgcctcttcttgatccactagctggacttgttgtctctggcatgattctgaaagctggtattaagactggatatgagaggggggtaagacagccctcgggcattatattaagaagaagctctcacgcaggtcgagaaaacccccgaacccctgccccacccatacacagcggcaccgtagcccatgtgagaagcgaccgggacgggacggcgggaccaggaccaggccttagacctgtgctttggcgtgggacagccggggagatttttgtaaccacaccctgaaattcgctcccacggggagtcgaacctaggacctgaggagtgctactcagaccgcctaaccaactcggctagaggctcttccacactgcaatctgattacatctgttgcttgtattaagtgattatttttctgtacttccagaaatattattgtcgatgtgtagctttctgaagccaatggctgaaaatattcatgaaataaaagatgacatatgctcattttctgtgtgcctgcgctgctaggatcattgctttttcagtctcattcagctgatatcacttttgaacctaataagcacaaacctttcaaatattaacaaattattcttatatacaatttagtatacatgatgcttcacctttgtagtttgcatgatgttacttatggtgatgattctgcttgtttcgcttgcagtgttctggaattagttgatgctgctgtggatccttcacttttagaaccaatcaaggaaactattttgagggttcacggtgtgaagggatgtcatcgattgaggggaagaaaagctgggacatcattatatcttgatgtgcatatagaggtatatccttttctgagtgttagtgcagcacatgatatcggtgaaactgttcgtcatcaaattcaaaaggagcacaatcaagttgctgaagttttcatacacatagatccctcgtacttagtaggcccgaccatggacctaaaaaggatcctgaaggactctgatggaacaaattcagaagctatcccacggcaacaaagtgcagaagccatcgtgtctaatattatttcatctcatttttcggagaaaatggcgctcgaacatctaatgctgcattacgtgcaaggaagagtgttgctccaggtccaagtttcaatgtctccagaaattttgattcgggatgcaatggaagtcgcgaagcaagccgaagaggagatactcagggctgatgccagcataagccaaatcagcttgcagctaagattgggccaacaaatcaagcaacttcagctagcatcgcaagaacgtcgctgatctacatgcaggagatcactgatccatttgctggctgcttcatgagtctactcgggagtatttccttttgctaatttttctgacatacatgagcttggtctgctgatgaggcagtaggctataggattctaggaaccgactgtgtacattgtaatcagagtgttcggagacgtgaagctgagtttgtaataatacacaagcagccttgctcagaaatgtactgggcaacaaattgtctgccacatactgtcaatgtaaaatgtatgaacaagttcctcactggccccgctataataacaacgaaccatggctactgatgcaaaataaaatgaatattgttttttttctgtgcacatctcacatttatttcattccattaacgaaatactac

SEQ ID NO: 1692 - DNA, 913 bp, Zea Mays
cccacctccgcaaggtctctaggctgcggcggtgagttctcctgggccctggccccctcacctccgcggcggctcctcccctcggcgagctttccaggctgcaccaacgagcccctcccttccgcggcgaccccctctggccctcccctacctgatccctcgtacttagtaggcccgaccatggacctaaaaaggatcctgaaggactctgatggaacaaattcagaagctatcccacggcaacaaagtgcagaagccatcgtgtctaatattatttcatctcatttttcggagaaaatggcgctcgaacatctaatgctgcattacgtgcaaggaagagtgttgctccaggtccaagtttcaatgtctccagaaattttgattcgggatgcaatggaagtcgcgaagcaagccgaagaggagatactcagggctgatgccagcataagccaaatcagcttgcagctaagattgggccaacaaatcaagcaacttcagctagcatcgcaagaacgtcgctgatctacatgcaggagatcactgatccatttgctggctgcttcatgagtctactcgggagtatttccttttgctaatttttctgacatacatgagcttggtctgctgatgaggcagtaggctataggattctaggaaccgactgtgtacattgtaatcagagtgttcggagacgtgaagctgagtttgtaataatacacaagcagccttgctcagaaatgtactgggcaacaaattgtctgccacatactgtcaatgtaaaatgtatgaacaagttcctcactggccccgctataataacaacgaaccatggctactgatgcaaaataaaatgaatattgttttttttctgtgcacatctcacatttatttcattccattaacgaaatactac

SEQ ID NO: 1693 - DNA, 647 bp, Zea Mays
attctatagcaatctgttcggcaaagagaaaatggcgctcgaacatctaatgctgcattacgtgcaaggaagagtgttgctccaggtccaagtttcaatgtctccagaaattttgattcgggatgcaatggaagtcgcgaagcaagccgaagaggagatactcagggctgatgccagcataagccaaatcagcttgcagctaagattgggccaacaaatcaagcaacttcagctagcatcgcaagaacgtcgctgatctacatgcaggagatcactgatccatttgctggctgcttcatgagtctactcgggagtatttccttttgctaatttttctgacatacatgagcttggtctgctgatgaggcagtaggctataggattctaggaaccgactgtgtacattgtaatcagagtgttcggagacgtgaagctgagtttgtaataatacacaagcagccttgctcagaaatgtactgggcaacaaattgtctgccacatactgtcaatgtaaaatgtatgaacaagttcctcactggccccgctataataacaacgaaccatggctactgatgcaaaataaaatgaatattgttttttttctgtgcacatctcacatttatttcattccattaacgaaatactac

SEQ ID NO: 1694 - DNA, 3012 bp, Zea Mays
aaaaacagtctcttatatgtatctcaactcgcgccgcaccagaaacgaaaaacctgcgacacgaaccaaaaccctcctctccctcagtccctctcgagcctcgatccgcctccgccccacgcacccgacatcgctcgctacgcccacttcatcgccgcgggcgcaatgagcgcgggctggaggacgctgttgctgcgcatcggcgatagatgcgccgagtatgggggctccgccgaccacaaggaacacatcgaaacttgttatggtgtactatcccgagaatatgaacactccagagatgcaatatttgagtttctccttcaatgcacagaacaattgcctcacaagattcctttctttggagttttgattggtttgataaacttagaaaatgaagacttcagtaaggctattgtagataccacacaggctaacctagaggatgccttgcacaatgaaaatcgtgataggattaggatattgctgcgatttctcagtggtctgatgtgcagcaaagttgtagttccaagttcaatcatcgagacatttgagactctattatcatctgctgtaacaatattagatgatgagactggcaatccttcgtggcaacctcgtgcggacttctatgtttattgtattttggcttcacttccatgggctggtccagaattgtttgagcaagttccagatgagttcgagagagttttatttggtatacagtcttacataagtatcaggaggcattttgatgatattgctttctctgtctttgagacagatgaaggccactctcctaacaaaaaggattttatggaagatctgtgggagcgcattcaagctctttcccgtaatggatggaaagttaaaagcgttccaaaaccccacttgccatttgaagctcagctggtggccgggaaatcacatcgcctttcccctataagttgccctccacccactccctcgcagtcatcttctgaaatgttaaaaggtcaggagaaacatgaagccgatatgaagtatcctcagagacttcgtagactacatatcttcccaatgaataaagctgagaacatgcagcctgtagatcgttttgttgtggaagaatgcattttggatgtgctacttttcttcaatggatgttagtcggaaagaatgtgcattttatctggtcagcttgcctgtgtcttatcgctatgaatacctgatggcggaaaccatattttcacagctactattgttgccgaatccaccattcaagccaatttactatacactggttatcattgatctttgcaaggcattaccaggtgcattcccttcagttgtggtaggagcagtgcatgctctttttgacagaattagtaacatggatatggagtgccgcaccagacttatactatggttttcacaccacttgtcaaactttcaattcatttggccttggcaggagtggtcttatgtcaaggacctcccaaaatgggctccacaacgggtttttgtccaggaagtactggaaagggaagttcgcttgtcgtactttgaaaaaatcaagcagagtatcgaggatgctgctgagttagaagaactgctacccccaaaagctgggcctaatttcaaattccatagcgatgaaagcaacgaaagcactgatggcctgaagttatccaaggaacttattggcttgattagaggaaagaagtctacatatgatattattttatgggttgaggaacaaataattccaaaaaatggtactgaatttgcacttgatgttgttagccagacgcttcttgacatgggttcaaaaagtttcacccatcttgtcactattttggagagatataataagataatctctaagctatgtccaaatgaggaaatgcagctactgttaatgaatggagtcagtgcttattggaagaacagtacccagatgactgctatagctattgacagaatgatgggttatcgcctgatatccaatttggctatagtcaaatgggttttttctcctgccaatgttgagcaatttcatgtttctgatcgaccatgggagattcttagaaatgctgttagtaaaacatacaatcggatcagtgacctccgcaaagaaattcaatcactcaagaagggtcttcaagttgctaaagaggctagtgcaaaaaacagaaaggagctggaggaggccaaatcagtgcttgagattgtagaggggcaacctgcaccagctgaaagaccaggtaggataaggcgactagaatcacatgtcaaaaatgcagaggatgaggaaagaactcttgaagaatctttagaagcgaagggagttctccttgctcgggctcatgaggaaagcaaggacttgcttaagctactctttaagagctttgttgacgtgctcactgaacgtttgccgcctgtctctgttgatggggaaattcctaatctgcgcagtggagatcaaaatgtaaattttgcagctcaaaattctgaagcagcaacaatggagattgacaatgaaaatggagcagataataatagtgaaccgaatgagcgaaacacaaaaaatgcatataatgttggagagcttgagcagtggtgtctctgtacactgggttatctcaagtcattttcccgccaatatgcaagtgagatttggtcaaacatagcaatgttggatgaggtcttcgttggggatgttcacccacttatccgaaaagctgctttctctggtttgcgcagatttaccaatgaagggtctcatccttgaatttgacaccatacccatattctttatagaactgagtgtattgtacctgtatgatagaggacaacttttctccttgtttaactaatcaaataggcataaacatttttccttggtttcgtatgcctttttttctgttcccttgcttctcggccactaaatgaaaatttttaccaggtaactaagttaatgttcttttctgaagtaacatcagaatatgcatggttcagtgttaatttaaccta

SEQ ID NO: 1695 - DNA, 2895 bp, Zea Mays
tcgcgccgcaccagaaacgaaaaacctgcgacacgaaccaaaaccctcctctccctcagtccctctcgagcctcgatccgcctccgccccacgcacccgacatcgctcgctacgcccacttcatcgccgcgggcgcaatgagcgcgggctggaggacgctgttgctgcgcatcggcgatagatgcgccgagtatgggggctccgccgaccacaaggaacacatcgaaacttgttatggtgtactatcccgagaatatgaacactccagagatgcaatatttgagtttctccttcaatgcacagaacaattgcctcacaagattcctttctttggagttttgattggtttgataaacttagaaaatgaagacttcagtaaggctattgtagataccacacaggctaacctagaggatgccttgcacaatgaaaatcgtgataggattaggatattgctgcgatttctcagtggtctgatgtgcagcaaagttgtagttccaagttcaatcatcgagacatttgagactctattatcatctgctgtaacaatattagatgatgagactggcaatccttcgtggcaacctcgtgcggacttctatgtttattgtattttggcttcacttccatgggctggtccagaattgtttgagcaagttccagatgagttcgagagagttttatttggtatacagtcttacataagtatcaggaggcattttgatgatattgctttctctgtctttgagacagatgaaggccactctcctaacaaaaaggattttatggaagatctgtgggagcgcattcaagctctttcccgtaatggatggaaagttaaaagcgttccaaaaccccacttgccatttgaagctcagctggtggccgggaaatcacatcgcctttcccctataagttgccctccacccactccctcgcagtcatcttctgaaatgttaaaaggtcaggagaaacatgaagccgatatgaagtatcctcagagacttcgtagactacatatcttcccaatgaataaagctgagaacatgcagcctgtagatcgttttgttgtggaagaatgcattttggatgtgctacttttcttcaatggatgctactattgttgccgaatccaccattcaagccaatttactatacactggttatcattgatctttgcaaggcattaccaggtgcattcccttcagttgtggtaggagcagtgcatgctctttttgacagaattagtaacatggatatggagtgccgcaccagacttatactatggttttcacaccacttgtcaaactttcaattcatttggccttggcaggagtggtcttatgtcaaggacctcccaaaatgggctccacaacgggtttttgtccaggaagtactggaaagggaagttcgcttgtcgtactttgaaaaaatcaagcagagtatcgaggatgctgctgagttagaagaactgctacccccaaaagctgggcctaatttcaaattccatagcgatgaaagcaacgaaagcactgatggcctgaagttatccaaggaacttattggcttgattagaggaaagaagtctacatatgatattattttatgggttgaggaacaaataattccaaaaaatggtactgaatttgcacttgatgttgttagccagacgcttcttgacatgggttcaaaaagtttcacccatcttgtcactattttggagagatataataagataatctctaagctatgtccaaatgaggaaatgcagctactgttaatgaatggagtcagtgcttattggaagaacagtacccagatgactgctatagctattgacagaatgatgggttatcgcctgatatccaatttggctatagtcaaatgggttttttctcctgccaatgttgagcaatttcatgtttctgatcgaccatgggagattcttagaaatgctgttagtaaaacatacaatcggatcagtgacctccgcaaagaaattcaatcactcaagaagggtcttcaagttgctaaagaggctagtgcaaaaaacagaaaggagctggaggaggccaaatcagtgcttgagattgtagaggggcaacctgcaccagctgaaagaccaggtaggataaggcgactagaatcacatgtcaaaaatgcagaggatgaggaaagaactcttgaagaatctttagaagcgaagggagttctccttgctcgggctcatgaggaaagcaaggacttgcttaagctactctttaagagctttgttgacgtgctcactgaacgtttgccgcctgtctctgttgatggggaaattcctaatctgcgcagtggagatcaaaatgtaaattttgcagctcaaaattctgaagcagcaacaatggagattgacaatgaaaatggagcagataataatagtgaaccgaatgagcgaaacacaaaaaatgcatataatgttggagagcttgagcagtggtgtctctgtacactgggttatctcaagtcattttcccgccaatatgcaagtgagatttggtcaaacatagcaatgttggatgaggtcttcgttggggatgttcacccacttatccgaaaagctgctttctctggtttgcgcagatttaccaatgaagggtctcatccttgaatttgacaccatacccatattctttatagaactgagtgtattgtacctgtatgatagaggacaacttttctccttgtttaactaatcaaataggcataaacatttttccttggtttcgtatgcctttttttctgttcccttgcttctcggccactaaatgaaaatttttaccaggtaactaagttaatgttcttttctgaagtaacatcagaatatgcatggttcagtgttaatttaaccta

SEQ ID NO: 1696 - DNA, 2008 bp, Zea Mays
cttcttcagaaatgctctcatccagatctgataaatctactacccgctgatgcaaagcttcgagatttaagaacatgcagcctgtagatcgttttgttgtggaagaatgcattttggatgtgctacttttcttcaatggatgtcggaaagaatgtgcattttatctggtcagcttgcctgtgtcttatcgctatgaatacctgatggcggaaaccatattttcacagctactattgttgccgaatccaccattcaagccaatttactatacactggttatcattgatctttgcaaggcattaccaggtgcattcccttcagttgtggtaggagcagtgcatgctctttttgacagaattagtaacatggatatggagtgccgcaccagacttatactatggttttcacaccacttgtcaaactttcaattcatttggccttggcaggagtggtcttatgtcaaggacctcccaaaatgggctccacaacgggtttttgtccaggaagtactggaaagggaagttcgcttgtcgtactttgaaaaaatcaagcagagtatcgaggatgctgctgagttagaagaactgctacccccaaaagctgggcctaatttcaaattccatagcgatgaaagcaacgaaagcactgatggcctgaagttatccaaggaacttattggcttgattagaggaaagaagtctacatatgatattattttatgggttgaggaacaaataattccaaaaaatggtactgaatttgcacttgatgttgttagccagacgcttcttgacatgggttcaaaaagtttcacccatcttgtcactattttggagagatataataagataatctctaagctatgtccaaatgaggaaatgcagctactgttaatgaatggagtcagtgcttattggaagaacagtacccagatgactgctatagctattgacagaatgatgggttatcgcctgatatccaatttggctatagtcaaatgggttttttctcctgccaatgttgagcaatttcatgtttctgatcgaccatgggagattcttagaaatgctgttagtaaaacatacaatcggatcagtgacctccgcaaagaaattcaatcactcaagaagggtcttcaagttgctaaagaggctagtgcaaaaaacagaaaggagctggaggaggccaaatcagtgcttgagattgtagaggggcaacctgcaccagctgaaagaccaggtaggataaggcgactagaatcacatgtcaaaaatgcagaggatgaggaaagaactcttgaagaatctttagaagcgaagggagttctccttgctcgggctcatgaggaaagcaaggacttgcttaagctactctttaagagctttgttgacgtgctcactgaacgtttgccgcctgtctctgttgatggggaaattcctaatctgcgcagtggagatcaaaatgtaaattttgcagctcaaaattctgaagcagcaacaatggagattgacaatgaaaatggagcagataataatagtgaaccgaatgagcgaaacacaaaaaatgcatataatgttggagagcttgagcagtggtgtctctgtacactgggttatctcaagtcattttcccgccaatatgcaagtgagatttggtcaaacatagcaatgttggatgaggtcttcgttggggatgttcacccacttatccgaaaagctgctttctctggtttgcgcagatttaccaatgaagggtctcatccttgaatttgacaccatacccatattctttatagaactgagtgtattgtacctgtatgatagaggacaacttttctccttgtttaactaatcaaataggcataaacatttttccttggtttcgtatgcctttttttctgttcccttgcttctcggccactaaatgaaaatttttaccaggtaactaagttaatgttcttttctgaagtaacatcagaatatgcatggttcagtgttaatttaaccta

SEQ ID NO: 1697 - DNA, 1625 bp, Zea Mays
cgagcccaacaaagcaactcaggcatccacctacgcgcctgctctaccctagtgggcattcctgccggctgccgactgccgtcccggcatcctgttgttgcccatctcatcgcccgcggccggccgcccagtgccgcacaaccaccatatctccctcacagtcacagcctcactccatgacgctcgttgcctgccagccagcctaatctataagctcatcgccgtcgaggcagtgcccagctgctctcttctatttctacaagcggtcaggtagtattattagtatgttgtatggctaatggctaatggctaatggccgatggcctgcgagacaacaccaactgcgccgagctgccgcagacaacaccaactgcacactgctgcataggaggtcaggagaaggcgctccagcgcagcacggcagcagggatttctggacggatctgattgaataaaccgtgaaggagatgccctggaatagattcatgcccttcctttcaaaatgttgtacttctaccgttcagacatcttcatcatattcatctttttcctcgtccttctccccgatacaaccatggttatttgtgggtcttggcaaccctggtgagaagtatcaatccaccaggcacaacgtgggttttgatatgatagatgcatttgcgcaatcccagggtatacccctgactacacattacttcaaagcactctttggtgaagggatggttgatggagtccctgttcttcttgccaagccccagacttatatgaatctcagtggagaatctgtcggcccacttgctgcctattataaactgccacttaatcgtgtcctagtggcgtttgatgacatggacttgccatgtggagttctccgtctacagccaaaaggaggttctggacgacacaatgggttgaagagtgttatataccactttcgtaagaatcgagaattttgccgattaaggattggaattggacggccagctggccagatggatcctaaagcctttgttcttcagaagttcaataggactggtcgtgaacggccgtgagagagggtgtcgatattctgaagatggtggctgcgaggggtttgacagaggcggcaaaactgacaaatgcggaccagaagtataagcatctgagatcacatggtatccagactaacgatgactagacaaagcttactaggggggctactcttttcagcacatctctcgatattcagactaaagacgaaactcgttttatggcctgttgagaaacaggcgttcgatgagcccctttagaccgtcgctgaacgtgaacgcgtccttgttgtcaccgtacatcaacggcatgctggcggttatgtcggcaactcgctgcactgctggaagtagtttgctgttctcaaagcgtgctccgtttatagttttccatgcatcttcaatcagggagcttatctgtgcaaaggcaacctcagctgtgacgccatgctcactgatgtagcattcgaccgagctgtccacgtcgtttttgttctttccacgctgcgaaagaacacatccatttatttatttatttattactgggcaacaatccaaaggacaagaatacttaatggtcttattaaagaattaatc

SEQ ID NO: 1698 - DNA, 1621 bp, Zea Mays
agcaactcaggcatccacctacgcgcctgctctaccctagtgggcattcctgccggctgccgactgccgtcccggcatcctgttgttgcccatctcatcgcccgcggccggccgcccagtgccgcacaaccaccatatctccctcacagtcacagcctcactccatgacgctcgttgcctgccagccagcctaatctataagctcatcgccgtcgaggcagtgcccagctgctctcttctatttctacaagcggtcaggtagtattattagtatgttgtatggctaatggctaatggctaatggccgatggcctgcgagacaacaccaactgcgccgagctgccgcagacaacaccaactgcacactgctgcataggaggtcaggagaaggcgctccagcgcagcacggcagcagggatttctggacggatctgattgaataaaccgtgaaggagatgccctggaatagattcatgcccttcctttcaaaatgttgtacttctaccgttcagacatcttcatcatattcatctttttcctcgtccttctccccgatacaaccatggttatttgtgggtcttggcaaccctggtgagaagtatcaatccaccaggcacaacgtgggttttgatatgatagatgcatttgcgcaatcccagggtatacccctgactacacattacttcaaagcactctttggtgaagggatggttgatggagtccctgttcttcttgccaagccccagacttatatgaatctcagtggagaatctgtcggcccacttgctgcctattataaactgccacttaatcgtgtcctagtggcgtttgatgacatggacttgccatgtggagttctccgtctacagccaaaaggaggttctggacgacacaatggtctatcaggttgaagagtgttatataccactttcgtaagaatcgagaattttgccgattaaggattggaattggacggccagctggccagatggatcctaaagcctttgttcttcagaagttcaataggactggtcgtgaacggccgtgagagagggtgtcgatattctgaagatggtggctgcgaggggtttgacagaggcggcaaaactgacaaatgcggaccagaagtataagcatctgagatcacatggtatccagactaacgatgactagacaaagcttactaggggggctactcttttcagcacatctctcgatattcagactaaagacgaaactcgttttatggcctgttgagaaacaggcgttcgatgagcccctttagaccgtcgctgaacgtgaacgcgtccttgttgtcaccgtacatcaacggcatgctggcggttatgtcggcaactcgctgcactgctggaagtagtttgctgttctcaaagcgtgctccgtttatagttttccatgcatcttcaatcagggagcttatctgtgcaaaggcaacctcagctgtgacgccatgctcactgatgtagcattcgaccgagctgtccacgtcgtttttgttctttccacgctgcgaaagaacacatccatttatttatttatttattactgggcaacaatccaaaggacaagaatacttaatggtcttattaaagaattaatc

SEQ ID NO: 1699 - DNA, 990 bp, Zea Mays
caggcatccacctacgcgcctgctctaccctagtgggcattcctgccggctgccgactgccgtcccggcatcctgttgttgcccatctcatcgcccgcggccggccgcccagtgccgcacaaccaccatatctccctcacagtcacagcctcactccatgacgctcgttgcctgccagccagcctaatctataagctcatcgccgtcgaggcagtgcccagctgctctcttctatttctacaagcggtcaggtagtattattagtatgttgtatggctaatggctaatggctaatggccgatggcctgcgagacaacaccaactgcgccgagctgccgcagacaacaccaactgcacactgctgcataggaggtcaggagaaggcgctccagcgcagcacggcagcagggatttctggacggatctgattgaataaaccgtgaaggagatgccctggaatagattcatgcccttcctttcaaaatgttgtacttctaccgttcagacatcttcatcatattcatctttttcctcgtccttctccccgatacaaccatggttatttgtgggtcttggcaaccctggtgagaagtatcaatccaccaggcacaacgtgggttttgatatgatagatgcatttgcgcaatcccagggtatacccctgactacacattacttcaaagcactctttggtgaagggatggttgatggagtccctgttcttcttgccaagccccagacttatatgaatctcagtggagaatctgtcggcccacttgctgcctattataaactgccacttaatcgtgtcctagtggtgatgaacccctgccaaaacccagcagctgaactcttgaagaaagctttgctgcaccttcccaagggccagttgatccctatcaaacacacatctgttgcgctgaatgcaccaagcacctaggatgctgctgctgctgtttatgcctttttatttatccttctgaacaagct

SEQ ID NO: 1700 - DNA, 990 bp, Zea Mays
caggcatccacctacgcgcctgctctaccctagtgggcattcctgccggctgccgactgccgtcccggcatcctgttgttgcccatctcatcgcccgcggccggccgcccagtgccgcacaaccaccatatctccctcacagtcacagcctcactccatgacgctcgttgcctgccagccagcctaatctataagctcatcgccgtcgaggcagtgcccagctgctctcttctatttctacaagcggtcaggtagtattattagtatgttgtatggctaatggctaatggctaatggccgatggcctgcgagacaacaccaactgcgccgagctgccgcagacaacaccaactgcacactgctgcataggaggtcaggagaaggcgctccagcgcagcacggcagcagggatttctggacggatctgattgaataaaccgtgaaggagatgccctggaatagattcatgcccttcctttcaaaatgttgtacttctaccgttcagacatcttcatcatattcatctttttcctcgtccttctccccgatacaaccatggttatttgtgggtcttggcaaccctggtgagaagtatcaatccaccaggcacaacgtgggttttgatatgatagatgcatttgcgcaatcccagggtatacccctgactacacattacttcaaagcactctttggtgaagggatggttgatggagtccctgttcttcttgccaagccccagacttatatgaatctcagtggagaatctgtcggcccacttgctgcctattataaactgccacttaatcgtgtcctagtgggatgtcaagatcgaaccacggcctggtagggtcgattttgctcaaccacagccaccttagttgtaaggctcatcccttaaactgtaggttcggtataccaagaccttccagtttcagaggccttgtcaccttatctcaggaagctaagcagtttcccccattaacctctttt

SEQ ID NO: 1701 - DNA, 1609 bp, Zea Mays
caggcatccacctacgcgcctgctctaccctagtgggcattcctgccggctgccgactgccgtcccggcatcctgttgttgcccatctcatcgcccgcggccggccgcccagtgccgcacaaccaccatatctccctcacagtcacagcctcactccatgacgctcgttgcctgccagccagcctaatctataagctcatcgccgtcgaggcagtgcccagctgctctcttctatttctacaagcggtcaggtagtattattagtatgttgtatggctaatggctaatggctaatggccgatggcctgcgagacaacaccaactgcgccgagctgccgcagacaacaccaactgcacactgctgcataggaggtcaggagaaggcgctccagcgcagcacggcagcagggatttctggacggatctgattgaataaaccgtgaaggagatgccctggaatagattcatgcccttcctttcaaaatgttgtacttctaccgttcagacatcttcatcatattcatctttttcctcgtccttctccccgatacaaccatggttatttgtgggtcttggcaaccctggtgagaagtatcaatccaccaggcacaacgtgggttttgatatgatagatgcatttgcgcaatcccagggtatacccctgactacacattacttcaaagcactctttggtgaagggatggttgatggagtccctgttcttcttgccaagccccagacttatatgaatctcagtggagaatctgtcggcccacttgctgcctattataaactgccacttaatcgtgtcctagtggcgtttgatgacatggacttgccatgtggagttctccgtctacagccaaaaggaggttctggacgacacaatggtctatcaggttgaagagtgttatataccactttcgtaagaatcgagaattttgccgattaaggattgctggccagatggatcctaaagcctttgttcttcagaagttcaataggactggtcgtgaacggatcgattcagccgtgagagagggtgtcgatattctgaagatggtggctgcgaggggtttgacagaggcggcaaaactgacaaatgcggaccagaagtataagcatctgagatcacatggtatccagactaacgatgactagacaaagcttactaggggggctactcttttcagcacatctctcgatattcagactaaagacgaaactcgttttatggcctgttgagaaacaggcgttcgatgagcccctttagaccgtcgctgaacgtgaacgcgtccttgttgtcaccgtacatcaacggcatgctggcggttatgtcggcaactcgctgcactgctggaagtagtttgctgttctcaaagcgtgctccgtttatagttttccatgcatcttcaatcagggagcttatctgtgcaaaggcaacctcagctgtgacgccatgctcactgatgtagcattcgaccgagctgtccacgtcgtttttgttctttccacgctgcgaaagaacacatccatttatttatttatttattactgggcaacaatccaaaggacaagaatacttaatggtcttattaaagaattaatc

SEQ ID NO: 1702 - DNA, 1601 bp, Zea Mays
caggcatccacctacgcgcctgctctaccctagtgggcattcctgccggctgccgactgccgtcccggcatcctgttgttgcccatctcatcgcccgcggccggccgcccagtgccgcacaaccaccatatctccctcacagtcacagcctcactccatgacgctcgttgcctgccagccagcctaatctataagctcatcgccgtcgaggcagtgcccagctgctctcttctatttctacaagcggtcaggtagtattattagtatgttgtatggctaatggctaatggctaatggccgatggcctgcgagacaacaccaactgcgccgagctgccgcagacaacaccaactgcacactgctgcataggaggtcaggagaaggcgctccagcgcagcacggcagcagggatttctggacggatctgattgaataaaccgtgaaggagatgccctggaatagattcatgcccttcctttcaaaatgttgtacttctaccgttcagacatcttcatcatattcatctttttcctcgtccttctccccgatacaaccatggttatttgtgggtcttggcaaccctggtgagaagtatcaatccaccaggcacaacgtgggttttgatatgatagatgcatttgcgcaatcccagggtatacccctgactacacattacttcaaagcactctttggtgaagggatggttgatggagtccctgttcttcttgccaagccccagacttatatgaatctcagtggagaatctgtcggcccacttgctgcctattataaactgccacttaatcgtgtcctagtggcgtttgatgacatggacttgccatgtggagttctccgtctacagccaaaaggaggttctggacgacacaatgggttgaagagtgttatataccactttcgtaagaatcgagaattttgccgattaaggattgctggccagatggatcctaaagcctttgttcttcagaagttcaataggactggtcgtgaacggatcgattcagccgtgagagagggtgtcgatattctgaagatggtggctgcgaggggtttgacagaggcggcaaaactgacaaatgcggaccagaagtataagcatctgagatcacatggtatccagactaacgatgactagacaaagcttactaggggggctactcttttcagcacatctctcgatattcagactaaagacgaaactcgttttatggcctgttgagaaacaggcgttcgatgagcccctttagaccgtcgctgaacgtgaacgcgtccttgttgtcaccgtacatcaacggcatgctggcggttatgtcggcaactcgctgcactgctggaagtagtttgctgttctcaaagcgtgctccgtttatagttttccatgcatcttcaatcagggagcttatctgtgcaaaggcaacctcagctgtgacgccatgctcactgatgtagcattcgaccgagctgtccacgtcgtttttgttctttccacgctgcgaaagaacacatccatttatttatttatttattactgggcaacaatccaaaggacaagaatacttaatggtcttattaaagaattaatc

SEQ ID NO: 1703 - DNA, 1557 bp, Zea Mays
caggcatccacctacgcgcctgctctaccctagtgggcattcctgccggctgccgactgccgtcccggcatcctgttgttgcccatctcatcgcccgcggccggccgcccagtgccgcacaaccaccatatctccctcacagtcacagcctcactccatgacgctcgttgcctgccagccagcctaatctataagctcatcgccgtcgaggcagtgcccagctgctctcttctatttctacaagcggtcaggtagtattattagtatgttgtatggctaatggctaatggctaatggccgatggcctgcgagacaacaccaactgcgccgagctgccgcagacaacaccaactgcacactgctgcataggaggtcaggagaaggcgctccagcgcagcacggcagcagggatttctggacggatctgattgaataaaccgtgaaggagatgccctggaatagattcatgcccttcctttcaaaatgttgtacttctaccgttcagacatcttcatcatattcatctttttcctcgtccttctccccgatacaaccatggttatttgtgggtcttggcaaccctggtgagaagtatcaatccaccaggcacaacgtgggttttgatatgatagatgcatttgcgcaatcccagggtatacccctgactacacattacttcaaagcactctttggtgaagggatggttgatggagtccctgttcttcttgccaagccccagacttatatgaatctcagtggagaatctgtcggcccacttgctgcctattataaactgccacttaatcgtgtcctagtggcgtttgatgacatggacttgccatgtggagttctccgtctacagccaaaaggaggttctggacgacacaatgggaattggacggccagctggccagatggatcctaaagcctttgttcttcagaagttcaataggactggtcgtgaacggatcgattcagccgtgagagagggtgtcgatattctgaagatggtggctgcgaggggtttgacagaggcggcaaaactgacaaatgcggaccagaagtataagcatctgagatcacatggtatccagactaacgatgactagacaaagcttactaggggggctactcttttcagcacatctctcgatattcagactaaagacgaaactcgttttatggcctgttgagaaacaggcgttcgatgagcccctttagaccgtcgctgaacgtgaacgcgtccttgttgtcaccgtacatcaacggcatgctggcggttatgtcggcaactcgctgcactgctggaagtagtttgctgttctcaaagcgtgctccgtttatagttttccatgcatcttcaatcagggagcttatctgtgcaaaggcaacctcagctgtgacgccatgctcactgatgtagcattcgaccgagctgtccacgtcgtttttgttctttccacgctgcgaaagaacacatccatttatttatttatttattactgggcaacaatccaaaggacaagaatacttaatggtcttattaaagaattaatc

SEQ ID NO: 1704 - DNA, 1053 bp, Zea Mays
caggcatccacctacgcgcctgctctaccctagtgggcattcctgccggctgccgactgccgtcccggcatcctgttgttgcccatctcatcgcccgcggccggccgcccagtgccgcacaaccaccatatctccctcacagtcacagcctcactccatgacgctcgttgcctgccagccagcctaatctataagctcatcgccgtcgaggcagtgcccagctgctctcttctatttctacaagcggtcaggtagtattattagtatgttgtatggctaatggctaatggctaatggccgatggcctgcgagacaacaccaactgcgccgagctgccgcagacaacaccaactgcacactgctgcataggaggtcaggagaaggcgctccagcgcagcacggcagcagggatttctggacggatctgattgaataaaccgtgaaggagatgccctggaatagattcatgcccttcctttcaaaatgttgtacttctaccgttcagacatcttcatcatattcatctttttcctcgtccttctccccgatacaaccatggttatttgtgggtcttggcaaccctggtgagaagtatcaatccaccaggcacaacgtgggttttgatatgatagatgcatttgcgcaatcccagggtatacccctgactacacattacttcaaagcactctttggtgaagggatggttgatggagtccctgttcttcttgccaagccccagacttatatgaatctcagtggagaatctgtcggcccacttgctgcctattataaactgccacttaatcgtgtcctagtggcgtttgatgacatggacttgccatgtggagttctccgtctacagccaaaaggaggttctggacgacacaatgggttgaagagtgttatataccactttcgtaagaatcgagaattttgccgattaaggattgctggccagatggatcctaaagcctttgttcttcagaagttcaataggactggtcgtgaacggagagggtggtgtgcttgtaccgcttttctgctaaaagcgac

SEQ ID NO: 1705 - DNA, 1512 bp, Zea Mays
cgactgccgtcccggcatcctgttgttgcccatctcatcgcccgcggccggccgcccagtgccgcacaaccaccatatctccctcacagtcacagcctcactccatgacgctcgttgcctgccagccagcctaatctataagctcatcgccgtcgaggcagtgcccagctgctctcttctatttctacaagcggtcaggtagtattattagtatgttgtatggctaatggctaatggctaatggccgatggcctgcgagacaacaccaactgcgccgagctgccgcagacaacaccaactgcacactgctgcataggaggtcaggagaaggcgctccagcgcagcacggcagcagggatttctggacggatctgattgaataaaccgtgaaggagatgccctggaatagattcatgcccttcctttcaaaatgttgtacttctaccgttcagacatcttcatcatattcatctttttcctcgtccttctccccgatacaaccatggttatttgtgggtcttggcaaccctggtgagaagtatcaatccaccaggcacaacgtgggttttgatatgatagatgcatttgcgcaatcccagggtatacccctgactacacattacttcaaagcactctttggtgaagggatggttgatggagtccctgttcttcttgccaagccccagacttatatgaatctcagtggagaatctgcgtttgatgacatggacttgccatgtggagttctccgtctacagccaaaaggaggttctggacgacacaatgggttgaagagtgttatataccactttcgtaagaatcgagaattttgccgattaaggattggaattggacggccagctggccagatggatcctaaagcctttgttcttcagaagttcaataggactggtcgtgaacggatcgattcagccgtgagagagggtgtcgatattctgaagatggtggctgcgaggggtttgacagaggcggcaaaactgacaaatgcggaccagaagtataagcatctgagatcacatggtatccagactaacgatgactagacaaagcttactaggggggctactcttttcagcacatctctcgatattcagactaaagacgaaactcgttttatggcctgttgagaaacaggcgttcgatgagcccctttagaccgtcgctgaacgtgaacgcgtccttgttgtcaccgtacatcaacggcatgctggcggttatgtcggcaactcgctgcactgctggaagtagtttgctgttctcaaagcgtgctccgtttatagttttccatgcatcttcaatcagggagcttatctgtgcaaaggcaacctcagctgtgacgccatgctcactgatgtagcattcgaccgagctgtccacgtcgtttttgttctttccacgctgcgaaagaacacatccatttatttatttatttattactgggcaacaatccaaaggacaagaatacttaatggtcttattaaagaattaatc

SEQ ID NO: 1706 - DNA, 1510 bp, Zea Mays
cgactgccgtcccggcatcctgttgttgcccatctcatcgcccgcggccggccgcccagtgccgcacaaccaccatatctccctcacagtcacagcctcactccatgacgctcgttgcctgccagccagcctaatctataagctcatcgccgtcgaggcagtgcccagctgctctcttctatttctacaagcggtcaggtagtattattagtatgttgtatggctaatggctaatggctaatggccgatggcctgcgagacaacaccaactgcgccgagctgccgcagacaacaccaactgcacactgctgcataggaggtcaggagaaggcgctccagcgcagcacggcagcagggatttctggacggatctgattgaataaaccgtgaaggagatgccctggaatagattcatgcccttcctttcaaaatgttgtacttctaccgttcagacatcttcatcatattcatctttttcctcgtccttctccccgatacaaccatggttatttgtgggtcttggcaaccctggtgagaagtatcaatccaccaggcacaacgtgggttttgatatgatagatgcatttgcgcaatcccagggtatacccctgactacacattacttcaaagcactctttggtgaagggatggttgatggagtccctgttcttcttgccaagccccagacttatatgaatctcagtggagaatctgcgtttgatgacatggacttgccatgtggagttctccgtctacagccaaaaggaggttctggacgacacaatggtctatcaggttgaagagtgttatataccactttcgtaagaatcgagaattttgccgattaaggattggaattggacggccagctggccagatggatcctaaagcctttgttcttcagaagttcaataggactggtcgtgaacggccgtgagagagggtgtcgatattctgaagatggtggctgcgaggggtttgacagaggcggcaaaactgacaaatgcggaccagaagtataagcatctgagatcacatggtatccagactaacgatgactagacaaagcttactaggggggctactcttttcagcacatctctcgatattcagactaaagacgaaactcgttttatggcctgttgagaaacaggcgttcgatgagcccctttagaccgtcgctgaacgtgaacgcgtccttgttgtcaccgtacatcaacggcatgctggcggttatgtcggcaactcgctgcactgctggaagtagtttgctgttctcaaagcgtgctccgtttatagttttccatgcatcttcaatcagggagcttatctgtgcaaaggcaacctcagctgtgacgccatgctcactgatgtagcattcgaccgagctgtccacgtcgtttttgttctttccacgctgcgaaagaacacatccatttatttatttatttattactgggcaacaatccaaaggacaagaatacttaatggtcttattaaagaattaatc

SEQ ID NO: 1707 - DNA, 435 bp, Zea Mays
aaacatacggagttcgcgattcctcaagtaatgctgatgttccgtaacaaacagtgatgctctcgtacaatacaagtcttcaaagacatttccaacagtaacttacatacaggctacaaatgtttatctggctccgtgcactcctgcaatcaggcggagatgccaagttgccaacagctggcaaaggtccttgtcgacgcatgtgcactggaccaatatgccccttaagatcttaaggcttcattcggttattccccattctatgaggttagaggggattaggaaagattttgacttgctagagattccgcctcaagccccttcaaccccccttgattgatcggcaaccgaataaggcctaaggattctgtaacaacgggtgagccgtttttcccacgacaaagacagaaaaatatcagtggaaatttctttttt

SEQ ID NO: 1708 - DNA, 636 bp, Zea Mays
ctccgcagaagaagccctagcttccgccgccgccgccgtttcttaccttggtctgctgggtgctgctgcggcttctttcaacctccagagacttccgacctccatctctcaactaggatcgctcggggcactgtttcgttcctttctttgtttccccgtcgatccgttttcattgaggatcatgtatactctttgctgatcagattttaggggtgttatgaagacttgtgtcttagggtgttatgatgattacatttacttgaggcagttcttccctcaagcactaaccacatagatgtttggagaccttcgctgctccttaagtcctaaaagggccatgcctcatgaaaccgattgggctttgaactctttggggttcgaagcccatgagaataagggacatggtctctttttgttggatgtaccttggccgttataacgggtttttaataatcgaatgctttgtttcatagtctatatctatgagaatggttgttgtgaaaatcccttgaatcaacgtaaaagcataatatatcaagtcatagtgataagaggaatccatcgccgtctaaaccctaaatttgcagaccccttcatctttctttgtatgcaagtcctgtgattactagattctct

SEQ ID NO: 1709 - DNA, 1216 bp, Zea Mays
gttcaattgacctgaatcgattcctggcgagctggttcgaggctgtcattcactttgctgggctcaaggctgttggggagagcgtgcacaagcccctactttactacgacaacaacctggtcggcaccatcaccctcctggaggtgatggctgcgaacggctgcaagaagctggtgttctcgtcatctgcaactgtctatgggtggcccaaggaagtaccctgcaccgaagaattcccgctctgcgccaccaatccctatgggcggacaaagcttgtgattgaagacatctgccgcgacgtccaccgctccgaccccgactggaagatcatactgctcaggtacttcaaccccgttggcgctcatccaagcgggtacatcggcgaagacccctgcggtgtcccgaacaacctgatgccctacgtgcagcaagtcgctgttgggaggttacctcacctcacggtctacgggacggactacagcaccaaggatgggactggggtgcgtgattacatccacgttgtcgacctggctgacggccacatagcagccctgaggaagctctacgaagactccgacaaaataggctgtgaagtgtacaacttggggactggaaaggggacgtcggtgttggaaatggtggctgcattcgagaaggcttctgggaagaaaatccctctggtgttcgctgggcgaagacccggagacgcagagatcgtctacgccgcaactgccaaggcagagaaggagctcaaatggaaggccaagtacgggatcgaggagatgtgcagagatctgtggaactgggcgagcaagaacccgtacgggtacgctgggtcacgcgacaacagcaaatgaaccacccatccatgcatcccatcctgcagtaggagcaagcagcagccttatagcctatgctaccataattagtaactcatcaatcatgcatacataatcagccagtcatctgattaggggtactgcgatgggcctcgcttcttcagtgtatagagggaggaggaggggggtcatcttgatattcttttttttatcattcccgaatgattattattagtagccagttcgatattactccatggttggttgctagagaaggaataagctccattcatatacctaactaaagatatatatatacatgcattcactgtgactgtctctgtctgctactaatatgatactgtacttgactgttg

SEQ ID NO: 1710 - DNA, 2895 bp, Zea Mays
ccggcgataaacttgagcagcacatgagcttgtgtgtttttttgcggcgcgctggctccctgcgacgtggcgctggcaccggcctactgtccataaatacgcgcgccccgacgaattgggagggaaaatacactacgaccaccaccaagcgaacgaaccaacgatcgacgctccccgaccagcgtggtgaacaggacagcagtcagcagccaatggaggcagcactgacgcagcaggcggcagcgacggcgacggcgacaccgacgaggtggcggtgcgtgggggacgcgtcgctggctagccatggccagggccagcagcgagcaggcgccgtccggctcggagcggcgcggcgtgcggtcagcggggctgtccgggctagcagcagcaggcatctgggccccgtgcgggcgctcgtctccgaggccgccggcggcgagcgggcggcggagggcgagggaatggacaccgcggtgaggctgttcgtgggcctccccgcggacgcggtggtctccgacggccgcggcgtgggccgccccagggccgtctcggcggcgctgcgcgcgctcaagctgctcggcgtcgacggcgtggagctgccggtgtcctgggccgtcgcgcagcccgggcccgggggctggttcgagtgggccgggtaccgcgccgtcgccgccatggtccgcgacgcggggctcgacctccgcgtctcgctccgcaccgacggcgacgcgctccccggatgggtggccgacgcggcggccgccgaccccgacgtcctcttcaccgaccgctccggccaccgccgcatgggctgcctctcctttgccgtcgacgagctccccgtgctcgtcggcaagtcgccgctccaggcctacgaggccttcttccgcagctttgctgaagagttcgatgacttgttcgggtcaacgatcacggatgtgactatcagcctgggtcctaacggcgagctacagtacccgtcatacccgccggggaaccagggttcccgtggcttcgacggcgtcggcgagttccagtgctacgacaagtacatgctggcacggctgaagcgtcacgccgagtcgtcggggcagccactgtggggcctgtcgggtccacacgacgggccgcggtacgacgacgagtcgccggagtcgtccgccttcttcagagagctggggggctcgtggaagtcggcctacggggagttcttcctgtcctggtacaccggggagctcctggcgcacggcgaccgtgtcctggccgcggcgtccagcgcgttccgcggcaagcccgtggagctgtccgccaaggtgccactcctgcgagggccggggacgggcccgagccccgcggacgccaccgcgggattccacggcgggtacggcccggtcgccgagatgttcgcgcgccacggttgcgcggtgatcgcggccggcgtggaggcgcggccggacgccacggcggaggagcgcctggcccaggtcaaggccgcctgcacggagcacggcgtgcatctcgcggcggagagcgcgcctctcgccgtggcgcgcggcagcgacggcgacggccccacgcgcgtcgtctggctgtccgccgggcgcacccggccgtgccagttcacgtaccagcggatgggcgcagagttcttctcgccgggccactggccgctgttcgtgcagttcgtgcgcgcgctggagtgccccgaggaggcccatgaggacgacctgccagccagcgctgacggcggcgagcggctcactgtgccgtccgcggccgcggcggccccaaaggaccaagcgacaagggaggtgcaaaccgtgtgaatggcaaatcatttgtcgcgcattcttaatgtacagtacttcctccgttgtttagttcaaaataaacgggcgggtgataaatattcgagaatggagatggtatatagagcatctctaacctttatgtaaaaagttcctaaatcttagtttaatgagttattagaaaaaaagacaagtctccaatagtaccctaaacgatattgctaaatttaagaagttgttatttatcttttcttgttcccgcatttggtaatcttagagcatttctaatagttatgtaaattgagcaccccaaattatagatttaagaagttgctaaaacactttaaggagtagaaaaatatatgtgctcaaatagttccctattttattggttttaatttttaaagttgcctacgccaacaaaaaataagcgagcatgctttctattttgattgagcttgcagtagaaatcaaatatcaacaaccttctctaatgtcttgagaggtcaataatttttaaagttgcctacgccaacaaaaaataagcgagcatgctttctattttgattgagcttgcagtagaaatcaaatatcaacaaccttctctaatgtcttgagaggtcaaagttatcgtggaagaccaaacgatcgcggcgatggcgtgaagacatcatatgatatgctctgacgatgcctcggtatacgaggttgtctagtcgtggcgtcatcaagacatctgggcactggagatggatttgtggtcaacaggacattaggacagtgcaaaatagtgacaaaaagtatgattttcacgatggatttagtaccaatgttgatttagggagtcccaacaaggttggtaaatgtaaagatgaaattgggttttgtagagagtttgtaaatttagtgaactggtttacataactgttggagaagagtttttctcgaaaacttgtaaaattcatatttagggacttgtttccataactaatggagatgctcttaaagggactcctcaaagcattttctgttgttattctattttatttttaattaataaactctgggctattatgtggaaaagaat

SEQ ID NO: 1711 - DNA, 1313 bp, Zea Mays
cacaaatcgactaatctagaagcggccaaccagggaggcgacgctgccgccgatagcagcagcgacgttgcagcttcgccctccacatcctctcgcgaccgccgacgacaacgacgccgcagcttcctccgcatcctctcgcgaccgccacttttccagttaggattcaaggcgtacatttgctggaattggatctttgagtgaccagaatcatataggatggtagttaaaacacttactgaattgtctcttcaagacaaagatgtaaccgttcaggttgaagtcaacaggagatgggaatttagaggaattggcgatgatggtcctgttttacatgttgacatgattctaacagatgcaacaggaaatgcaatctatgctgaagtacctgccaaattattggaacaaaaaggttcattgttacagttgaacaaagtgtactacatccgacgctttcgagttgcaaatgcaaagtcacaatacaaagttatcgatgcccctctcatgatctacttcactgtttattcgataattgaagtttgtcgtgatcccccatctacatttccactgtacgtgtataatcttattccatatgaggctattgatgcaaatggaccaaagagtaaagacttccatggatctgtatatctaagtggtggtgcagcttgccactggtatttcaatccatccattaacggagctcaaccatactatcaaaggattcataatgaaaatgtaacaatcaagctccctccactaacgaacgaacaagcggcgtttgttaaccctcctgaaacacaacacaaagatttgaaagagctattagagtctgaaccattgacactaccagaggaaggttttaaatgcactgtaaccattacaagagtgcttgatgatcagccatggtggtacaaagcatgtaatacatgtccaaacaaaccatccatgcggtcatcagtgtcatcatgtcctacatgtggctcgacagatgctattctaagaaaaagaactcctaatcaagtcagtcatagcttcacatggaagagacctatctttgccatcaaccaaattgagcattccaatgcatccgtcaactccaacaaaacttccatcgagaacaagacaggcaatttcaccctctacgacattgtccaacctatctacatccatttctctagagcaacatagcagttttgaagctggagacagtcttgaagaccaaaatccacaatcttttgaatcgccaccgaaaaggactaagcacaaatctttaagattcgattgcggtgaggatgcgactaacaaggataaat

SEQ ID NO: 1712 - DNA, 1213 bp, Zea Mays
ctagaagcggccaaccagggaggcgacgctgccgccgatagcagcagcgacgttgcagcttcgccctccacatcctctcgcgaccgccgacgacaacgacgccgcagcttcctccgcatcctctcgcgaccgccacttttccagttaggattcaaggcgtacatttgctggaattggatctttgagtgaccagaatcatataggatggtagttaaaacacttactgaattgtctcttcaagacaaagatgtaaccgttcaggttgaagtcaacaggagatgggaatttagaggaattggcgatgatggtcctgttttacatgttgacatgattctaacagatgcaacaggaaatgcaatctatgctgaagtacctgccaaattattggaacaaaaaggttcattgttacagttgaacaaagtgtactacatccgacgctttcgagttgcaaatgcaaagtcacaatacaaagttatcgatgcccctctcatgatctacttcactgtttattcgataattgaagtttgtcgtgatcccccatctacatttccactgtacgtgtataatcttattccatatgaggctattgatgcaaatggaccaaagagtaaagacttccatgacatacttggaatgatcaatgaagtttctgagataaatccaatacaactaagcggaaagtcatctatctaccggaatgtgttcatcaagaacctcaggatctgtatatctaagtggtggtgcagcttgccactggtatttcaatccatccattaacggagctcaaccatactatcaaaggattcataatgaaaatgtaacaatcaagctccctccactaacgaacgaacaagcggcgtttgttaaccctcctgaaacacaacacaaagatttgaaagagctattagagtctgaaccattgacactaccagaggaaggttttaaatgcactgtaaccattacaagagtgcttgatgatcagccatggtggtacaaagcatgtaatacatgtccaaacaaaccatccatgcggtcatcagtgtcatcatgtcctacatgtggctcgacagatgctattctaaggtacaaactcaatttcatggctactgatgatactgatgaaatgcggatgttttgtttcgacaatgttgctaaaagaatcgttgaaaaaacatgcacttctctcctaacatcagttacagatacctcaaat

SEQ ID NO: 1713 - DNA, 876 bp, Zea Mays
gcgaccgccacttttccagttaggattcaaggcgtacatttgctggaattggatctttgagtgaccagaatcatataggatggtagttaaaacacttactgaattgtctcttcaagacaaagatgtaaccgttcaggttgaagtcaacaggagatgggaatttagaggaattggcgatgatggtcctgttttacatgttgacatgattctaacagatgcaacaggaaatgcaatctatgctgaagtacctgccaaattattggaacaaaaaggttcattgttacagttgaacaaagtgtactacatccgacgctttcgagttgcaaatgcaaagtcacaatacaaagttatcgatgcccctctcatgatctacttcactgtttattcgataattgaagtttgtcgtgatcccccatctacatttccactgtacgtgtataatcttattccatatgaggctattgatgcaaatggaccaaagagtaaagacttccatgacatacttggaatgatcaatgaagtttctgagataaatccaatacaactaagcggaaagtcatctatctaccggaatgtgttcatcaagaacctcaggaggaaggttttaaatgcactgtaaccattacaagagtgcttgatgatcagccatggtggtacaaagcatgtaatacatgtccaaacaaaccatccatgcggtcatcagtgtcatcatgtcctacatgtggctcgacagatgctattctaaggtacaaactcaatttcatggctactgatgatactgatgaaatgcggatgttttgtttcgacaatgttgctaaaagaatcgttgaaaaaacatgcacttctctcctaacatcagttacagatacctcaaat

SEQ ID NO: 1714 - DNA, 1569 bp, Zea Mays
tcatataggatggtagttaaaacacttactgaattgtctcttcaagacaaagatgtaaccgttcaggttgaagtcaacaggagatgggaatttagaggaattggcgatgatggtcctgttttacatgttgacatgattctaacagatgcaacaggaaatgcaatctatgctgaagtacctgccaaattattggaacaaaaaggttcattgttacagttgaacaaagtgtactacatccgacgctttcgagttgcaaatgcaaagtcacaatacaaagttatcgatgcccctctcatgatctacttcactgtttattcgataattgaagtttgtcgtgatcccccatctacatttccactgtacgtgtataatcttattccatatgaggctattgatgcaaatggaccaaagagtaaagacttccatggtaagaatgacatcattctattatactttacttccattattcgtacatactatgaactctcaatcctaagaatagcacaatcaaggaatactatgtaaacatatattttatactcttatttatctgctgctagcttgatgtgtgtttctaaatgcttctaatcattgcaaaaaattaccagcatttcccttcccttctaatatttataacattttttgctttcagtctctattataaaattctataatacgccatactccctaacacatacaatatgttcaacaaacagattactttttaagatttgtcacacttatttaacgtctattcgattttatcagataactgtatgaagtactcatattctctaatccatttagtttgcatttacccttccattgcactgtttctgtacagtcaaagtttattgcattattcaatcaggaatattgtgcaattattaccataaagataacacaattcttacatactttgacttcatatctttcttacttctctttaccttcataaatcactatgctattatttaacaataaatcactgaagtctcacaactacaattttgattttcttattcatacagtcttccgaatttcaattataaaaataccatgactgttgtatactgtattcccataactcttatactaatttaatttccacccttctaaaccttgaagtttatcatatttcatagcttcttttcagttctattacagaaatctaaaacttcccattctttccaatgcgtacagagcttgcaacattgaacttcatgtgtttagcttcgtcccattttaatgtgttgttctcctttcccactttacattgcttatatacaataataacttattagcttccaaggtcgtatatccttcaaaattgttattgcaagaacaatataatagttacatactttgcctccatagctttattacttctcttttttaatctctgtaaaacaatacgctgcaattcaacaactgatgatgtaatgagccagacatacttggaatgatcaatgaagtttctgagataaatccaatacaactaagcggaaagtcatctatctaccggaatgtgttcatcaagaacctcagtaatgacataattaaagttac

SEQ ID NO: 1715 - DNA, 823 bp, Zea Mays
atttgcttcgttccatcggattaagcactttgagagcgctagatacgtgtcatatcacataaacaatggtgaaggctgttgctgtgcttggtagcagcgatggtgtcaagggcaccatcttcttcacccaagagggagatggccctaccactgtcaccggaagtgtctctggcctcaagcctggcctccatgggttccatgtgcatgcacttggtgacaccaccaatggctgcatgtcaactggaccacactacaatcctgcgagcaaggaacatggagcaccagaagatgagaaccgccatgccggtgatcttggaaatgtgacagctggagcagatggtgttgcaaacattaatgttaccgacagccagatcccactgactgggccaaactcaatcattggcagagctgttgttgttcacgctgatcccgatgatcttggaaagggtggacacgagctcaggaagagcaccggaaacgctggcggccgtgttgcttgtgggatcatcggactccagggctgaactgaaacaaatggtcgttggacttcgggggcgcctgggagtgccgtcaccagcaggctagaataacatcccgaagacatcgtgaaataataataataagagcgcctgatatgtgatcagtggtgtactcgccattaagcacctgtggcaaccgatgagctgaactgtgttggactgttggctaaaatgctggttcgcctgagcatgtgtcacatgtctgtcggttttgatggcattccgaccgtttcgttgtgctttgcgcttacgtgcgtgttgctgcaaccaatggtggtgactcg

SEQ ID NO: 1716 - DNA, 1082 bp, Zea Mays
ggcggtgaccgagggacatgtaaattctaaactaatggaggtgtttattgtgattcaaccttgaataaataatgcggcagagcaaagaaccccctttcccttccccttccgctcgagtctgctctagggtttttgccaagccgccgtcgccgtcgctctgccctcgtatcccctcccacgacaccgagacaccaagatgacggcgcagaccgcggaggagctcgccacccagatcgagcagcagaagctcgaggagcagaagaccgaggcagaggaagttgtggtggaggatgaggaggaggaagatgaggacgatgacgatgatgacaaggatgatgatgaactcgatggggatgccagtggcaagtcaaagcaaagcaggagtgagaagaagagccgcaaggccatgctgaagcttggcatgaagcccatcactggtgtcagccgcgtcactgtaaagaaaaatactctttgtcatctccaaaccagatgtgttcaagagcccgaattccgacacgtatgtcatattcggcgaggctaagatcgaggacctcagctcccagctgcagacccaggcagcagagcagttcaaggctcctgacttgagccagatgatcttgaatccagagacgtctggcccgggacaggaggacaatgatgaggaggtcgacgaaactggtgttgaggccaaggacattgagctggtgatgacccaggcatctgtttcaaggcccaaggctgtcaaggccctcaaggcttctaatggggacattgtcactgccatcatggatctgacaacctagggtgatatttctgtccgtgccacttttgttttggagtgctattgcaacttgagtgttatatgtggacctatgcttcgatgatgttacatgattgcttcttgggtcaaggtcattcaaacaaggtttcatctttgctggcttgaaacctggcagtagtttatagcccagaatgtttgtctgtggttctggtgtttcagtaatgtcacagttatcaatggctcttaagtttctgcaatatcacagttttcttacatttttctttaccgatatttattccct

SEQ ID NO: 1717 - DNA, 1075 bp, Zea Mays
ggcggtgaccgagggacatgtaaattctaaactaatggaggtgtttattgtgattcaaccttgaataaataatgcggcagagcaaagaaccccctttcccttccccttccgctcgagtctgctctagggtttttgccaagccgccgtcgccgtcgctctgccctcgtatcccctcccacgacaccgagacaccaagatgacggcgcagaccgcggaggagctcgccacccagatcgagcagcagaagctcgaggagcagaagaccgaggcagaggaagttgtggtggaggatgaggaggaggaagatgaggacgatgacgatgatgacaaggatgatgatgaactcgatgaaggggatgccagtggcaagtcaaagcaaagcaggagtgagaagaagagccgcaaggccatgctgaagcttggcatgaagcccatcactggtgtcagccgcgtcactatactctttgtcatctccaaaccagatgtgttcaagagcccgaattccgacacgtatgtcatattcggcgaggctaagatcgaggacctcagctcccagctgcagacccaggcagcagagcagttcaaggctcctgacttgagccagatgatcttgaatccagagacgtctggcccgggacaggaggacaatgatgaggaggtcgacgaaactggtgttgaggccaaggacattgagctggtgatgacccaggcatctgtttcaaggcccaaggctgtcaaggccctcaaggcttctaatggggacattgtcactgccatcatggatctgacaacctagggtgatatttctgtccgtgccacttttgttttggagtgctattgcaacttgagtgttatatgtggacctatgcttcgatgatgttacatgattgcttcttgggtcaaggtcattcaaacaaggtttcatctttgctggcttgaaacctggcagtagtttatagcccagaatgtttgtctgtggttctggtgtttcagtaatgtcacagttatcaatggctcttaagtttctgcaatatcacagttttcttacatttttctttaccgatatttattccct

SEQ ID NO: 1718 - DNA, 1658 bp, Zea Mays
ctcctgtcaaaaccctagtttcccaacatcgtcggctcctctctttcccaccgccttcttccactactcttcaccctcccctcctccccatcgcgaactcacaagagaaccaagtagacgagggagaaggagatggcgaagaagaaggagaaggcggtgaacgtgtcgggcaagccgcggcactcgaacgacgtcaaccgccccaatgacaagaagggcgcgggcggcggcgccggtggcgggagccggtccgcggctaccgtgcggcggctcaagatgtacaagacgcggcccaagagggaccgcgccgggaaggtgctcaggaacgatttccagtctaaagagctccccaacacccgcatcgagcccgaccgccggtggttcggcaatactcgcgttgtgggccagccacagcttgaaatgttccgggaggaactccagagtcggctttccgacaacttcagtgtcatcctgaaagaacggaagctgccactatcgctcctgcaagatcatcaaaagcaagcgaaggcacatctgcttgaagttgaaccttttgagcatgcttttgggccaaagggcaagaggaaacgtccgaaactaactgctcttgactacgaatctttgctgaagagagctgatgattcccaagatgtgtttgagcaaaagtatgcttcatcaaagttgccaagggaggaagaagaagatggcttacgtgatctagtgaggcatacaatgtttgagaagggacagagcaaaagaatctggggtgaactatacaaagttattgactcttcggacgttgttgtgcaggtgttggacgccagggatccaatgggcactcgatgctaccatctagagagacatctaaaagagaactgcaagcacaaacacttggttttcttactaaataaggatggttaaggaccctttcgaaggactatcccaccctagcattccatgcaagcatcaacaagtcatttggcaaaggatctcttctgtcagtattgaggcaatttgctcgtttgaagaatgacaaacaagctatttctgtcgggtttgttgggtaccccaatgttgggaagtcatcagttattaacacactacggtcgaagagtgtctgcaaggttgctccaatacctggagagacaaaagtgtggcagtacatcactctcactaaaaagatatttttgattgattgtcccggtgttgtatatcaaaacaatgattcagaaactgatatagttctgaagggtgtggtatgtatcttcagctgtgcaatttgcaaatgttttttttacctgggtagtgctggaggctcccgcatgagtgaggtctgggaaagagatgaaccgaggcaagcatcccccgcaaatgtggagagtctgcttcgaaccctaaacctggtgactcagggacagctctcacactgcaccatgcctgctcttgttctttttacttgtggctggcaaaaataattatttcaagcttgtagtgccccctccccctaccttgaatatatatcagaaagtattttagttcaagatgatgtttattcctgggatacatgtaaaacaatgtttagctcatacacttttccaagtggagttgacgatgaccagtcctgttctgtattaaatatatttgatgtcaactactca

SEQ ID NO: 1719 - DNA, 3106 bp, Zea Mays
ctcctgtcaaaaccctagtttcccaacatcgtcggctcctctctttcccaccgccttcttccactactcttcaccctcccctcctccccatcgcgaactcacaagagaaccaagtagacgagggagaaggagatggcgaagaagaaggagaaggcggtgaacgtgtcgggcaagccgcggcactcgaacgacgtcaaccgccccaatgacaagaagggcgcgggcggcggcgccggtggcgggagccggtccgcggctaccgtgcggcggctcaagatgtacaagacgcggcccaagagggaccgcgccgggaaggtgctcaggaacgatttccagtctaaagagctccccaacacccgcatcgagcccgaccgccggtggttcggcaatactcgcgttgtgggccagccacagcttgaaatgttccgggaggaactccagagtcggctttccgacaacttcagtgtcatcctgaaagaacggaagctgccactatcgctcctgcaagatcatcaaaagcaagcgaaggcacatctgcttgaagttgaaccttttgagcatgcttttgggccaaagggcaagaggaaacgtccgaaactaactgctcttgactacgaatctttgctgaagagagctgatgattcccaagatgtgtttgagcaaaagtatgcttcatcaaagttgccaagggaggaagaagaagatggcttacgtgatctagtgaggcatacaatgtttgagaagggacagagcaaaagaatctggggtgaactatacaaagttattgactcttcggacgttgttgtgcaggtgttggacgccagggatccaatgggcactcgatgctaccatctagagagacatctaaaagagaactgcaagcacaaacacttggttttcttactaaataagtgtgatctaatccctgcttgggctacaaaaggatggttaaggaccctttcgaaggactatcccaccctagcattccatgcaagcatcaacaagtcatttggcaaaggatctcttctgtcagtattgaggcaatttgctcgtttgaagaatgacaaacaagctatttctgtcgggtttgttgggtaccccaatgttgggaagtcatcagttattaacacactacggtcgaagagtgtctgcaaggttgctccaatacctggagagacaaaagtgtggcagtacatcactctcactaaaaagatatttttgattgattgtcccggtgttgtatatcaaaacaatgattcagaaactgatatagttctgaagggtgtggtatgtatcttcagctgtgcaatttgcaaatgttttttttacctgggtagtgctggaggctcccgcatgagtgaggtctgggaaagagatgaaccgaggcaagcatcccccgcaaatgtggagagtctgcttcgaaccctaaacctggtgactcagggacagctctcacactgcaccatgcctgctcttgttctttttacttgtggctggcaaaaataattatttcaagcttgtagtgccccctccccctaccttgaatatatatcagaaagtattttagttcaagatgatgtttattcctgggatacatgtaaaacaatgtttagctcatacacttttccaagtggagttgacgatgaccagtcctgttctgtattaaatatatttgatgtcaactactcatcttagaatgttgtgaactgcgatgcacttgcaagatagtcccagtactcagccctcccgtagaaggccctaagagtaaaccagatctattcttcttccctctctctactaacaccctgcccctccttatagagaggtaatcctaacttaatagctaagcaacataacaaaccctatctggacggcgctgttcacgcgctacagtaaccgcacgtgaacagtggccgcggctaacctaaccataatgacatagctaatgggcttaaggcccataacatagaaacactgatctttttagttgttcctttatcaatacatgtatgctctctaatttatgtatttgtctcaaggtccgggtgacaaatttggcggatgctgctgagcacattggtgaagttcttaggcgtgttaaaaaggagcatctccaaagagcgtacaaaattcaagattggtctgatgataacgattttcttgtccagctgtgcaggaccactggaaaacttctcaagggcggggagcctgatctgacaacagctgccaagatgatacttcatgactggcagaggggtaaaatccccttctttgtaccccctccgcagcaaagcgacggcggtgcatctgaaagtgctgaacctattgggattaccaaagaggacggagtaagcagcgacaggactgccgcagccatgaaagccattgcaggaataatctcgtcacagcagaacatgaatgtgccctgccataaggaaaacaatgcagacaatgaagacactactgaaaatgcagataacgaagacattgagagttcagataacgaagacaatgatgacatcgagcctgcagagcgatctgagtgatctttgggtacagatgtggattattagagttgatatgtcaaggctaattaatttgtcagcccaggtgttgtgtagctacttgaccatatcactggcgtgctagaaaaaaaggatcatgttgagttgcactttttgtaactatcgtacctgaatctttgtaatagggcaagatcagttttgctaggtacctggttgtatcgggatggttatctgtgctgtctactacaaatacagttacatctattttacttaaatcaagtggaagttatctctaaatttttattgcggcttcatgaatttttgcgtacctacatatttcaagccccatcttttcgattgtgccacgtagaggtcgataagctaaaaatgatcgcagaggtttagaggtatctttgttgaggaacaattgtttgtcctaatatgagatgattaattgtgtcgcattcaaattttatttgtgatactgtgattgaaaggtaactgccaatggaactaacatgtttttcgatacaggagaagccaaaaaagcagagacaaagattggattgaattaaaaaaaa

SEQ ID NO: 1720 - DNA, 1866 bp, Zea Mays
caatgttgttcgtgttcccctgtttggttaagtgtcgtattgactgttgagttggctggcaagcgaaggcacatctgcttgaagttgaaccttttgagcatgcttttgggccaaagggcaagaggaaacgtccgaaactaactgctcttgactacgaatctttgctgaagagagctgatgattcccaagatgtgtttgagcaaaagtatgcttcatcaaagttgccaagggaggaagaagaagatggcttacgtgatctagtgaggcatacaatgtttgagaagggacagagcaaaagaatctggggtgaactatacaaagttattgactcttcggacgttgttgtgcaggtgttggacgccagggatccaatgggcactcgatgctaccatctagagagacatctaaaagagaactgcaagcacaaacacttggttttcttactaaataagtgtgatctaatccctgcttgggctacaaaaggatggttaaggaccctttcgaaggactatcccaccctagcattccatgcaagcatcaacaagtcatttggcaaaggatctcttctgtcagtattgaggcaatttgctcgtttgaagaatgacaaacaagctatttctgtcgggtttgttgggtaccccaatgttgggaagtcatcagttattaacacactacggtcgaagagtgtctgcaaggttgctccaatacctggagagacaaaagtgtggcagtacatcactctcactaaaaagatatttttgattgattgtcccggtgttgtatatcaaaacaatgattcagaaactgatatagttctgaagggtgtggtccgggtgacaaatttggcggatgctgctgagcacattggtgaagttcttaggcgtgttaaaaaggagcatctccaaagagcgtacaaaattcaagattgctgtgcaggaccactggaaaacttctcaagggcggggagcctgatctgacaacagctgccaagatgatacttcatgactggcagaggggtaaaatccccttctttgtaccccctccgcagcaaagcgacggcggtgcatctgaaagtgctgaacctattgggattaccaaagaggacggagtaagcagcgacaggactgccgcagccatgaaagccattgcaggaataatctcgtcacagcagaacatgaatgtgccctgccataaggaaaacaatgcagacaatgaagacactactgaaaatgcagataacgaagacattgagagttcagataacgaagacaatgatgacatcgagcctgcagagcgatctgagtgatctttgggtacagatgtggattattagagttgatatgtcaaggctaattaatttgtcagcccaggtgttgtgtagctacttgaccatatcactggcgtgctagaaaaaaaggatcatgttgagttgcactttttgtaactatcgtacctgaatctttgtaatagggcaagatcagttttgctaggtacctggttgtatcgggatggttatctgtgctgtctactacaaatacagttacatctattttacttaaatcaagtggaagttatctctaaatttttattgcggcttcatgaatttttgcgtacctacatatttcaagccccatcttttcgattgtgccacgtagaggtcgataagctaaaaatgatcgcagaggtttagaggtatctttgttgaggaacaattgtttgtcctaatatgagatgattaattgtgtcgcattcaaattttatttgtgatactgtgattgaaaggtaactgccaatggaactaacatgtttttcgatacaggagaagccaaaaaagcagagacaaagattggattgaattaaaaaaaa

SEQ ID NO: 1721 - DNA, 4432 bp, Zea Mays
agcagccgcagcacatacgttggcgagtggaaaacccaggcccagaccccttccggtttcgctttccctgctcccctcttctcctctctcccctccgcggccaagccagagccatgcctcgttctactacttcccccaccacgtcacaacagggcatccacaccaccccccaccgcctccctccacctccgcctccttccccaccccccttccgcttccgcccacaaccctaaccttaatcccgtcgccgccgtagccgcggaccgactgggccgactcccgcaccgcgccttcggcgttatattcggtccctgcgttctctctctccggttccccacctcccgcggcgagccggggcgctagggttttctacatggatccgcgccgcgcacccccgcggggcggcggcgggctctcttactccacgctgttcaacctcgagcctttgcagaacttaagggttcctgtaccagaaaatctcgcccgctacgggaacagcagctcaaatgggagtccaagcagtgagggtcaaggatccttgttggatcagtacaatggtgtacatgatgcttcccatggcttgcatcggaagcgaaaaaagcaccctgatggtgccggcgatgatgatcatgcagatgcctatagtaacaaaatgatggaggatcactaccgtgcgatgctcagtgaacatgtccagaagtaccgaaggtcaaagtttaaggagggtgcttttatttccgatccttctcaggtggcaatcccccaaataaaacacaaaaacggtggtaaaaaagttatgaagcacattagtaatttcagggatattgcggcattaaatgggatagaagcttcacatgagtataattggatagaatgtattgaaactcatggtggttttaataagcttgtagcatccgttgattccacctatttagatatgggggataatatacactacttagttccagagggttatgataagttagcattatcccttaacctccctatttcttctgatatacgtgttgaggagcacttcttgaagggcgcactagatttgtgcaccctatcagcaatgcttggtactgaccaaaggtttgaggcttccagccatggtggattatctgaacccctgccacaatttgaatctctcaaggaaagggtaaaggtgcagaaattttctcttcaagttaccgaggacccctttgcaattccggaaggagcagctgggaggatacgaaggtctattatatcagaaactggcaatttgcaggtccattacgtcaaagtcttggaaaaaggagatacatatgagattattgagcgcagcttaccaaagaagcaaatagtaaagaaggaaccttttgtaatcgtgaaagaagagtctgaaaagacttacaaactctggcagtatcttgctactaaaagcattccaaagcatcacaggaattttacttctttgatgaagaaacgacaagtagatgcgaagcgcttctctgatagttgtcaacgagaggtaaaattcaaagtaaggaggtcactgaaactgatgagatgtgctgcaatacgtacaaggcagttggctagggatatgctgatattttggaaacgagtagacaaagagcagtatgagttgagaaaaaaagaggaaagagaagctgctgaagctttaaaacgtgaggaggagcttcgtgaagccaaaagacaacaacagaggctaaactttctgctgtcacaaacggagctttatagtcatttcatgcagaacaaggctggtggctcagcgccacctgatgaggaagatgtccctgatgaagatgaggaagaagatcctgaagaagctcaattgaaaagagaggccttgagggcagctcagcatgccgtttctcaacaaaagatgaggactaatgcatttgatagtgaaactgtgaggcttcgtcaaacttctgagtctgttcttccaactgatgattcatctagcatggatcctagtaagattgatctattacacccttcaacaatgcctgagaagtcatctgtgcaaacaccagagttgtttaagggtgtattaaaagaatatcagttaaaaggcttacaatggctggttaattgttatgaacaggggttgaatggcattcttgctgatgagatgggtcttggcaaaactgttcaggctatggcattcctgtctcatttggctgaggacaaaaacatatggggcccctttctagtggtggctcctgcatctgttgtgaataactgggctgaggagttgattagattctgccctgacctaaagatacttccttactggggcccagagaggatgattcttcgaaagaacatcaaccccaagcgtttgtatcgcagagatgctagcttccacattcttattacaaactatcagatacttgtgaatgaagagaagcttttgagacgtgttaagtggcaatacatggtactggatgaggcccaggctatcaaaagttcaagcagcgctggaagacattactgagctttagctgtagaaatcgtctacttcttactgggacaccaatacagaacaatatggctgagttatgggcacttcttcatttcatcatgcccactctatttgacagccatgaacagttcaacgagtggttctcaaagggtattgagggtcatgctgagcatggaggagctttgaatgaacatcagcttagtagattgcatgctattttgaagcccttcatgctccgccgggttaagattgatgtcattgctgaaatgaccaaaaagaaagaagaaattgttccctgcaaattgagttctcgtcaacaaattttctatcaagctataaaaaataagatctcgcttaacgagttgcttgatggaagtcgtggcaatctaaatgacaagaagttacttagcctgatgaatattgtcatgcagctacggaaggtctgcaatcacccggagctgtttgagcgcaatgagggaagctcttacttttactttgctgatatcccaaactcacttctttctcccccgtttggggcattacaagatgtacattatgcaggcaagagaaatcctataatctttgagatcccaaagttagtttatgatggaatcatctgcaacacagaaaattctggaagcatctgtggatttcagaatggatatttgaacaggttgtttaatatatttttgccaagcaatatccatcgctcagccattccagaagttaattcatcaaatgagtctgttttatcatctggtgcatttggctttacacgtttgtcaaacctgtgcccagttgaagctttcttcctggccacttcatcattctttgagggactagcattttcagtaatgcgatggaataggaactacactgatgaaattatggatgcattccttgattcagaagatactgacatccagttcagtcagaatgattccacaagagttcgtgcagttgcccggttgttgctttcttctacaaaggccaagcccagcttacttaggacaaagattggaactggcccaagtgaaggcccatatgaagcactggtgctttctcatcatgacaggcttgcttcgaacataagggttcttcgttcagcatacacttatattccgccagctagagcaccacctataaatgtttcatgtgctgatcgaaattttgcctataagttcactgatgagatgtatgatccttgggtcatgaaactgttcctgggatttgctcgtacttccgagttcaatggtcctagacaaccagttgctcttcatcctttgatacaagaactcaatactgatttgcctatccttgagccgatgctgcagctaccctataggatatttgggtcttctccaccgatgagtaattttgatccagctaaaatgctcactgattctgggaagctccacaccttggatatgctactacggcgccttcgagctgaaggtcaccgtgtgcttctttttgctcagatgactaaaatgctggacattcttgaggaatgatgtatttgttttcttgttaagcacaagagctggggggcttggtattaatttgactgctgctgatactgttattttttatgaaattgactggaatccaacacaagaccagcaggcaatggatagaacacacagacttggtcaaacaaaggaggtaactgtgtacaggcttatatgcaaagatactatcgaggagaaaatattgcaaagagcaaagcagaaaaatgcagtgcaagagttggttatgaaggggaaacatgttcaggacgatcatttgttgagacaagaggatgttgtttcattacttattgatgacacacaaattgcacataagttgaaagaaatatccatgcagccttagaggattgcccatgcagagaggattggacttacaatggcaactgggagtctctggatc

SEQ ID NO: 1722 - DNA, 4348 bp, Zea Mays
tcgctttccctgctcccctcttctcctctctcccctccgcggccaagccagagccatgcctcgttctactacttcccccaccacgtcacaacagggcatccacaccaccccccaccgcctccctccacctccgcctccttccccaccccccttccgcttccgcccacaaccctaaccttaatcccgtcgccgccgtagccgcggaccgactgggccgactcccgcaccgcgccttcggcgttatattcggtccctgcgttctctctctccggttccccacctcccgcggcgagccggggcgctagggttttctacatggatccgcgccgcgcacccccgcggggcggcggcgggctctcttactccacgctgttcaacctcgagcctttgcagaacttaagggttcctgtaccagaaaatctcgcccgctacgggaacagcagctcaaatgggagtccaagcagtgagggtcaaggatccttgttggatcagtacaatggtgtacatgatgcttcccatggcttgcatcggaagcgaaaaaagcaccctgatggtgccggcgatgatgatcatgcagatgcctatagtaacaaaatgatggaggatcactaccgtgcgatgctcagtgaacatgtccagaagtaccgaaggtcaaagtttaaggagggtgcttttatttccgatccttctcaggtggcaatcccccaaataaaacacaaaaacggtggtaaaaaagttatgaagcacattagtaatttcagggatattgcggcattaaatgggatagaagcttcacatgagtataattggatagaatgtattgaaactcatggtggttttaataagcttgtagcatccgttgattccacctatttagatatgggggataatatacactacttagttccagagggttatgataagttagcattatcccttaacctccctatttcttctgatatacgtgttgaggagcacttcttgaagggcgcactagatttgtgcaccctatcagcaatgcttggtactgaccaaaggtttgaggcttccagccatggtggattatctgaacccctgccacaatttgaatctctcaaggaaagggtaaaggtgcagaaattttctcttcaagttaccgaggacccctttgcaattccggaaggagcagctgggaggatacgaaggtctattatatcagaaactggcaatttgcaggtccattacgtcaaagtcttggaaaaaggagatacatatgagattattgagcgcagcttaccaaagaagcaaatagtaaagaaggaaccttttgtaatcgtgaaagaagagtctgaaaagacttacaaactctggcagtatcttgctactaaaagcattccaaagcatcacaggaattttacttctttgatgaagaaacgacaagtagatgcgaagcgcttctctgatagttgtcaacgagaggtaaaattcaaagtaaggaggtcactgaaactgatgagatgtgctgcaatacgtacaaggcagttggctagggatatgctgatattttggaaacgagtagacaaagagcagtatgagttgagaaaaaaagaggaaagagaagctgctgaagctttaaaacgtgaggaggagcttcgtgaagccaaaagacaacaacagaggctaaactttctgctgtcacaaacggagctttatagtcatttcatgcagaacaaggctggtggctcagcgccacctgatgaggaagatgtccctgatgaagatgaggaagaagatcctgaagaagctcaattgaaaagagaggccttgagggcagctcagcatgccgtttctcaacaaaagatgaggactaatgcatttgatagtgaaactgtgaggcttcgtcaaacttctgagtctgttcttccaactgatgattcatctagcatggatcctagtaagattgatctattacacccttcaacaatgcctgagaagtcatctgtgcaaacaccagagttgtttaagggtgtattaaaagaatatcagttaaaaggcttacaatggctggttaattgttatgaacaggggttgaatggcattcttgctgatgagatgggtcttggcaaaactgttcaggctatggcattcctgtctcatttggctgaggacaaaaacatatggggcccctttctagtggtggctcctgcatctgttgtgaataactgggctgaggagttgattagattctgccctgacctaaagatacttccttactggggcccagagaggatgattcttcgaaagaacatcaaccccaagcgtttgtatcgcagagatgctagcttccacattcttattacaaactatcagatacttgtgaatgaagagaagcttttgagacgtgttaagtggcaatacatggtactggatgaggcccaggctatcaaaagttcaagcagccagcgctggaagacattactgagctttagctgtagaaatcgtctacttcttactgggacaccaatacagaacaatatggctgagttatgggcacttcttcatttcatcatgcccactctatttgacagccatgaacagttcaacgagtggttctcaaagggtattgagggtcatgctgagcatggaggagctttgaatgaacatcagcttagtagattgcatgctattttgaagcccttcatgctccgccgggttaagattgatgtcattgctgaaatgaccaaaaagaaagaagaaattgttccctgcaaattgagttctcgtcaacaaattttctatcaagctataaaaaataagatctcgcttaacgagttgcttgatggaagtcgtggcaatctaaatgacaagaagttacttagcctgatgaatattgtcatgcagctacggaaggtctgcaatcacccggagctgtttgagcgcaatgagggaagctcttacttttactttgctgatatcccaaactcacttctttctcccccgtttggggcattacaagatgtacattatgcaggcaagagaaatcctataatctttgagatcccaaagttagtttatgatggaatcatctgcaacacagaaaattctggaagcatctgtggatttcagaatggatatttgaacagttgaagctttcttcctggccacttcatcattctttgagggactagcattttcagtaatgcgatggaataggaactacactgatgaaattatggatgcattccttgattcagaagatactgacatccagttcagtcagaatgattccacaagagttcgtgcagttgcccggttgttgctttcttctacaaaggccaagcccagcttacttaggacaaagattggaactggcccaagtgaaggcccatatgaagcactggtgctttctcatcatgacaggcttgcttcgaacataagggttcttcgttcagcatacacttatattccgccagctagagcaccacctataaatgtttcatgtgctgatcgaaattttgcctataagttcactgatgagatgtatgatccttgggtcatgaaactgttcctgggatttgctcgtacttccgagttcaatggtcctagacaaccagttgctcttcatcctttgatacaagaactcaatactgatttgcctatccttgagccgatgctgcagctaccctataggatatttgggtcttctccaccgatgagtaattttgatccagctaaaatgctcactgattctgggaagctccacaccttggatatgctactacggcgccttcgagctgaaggtcaccgtgtgcttctttttgctcagatgactaaaatgctggacattcttgaggattacatgaattttagaaaattcaagtatttcagacttgatgggtcttctgcaatctcagaccgccgtgacatggtccgagctttccagaacaggaatgatgtatttgttttcttgttaagcacaagagctggggggcttggtattaatttgactgctgctgatactgttattttttatgaaattgactggaatccaacacaagaccagcaggcaatggatagaacacacagacttggtcaaacaaaggaggtaactgtgtacaggcttatatgcaaagatactatcgaggagaaaatattgcaaagagcaaagcagaaaaatgcagtgcaagagttggttatgaaggggaaacatgttcaggacgatcatttgttgagacaagaggatgttgtttcattacttattgatgacacacaaattgcacataagttgaaagaaatatccatgcagccttagaggattgcccatgcagagaggattggacttacaatggcaactgggagtctctggatc

SEQ ID NO: 1723 - DNA, 4283 bp, Zea Mays
cctccctccacctccgcctccttccccaccccccttccgcttccgcccacaaccctaaccttaatcccgtcgccgccgtagccgcggaccgactgggccgactcccgcaccgcgccttcggcgttatattcggtccctgcgttctctctctccggttccccacctcccgcggcgagccggggcgctagggttttctacatggatccgcgccgcgcacccccgcggggcggcggcgggctctcttactccacgctgttcaacctcgagcctttgcagaacttaagggttcctgtaccagaaaatctcgcccgctacgggaacagcagctcaaatgggagtccaagcagtgagggtcaaggatccttgttggatcagtacaatggtgtacatgatgcttcccatggcttgcatcggaagcgaaaaaagcaccctgatggtgccggcgatgatgatcatgcagatgcctatagtaacaaaatgatggaggatcactaccgtgcgatgctcagtgaacatgtccagaagtaccgaaggtcaaagtttaaggagggtgcttttatttccgatccttctcaggtggcaatcccccaaataaaacacaaaaacggtggtaaaaaagttatgaagcacattagtaatttcagggatattgcggcattaaatgggatagaagcttcacatgagtataattggatagaatgtattgaaactcatggtggttttaataagcttgtagcatccgttgattccacctatttagatatgggggataatatacactacttagttccagagggttatgataagttagcattatcccttaacctccctatttcttctgatatacgtgttgaggagcacttcttgaagggcgcactagatttgtgcaccctatcagcaatgcttggtactgaccaaaggtttgaggcttccagccatggtggattatctgaacccctgccacaatttgaatctctcaaggaaagggtaaaggtgcagaaattttctcttcaagttaccgaggacccctttgcaattccggaaggagcagctgggaggatacgaaggtctattatatcagaaactggcaatttgcaggtccattacgtcaaagtcttggaaaaaggagatacatatgagattattgagcgcagcttaccaaagaagcaaatagtaaagaaggaaccttttgtaatcgtgaaagaagagtctgaaaagacttacaaactctggcagtatcttgctactaaaagcattccaaagcatcacaggaattttacttctttgatgaagaaacgacaagtagatgcgaagcgcttctctgatagttgtcaacgagaggtaaaattcaaagtaaggaggtcactgaaactgatgagatgtgctgcaatacgtacaaggcagttggctagggatatgctgatattttggaaacgagtagacaaagagcagtatgagttgagaaaaaaagaggaaagagaagctgctgaagctttaaaacgtgaggaggagcttcgtgaagccaaaagacaacaacagaggctaaactttctgctgtcacaaacggagctttatagtcatttcatgcagaacaaggctggtggctcagcgccacctgatgaggaagatgtccctgatgaagatgaggaagaagatcctgaagaagctcaattgaaaagagaggccttgagggcagctcagcatgccgtttctcaacaaaagatgaggactaatgcatttgatagtgaaactgtgaggcttcgtcaaacttctgagtctgttcttccaactgatgattcatctagcatggatcctattcaacaatgcctgagaagtcatctgtgcaaacaccagagttgtttaagggtgtattaaaagaatatcagttaaaaggcttacaatggctggttaattgttatgaacaggggttgaatggcattcttgctgatgagatgggtcttggcaaaactgttcaggctatggcattcctgtctcatttggctgaggacaaaaacatatggggcccctttctagtggtggctcctgcatctgttgtgaataactgggctgaggagttgattagattctgccctgacctaaagatacttccttactggggcccagagaggatgattcttcgaaagaacatcaaccccaagcgtttgtatcgcagagatgctagcttccacattcttattacaaactatcagatacttgtgaatgaagagaagcttttgagacgtgttaagtggcaatacatggtactggatgaggcccaggctatcaaaagttcaagcagccagcgctggaagacattactgagctttagctgtagaaatcgtctacttcttactgggacaccaatacagaacaatatggctgagttatgggcacttcttcatttcatcatgcccactctatttgacagccatgaacagttcaacgagtggttctcaaagggtattgagggtcatgctgagcatggaggagctttgaatgaacatcagcttagtagattgcatgctattttgaagcccttcatgctccgccgggttaagattgatgtcattgctgaaatgaccaaaaagaaagaagaaattgttccctgcaaattgagttctcgtcaacaaattttctatcaagctataaaaaataagatctcgcttaacgagttgcttgatggaagtcgtggcaatctaaatgacaagaagttacttagcctgatgaatattgtcatgcagctacggaaggtctgcaatcacccggagctgtttgagcgcaatgagggaagctcttacttttactttgctgatatcccaaactcacttctttctcccccgtttggggcattacaagatgtacattatgcaggcaagagaaatcctataatctttgagatcccaaagttagtttatgatggaatcatctgcaacacagaaaattctggaagcatctgtggatttcagaatggatatttgaacaggttgtttaatatatttttgccaagcaatatccatcgctcagccattccagaagttaattcatcaaatgagtctgttttatcatctggtgcatttggctttacacgtttgtcaaacctgtgcccagttgaagctttcttcctggccacttcatcattctttgagggactagcattttcagtaatgcgatggaataggaactacactgatgaaattatggatgcattccttgattcagaagatactgacatccagttcagtcagaatgattccacaagagttcgtgcagttgcccggttgttgctttcttctacaaaggccaagcccagcttacttaggacaaagattggaactggcccaagtgaaggcccatatgaagcactggtgctttctcatcatgacaggcttgcttcgaacataagggttcttcgttcagcatacacttatattccgccagctagagcaccacctataaatgtttcatgtgctgatcgaaattttgcctataagttcactgatgagatgtatgatccttgggtcatgaaactgttcctgggatttgctcgtacttccgagttcaatggtcctagacaaccagttgctcttcatcctttgatacaagaactcaatactgatttgcctatccttgagccgatgctgcagctaccctataggatatttgggtcttctccaccgatgagtaattttgatccagctaaaatgctcactgattctgggaagctccacaccttggatatgctactacggcgccttcgagctgaaggtcaccgtgtgcttctttttgctcagatgactaaaatgctggacattcttgaggattacatgaattttagaaaattcaagtatttcagacttgatgggtcttctgcaatctcagaccgccgtgacatggtccgagctttccagaacaggaatgatgtatttgttttcttgttaagcacaagagctggggggcttggtattaatttgactgctgctgatactgttattttttatgaaattgactggaatccaacacaagaccagcaggcaatggatagaacacacagacttggtcaaacaaaggaggtaactgtgtacaggcttatatgcaaagatactatcgaggagaaaatattgcaaagagcaaagcagaaaaatgcagtgcaagagttggttatgaaggggaaacatgttcaggacgatcatttgttgagacaagaggatgttgtttcattacttattgatgacacacaaattgcacataagttgaaagaaatatccatgcaggtaaacatcaca

SEQ ID NO: 1724 - DNA, 3923 bp, Zea Mays
cctccctccacctccgcctccttccccaccccccttccgcttccgcccacaaccctaaccttaatcccgtcgccgccgtagccgcggaccgactgggccgactcccgcaccgcgccttcggcgttatattcggtccctgcgttctctctctccggttccccacctcccgcggcgagccggggcgctagggttttctacatggatccgcgccgcgcacccccgcggggcggcggcgggctctcttactccacgctgttcaacctcgagcctttgcagaacttaagggttcctgtaccagaaaatctcgcccgctacgggaacagcagctcaaatgggagtccaagcagtgagggtcaaggatccttgttggatcagtacaatggtgtacatgatgcttcccatggcttgcatcggaagcgaaaaaagcaccctgatggtgccggcgatgatgatcatgcagatgcctatagtaacaaaatgatggaggatcactaccgtgcgatgctcagtgaacatgtccagaagtaccgaaggtcaaagtttaaggagggtgcttttatttccgatccttctcaggtggcaatcccccaaataaaacacaaaaacggtggtaaaaaagttatgaagcacattagtaatttcagggatattgcggcattaaatgggatagaagcttcacatgagtataattggatagaatgtattgaaactcatggtggttttaataagcttgtagcatccgttgattccacctatttagatatgggggataatatacactacttagttccagagggttatgataagttagcattatcccttaacctccctatttcttctgatatacgtgttgaggagcacttcttgaagggcgcactagatttgtgcaccctatcagcaatgcttggtactgaccaaaggtttgaggcttccagccatggtggattatctgaacccctgccacaatttgaatctctcaaggaaagggtaaaggtgcagaaattttctcttcaagttaccgaggacccctttgcaattccggaaggagcagctgggaggatacgaaggtctattatatcagaaactggcaatttgcaggtccattacgtcaaagtcttggaaaaaggagatacatatgagattattgagcgcagcttaccaaagaagcaaatagtaaagaaggaaccttttgtaatcgtgaaagaagagtctgaaaagacttacaaactctggcagtatcttgctactaaaagcattccaaagcatcacaggaattttacttctttgatgaagaaacgacaagtagatgcgaagcgcttctctgatagttgtcaacgagaggtaaaattcaaagtaaggaggtcactgaaactgatgagatgtgctgcaatacgtacaaggcagttggctagggatatgctgatattttggaaacgagtagacaaagagcagtatgagttgagaaaaaaagaggaaagagaagctgctgaagctttaaaacgtgaggaggagcttcgtgaagccaaaagacaacaacagaggctaaactttctgctgtcacaaacggagctttatagtcatttcatgcagaacaaggctggtggctcagcgccacctgatgaggaagatgtccctgatgaagatgaggaagaagatcctgaagaagctcaattgaaaagagaggccttgagggcagctcagcatgccgtttctcaacaaaagatgaggactaatgcatttgatagtgaaactgtgaggcttcgtcaaacttctgagtctgttcttccaactgatgattcatctagcatggatcctagtaagattgatctattacacccttcaacaatgcctgagaagtcatctgtgcaaacaccagagttgtttaagggtgtattaaaagaatatcagttaaaaggcttacaatggctggttaattgttatgaacaggggttgaatggcattcttgctgatgagatgggtcttggcaaaactgttcaggctatggcattcctgtctcatttggctgaggacaaaaacatatggggcccctttctagtggtggctcctgcatctgttgtgaataactgggctgaggagttgattagattctgccctgacctaaagatacttccttactggggcccagagaggatgattcttcgaaagaacatcaaccccaagcgtttgtatcgcagagatgctagcttccacattcttattacaaactatcagatacttgtgaatgaagagaagcttttgagacgtgttaagtggcaatacatggtactggatgaggcccaggctatcaaaagttcaagcagccagcgctggaagacattactgagctttagctgtagaaatcgtctacttcttactgggacaccaatacagaacaatatggctgagttatgggcacttcttcatttcatcatgcccactctatttgacagccatgaacagttcaacgagtggttctcaaagggtattgagggtcatgctgagcatggaggagctttgaatgaacatcagcttagtagattgcatgctattttgaagcccttcatgctccgccgggttaagattgatgtcattgctgaaatgaccaaaaagaaagaagaaattgttccctgcaaattgagttctcgtcaacaaattttctatcaagctataaaaaataagatctcgcttaacgagttgcttgatggaagtcgtggcaatctaaatgacaagaagttacttagcctgatgaatattgtcatgcagctacggaaggtctgcaatcacccggagctgtttgagcgcaatgagggaagctcttacttttactttgctgatatcccaaactcacttctttctcccccgtttggggcattacaagatgtacattatgcaggcaagagaaatcctataatctttgagatcccaaagttagtttatgatggaatcatctgcaacacagaaaattctggaagcatctgtggatttcagaatggatatttgaacaggttgaagctttcttcctggccacttcatcattctttgagggactagcattttcagtaatgcgatggaataggaactacactgatgaaattatggatgcattccttgattcagaagatactgacatccagttcagtcagaatgattccacaagagttcgtgcagttgcccggttgttgctttcttctacaaaggccaagcccagcttacttaggacaaagattggaactggcccaagtgaaggcccatatgaagcactggtgctttctcatcatgacaggcttgcttcgaacataagggttcttcgttcagcatacacttatattccgccagctagagcaccacctgattctgggaagctccacaccttggatatgctactacggcgccttcgagctgaaggtcaccgtgtgcttctttttgctcagatgactaaaatgctggacattcttgaggattacatgaattttagaaaattcaagtatttcagacttgatgggtcttctgcaatctcagaccgccgtgacatggtccgagctttccagaacaggaatgatgtatttgttttcttgttaagcacaagagctggggggcttggtattaatttgactgctgctgatactgttattttttatgaaattgactggaatccaacacaagaccagcaggcaatggatagaacacacagacttggtcaaacaaaggaggtaactgtgtacaggcttatatgcaaagatactatcgaggagaaaatattgcaaagagcaaagcagaaaaatgcagtgcaagagttggttatgaaggggaaacatgttcaggacgatcatttgttgagacaagaggatgttgtttcattacttattgatgacacacaaattgcacataagttgaaagaaatatccatgcaggtaaacatcaca

SEQ ID NO: 1725 - DNA, 4350 bp, Zea Mays
cctccctccacctccgcctccttccccaccccccttccgcttccgcccacaaccctaaccttaatcccgtcgccgccgtagccgcggaccgactgggccgactcccgcaccgcgccttcggcgttatattcggtccctgcgttctctctctccggttccccacctcccgcggcgagccggggcgctagggttttctacatggatccgcgccgcgcacccccgcggggcggcggcgggctctcttactccacgctgttcaacctcgagcctttgcagaacttaagggttcctgtaccagaaaatctcgcccgctacgggaacagcagctcaaatgggagtccaagcagtcaaggatccttgttggatcagtacaatggtgtacatgatgcttcccatggcttgcatcggaagcgaaaaaagcaccctgatggtgccggcgatgatgatcatgcagatgcctatagtaacaaaatgatggaggatcactaccgtgcgatgctcagtgaacatgtccagaagtaccgaaggtcaaagtttaaggagggtgcttttatttccgatccttctcaggtggcaatcccccaaataaaacacaaaaacggtggtaaaaaagttatgaagcacattagtaatttcagggatattgcggcattaaatgggatagaagcttcacatgagtataattggatagaatgtattgaaactcatggtggttttaataagcttgtagcatccgttgattccacctatttagatatgggggataatatacactacttagttccagagggttatgataagttagcattatcccttaacctccctatttcttctgatatacgtgttgaggagcacttcttgaagggcgcactagatttgtgcaccctatcagcaatgcttggtactgaccaaaggtttgaggcttccagccatggtggattatctgaacccctgccacaatttgaatctctcaaggaaagggtaaaggtgcagaaattttctcttcaagttaccgaggacccctttgcaattccggaaggagcagctgggaggatacgaaggtctattatatcagaaactggcaatttgcaggtccattacgtcaaagtcttggaaaaaggagatacatatgagattattgagcgcagcttaccaaagaagcaaatagtaaagaaggaaccttttgtaatcgtgaaagaagagtctgaaaagacttacaaactctggcagtatcttgctactaaaagcattccaaagcatcacaggaattttacttctttgatgaagaaacgacaagtagatgcgaagcgcttctctgatagttgtcaacgagaggtaaaattcaaagtaaggaggtcactgaaactgatgagatgtgctgcaatacgtacaaggcagttggctagggatatgctgatattttggaaacgagtagacaaagagcagtatgagttgagaaaaaaagaggaaagagaagctgctgaagctttaaaacgtgaggaggagcttcgtgaagccaaaagacaacaacagaggctaaactttctgctgtcacaaacggagctttatagtcatttcatgcagaacaaggctggtggctcagcgccacctgatgaggaagatgtccctgatgaagatgaggaagaagatcctgaagaagctcaattgaaaagagaggccttgagggcagctcagcatgccgtttctcaacaaaagatgaggactaatgcatttgatagtgaaactgtgaggcttcgtcaaacttctgagtctgttcttccaactgatgattcatctagcatggatcctagtaagattgatctattacacccttcaacaatgcctgagaagtcatctgtgcaaacaccagagttgtttaagggtgtattaaaagaatatcagttaaaaggcttacaatggctggttaattgttatgaacaggggttgaatggcattcttgctgatgagatgggtcttggcaaaactgttcaggctatggcattcctgtctcatttggctgaggacaaaaacatatggggcccctttctagtggtggctcctgcatctgttgtgaataactgggctgaggagttgattagattctgccctgacctaaagatacttccttactggggcccagagaggatgattcttcgaaagaacatcaaccccaagcgtttgtatcgcagagatgctagcttccacattcttattacaaactatcagatacttgtgaatgaagagaagcttttgagacgtgttaagtggcaatacatggtactggatgaggcccaggctatcaaaagttcaagcagccagcgctggaagacattactgagctttagctgtagaaatcgtctacttcttactgggacaccaatacagaacaatatggctgagttatgggcacttcttcatttcatcatgcccactctatttgacagccatgaacagttcaacgagtggttctcaaagggtattgagggtcatgctgagcatggaggagctttgaatgaacatcagcttagtagattgcatgctattttgaagcccttcatgctccgccgggttaagattgatgtcattgctgaaatgaccaaaaagaaagaagaaattgttccctgcaaattgagttctcgtcaacaaattttctatcaagctataaaaaataagatctcgcttaacgagttgcttgatggaagtcgtggcaatctaaatgacaagaagttacttagcctgatgaatattgtcatgcagctacggaaggtctgcaatcacccggagctgtttgagcgcaatgagggaagctcttacttttactttgctgatatcccaaactcacttctttctcccccgtttggggcattacaagatgtacattatgcaggcaagagaaatcctataatctttgagatcccaaagttagtttatgatggaatcatctgcaacacagaaaattctggaagcatctgtggatttcagaatggatatttgaacaggttgtttaatatatttttgccaagcaatatccatcgctcagccattccagaagttaattcatcaaatgagtctgttttatcatctggtgcatttggctttacacgtttgtcaaacctgtgcccagttgaagctttcttcctggccacttcatcattctttgagggactagcattttcagtaatgcgatggaataggaactacactgatgaaattatggatgcattccttgattcagaagatactgacatccagttcagtcagaatgattccacaagagttcgtgcagttgcccggttgttgctttcttctacaaaggccaagcccagcttacttaggacaaagattggaactggcccaagtgaaggcccatatgaagcactggtgctttctcatcatgacaggcttgcttcgaacataagggttcttcgttcagcatacacttatattccgccagctagagcaccacctataaatgtttcatgtgctgatcgaaattttgcctataagttcactgatgagatgtatgatccttgggtcatgaaactgttcctgggatttgctcgtacttccgagttcaatggtcctagacaaccagttgctcttcatcctttgatacaagaactcaatactgatttgcctatccttgagccgatgctgcagctaccctataggatatttgggtcttctccaccgatgagtaattttgatccagctaaaatgctcactgattctgggaagctccacaccttggatatgctactacggcgccttcgagctgaaggtcaccgtgtgcttctttttgctcagatgactaaaatgctggacattcttgaggattacatgaattttagaaaattcaagtatttcagacttgatgggtcttctgcaatctcagaccgccgtgacatggtccgagctttccagaacaggaatgatgtatttgttttcttgttaagcacaagagctggggggcttggtattaatttgactgctgctgatactgttattttttatgaaattgactggaatccaacacaagaccagcaggcaatggatagaacacacagacttggtcaaacaaaggaggtaactgtgtacaggcttatatgcaaagatactatcgaggagaaaatattgcaaagagcaaagcagaaaaatgcagtgcaagagttggttatgaaggggaaacatgttcaggacgatcatttgttgagacaagaggatgttgtttcattacttattgatgacacacaaattgcacataagttgaaagaaatatccatgcagccttagaggattgcccatgcagagaggattggacttacaatggcaactgggagtctctggatc

SEQ ID NO: 1726 - DNA, 4315 bp, Zea Mays
cctccacctccgcctccttccccaccccccttccgcttccgcccacaaccctaaccttaatcccgtcgccgccgtagccgcggaccgactgggccgactcccgcaccgcgccttcggcgttatattcggtccctgcgttctctctctccggttccccacctcccgcggcgagccggggcgctagggttttctacatggatccgcgccgcgcacccccgcggggcggcggcgggctctcttactccacgctgttcaacctcgagcctttgcagaacttaagggttcctgtaccagaaaatctcgcccgctacgggaacagcagctcaaatgggagtccaagcagtgaggcttctcctttttaggtcaaggatccttgttggatcagtacaatggtgtacatgatgcttcccatggcttgcatcggaagcgaaaaaagcaccctgatggtgccggcgatgatgatcatgcagatgcctatagtaacaaaatgatggaggatcactaccgtgcgatgctcagtgaacatgtccagaagtaccgaaggtcaaagtttaaggagggtgcttttatttccgatccttctcaggtggcaatcccccaaataaaacacaaaaacggtggtaaaaaagttatgaagcacattagtaatttcagggatattgcggcattaaatgggatagaagcttcacatgagtataattggatagaatgtattgaaactcatggtggttttaataagcttgtagcatccgttgattccacctatttagatatgggggataatatacactacttagttccagagggttatgataagttagcattatcccttaacctccctatttcttctgatatacgtgttgaggagcacttcttgaagggcgcactagatttgtgcaccctatcagcaatgcttggtactgaccaaaggtttgaggcttccagccatggtggattatctgaacccctgccacaatttgaatctctcaaggaaagggtaaaggtgcagaaattttctcttcaagttaccgaggacccctttgcaattccggaaggagcagctgggaggatacgaaggtctattatatcagaaactggcaatttgcaggtccattacgtcaaagtcttggaaaaaggagatacatatgagattattgagcgcagcttaccaaagaagcaaatagtaaagaaggaaccttttgtaatcgtgaaagaagagtctgaaaagacttacaaactctggcagtatcttgctactaaaagcattccaaagcatcacaggaattttacttctttgatgaagaaacgacaagtagatgcgaagcgcttctctgatagttgtcaacgagaggtaaaattcaaagtaaggaggtcactgaaactgatgagatgtgctgcaatacgtacaaggcagttggctagggatatgctgatattttggaaacgagtagacaaagagcagtatgagttgagaaaaaaagaggaaagagaagctgctgaagctttaaaacgtgaggaggagcttcgtgaagccaaaagacaacaacagaggctaaactttctgctgtcacaaacggagctttatagtcatttcatgcagaacaaggctggtggctcagcgccacctgatgaggaagatgtccctgatgaagatgaggaagaagatcctgaagaagctcaattgaaaagagaggccttgagggcagctcagcatgccgtttctcaacaaaagatgaggactaatgcatttgatagtgaaactgtgaggcttcgtcaaacttctgagtctgttcttccaactgatgattcatctagcatggatcctagtaagattgatctattacacccttcaacaatgcctgagaagtcatctgtgcaaacaccagagttgtttaagggtgtattaaaagaatatcagttaaaaggcttacaatggctggttaattgttatgaacaggggttgaatggcattcttgctgatgagatgggtcttggcaaaactgttcaggctatggcattcctgtctcatttggctgaggacaaaaacatatggggcccctttctagtggtggctcctgcatctgttgtgaataactgggctgaggagttgattagattctgccctgacctaaagatacttccttactggggcccagagaggatgattcttcgaaagaacatcaaccccaagcgtttgtatcgcagagatgctagcttccacattcttattacaaactatcagatacttgtgaatgaagagaagcttttgagacgtgttaagtggcaatacatggtactggatgaggcccaggctatcaaaagttcaagcagccagcgctggaagacattactgagctttagctgtagaaatcgtctacttcttactgggacaccaatacagaacaatatggctgagttatgggcacttcttcatttcatcatgcccactctatttgacagccatgaacagttcaacgagtggttctcaaagggtattgagggtcatgctgagcatggaggagctttgaatgaacatcagcttagtagattgcatgctattttgaagcccttcatgctccgccgggttaagattgatgtcattgctgaaatgaccaaaaagaaagaagaaattgttccctgcaaattgagttctcgtcaacaaattttctatcaagctataaaaaataagatctcgcttaacgagttgcttgatggaagtcgtggcaatctaaatgacaagaagttacttagcctgatgaatattgtcatgcagctacggaaggtctgcaatcacccggagctgtttgagcgcaatgagggaagctcttacttttactttgctgatatcccaaactcacttctttctcccccgtttggggcattacaagatgtacattatgcaggcaagagaaatcctataatctttgagatcccaaagttagtttatgatggaatcatctgcaacacagaaaattctggaagcatctgtggatttcagaatggatatttgaacaggttgtttaatatatttttgccaagcaatatccatcgctcagccattccagaagttaattcatcaaatgagtctgttttatcatctggtgcatttggctttacacgtttgtcaaacctgtgcccagttgaagctttcttcctggccacttcatcattctttgagggactagcattttcagtaatgcgatggaataggaactacactgatgaaattatggatgcattccttgattcagaagatactgacatccagttcagtcagaatgattccacaagagttcgtgcagttgcccggttgttgctttcttctacaaaggccaagcccagcttacttaggacaaagattggaactggcccaagtgaaggcccatatgaagcactggtgctttctcatcatgacaggcttgcttcgaacataagggttcttcgttcagcatacacttatattccgccagctagagcaccacctataaatgtttcatgtgctgatcgaaattttgcctataagttcactgatgagatgtatgatccttgggtcatgaaactgttcctgggatttgctcgtacttccgagttcaatggtcctagacaaccagttgctcttcatcctttgatacaagaactcaatactgatttgcctatccttgagccgatgctgcagctaccctataggatatttgggtcttctccaccgatgagtaattttgatccagctaaaatgctcactgattctgggaagctccacaccttggatatgctactacggcgccttcgagctgaaggtcaccgtgtgcttctttttgctcagatgactaaaatgctggacattcttgaggattacatgaattttagaaaattcaagtatttcagacttgatgggtcttctgcaatctcagaccgccgtgacatggtccgagctttccagaacaggaatgatgtatttgttttcttgttaagcacaagagctggggggcttggtattaatttgactgctgctgatactgttattttttatgaaattgactggaatccaacacaagaccagcaggcaatggatagaacacacagacttggtcaaacaaaggaggtaactgtgtacaggcttatatgcaaagatactatcgaggagaaaatattgcaaagagcaaagcagaaaaatgcagtgcaagagttggttatgaaggggaaacatgttcaggacgatcatttgttgagacaagaggatgttgtttcattacttattgatgacacacaaattgcacataagttgaaagaaatatccatgcaggtaaacatcaca

SEQ ID NO: 1727 - DNA, 3705 bp, Zea Mays
atggatccgcgccgcgcacccccgcggggcggcggcgggctctcttactccacgctgttcaacctcgagcctttgcagaacttaagggttcctgtaccagaaaatctcgcccgctacgggaacagcagctcaaatgggagtccaagcagtgagggtcaaggatccttgttggatcagtacaatggtgtacatgatgcttcccatggcttgcatcggaagcgaaaaaagcaccctgatggtgccggcgatgatgatcatgcagatgcctatagtaacaaaatgatggaggatcactaccgtgcgatgctcagtgaacatgtccagaagtaccgaagccatggtggattatctgaacccctgccacaatttgaatctctcaaggaaagggtaaaggtgcagaaattttctcttcaagttaccgaggacccctttgcaattccggaaggagcagctgggaggatacgaaggtctattatatcagaaactggcaatttgcaggtccattacgtcaaagtcttggaaaaaggagatacatatgagattattgagcgcagcttaccaaagaagcaaatagtaaagaaggaaccttttgtaatcgtgaaagaagagtctgaaaagacttacaaactctggcagtatcttgctactaaaagcattccaaagcatcacaggaattttacttctttgatgaagaaacgacaagtagatgcgaagcgcttctctgatagttgtcaacgagaggtaaaattcaaagtaaggaggtcactgaaactgatgagatgtgctgcaatacgtacaaggcagttggctagggatatgctgatattttggaaacgagtagacaaagagcagtatgagttgagaaaaaaagaggaaagagaagctgctgaagctttaaaacgtgaggaggagcttcgtgaagccaaaagacaacaacagaggctaaactttctgctgtcacaaacggagctttatagtcatttcatgcagaacaaggctggtggctcagcgccacctgatgaggaagatgtccctgatgaagatgaggaagaagatcctgaagaagctcaattgaaaagagaggccttgagggcagctcagcatgccgtttctcaacaaaagatgaggactaatgcatttgatagtgaaactgtgaggcttcgtcaaacttctgagtctgttcttccaactgatgattcatctagcatggatcctagtaagattgatctattacacccttcaacaatgcctgagaagtcatctgtgcaaacaccagagttgtttaagggtgtattaaaagaatatcagttaaaaggcttacaatggctggttaattgttatgaacaggggttgaatggcattcttgctgatgagatgggtcttggcaaaactgttcaggctatggcattcctgtctcatttggctgaggacaaaaacatatggggcccctttctagtggtggctcctgcatctgttgtgaataactgggctgaggagttgattagattctgccctgacctaaagatacttccttactggggcccagagaggatgattcttcgaaagaacatcaaccccaagcgtttgtatcgcagagatgctagcttccacattcttattacaaactatcagatacttgtgaatgaagagaagcttttgagacgtgttaagtggcaatacatggtactggatgaggcccaggctatcaaaagttcaagcagccagcgctggaagacattactgagctttagctgtagaaatcgtctacttcttactgggacaccaatacagaacaatatggctgagttatgggcacttcttcatttcatcatgcccactctatttgacagccatgaacagttcaacgagtggttctcaaagggtattgagggtcatgctgagcatggaggagctttgaatgaacatcagcttagtagattgcatgctattttgaagcccttcatgctccgccgggttaagattgatgtcattgctgaaatgaccaaaaagaaagaagaaattgttccctgcaaattgagttctcgtcaacaaattttctatcaagctataaaaaataagatctcgcttaacgagttgcttgatggaagtcgtggcaatctaaatgacaagaagttacttagcctgatgaatattgtcatgcagctacggaaggtctgcaatcacccggagctgtttgagcgcaatgagggaagctcttacttttactttgctgatatcccaaactcacttctttctcccccgtttggggcattacaagatgtacattatgcaggcaagagaaatcctataatctttgagatcccaaagttagtttatgatggaatcatctgcaacacagaaaattctggaagcatctgtggatttcagaatggatatttgaacaggttgtttaatatatttttgccaagcaatatccatcgctcagccattccagaagttaattcatcaaatgagtctgttttatcatctggtgcatttggctttacacgtttgtcaaacctgtgcccagttgaagctttcttcctggccacttcatcattctttgagggactagcattttcagtaatgcgatggaataggaactacactgatgaaattatggatgcattccttgattcagaagatactgacatccagttcagtcagaatgattccacaagagttcgtgcagttgcccggttgttgctttcttctacaaaggccaagcccagcttacttaggacaaagattggaactggcccaagtgaaggcccatatgaagcactggtgctttctcatcatgacaggcttgcttcgaacataagggttcttcgttcagcatacacttatattccgccagctagagcaccacctataaatgtttcatgtgctgatcgaaattttgcctataagttcactgatgagatgtatgatccttgggtcatgaaactgttcctgggatttgctcgtacttccgagttcaatggtcctagacaaccagttgctcttcatcctttgatacaagaactcaatactgatttgcctatccttgagccgatgctgcagctaccctataggatatttgggtcttctccaccgatgagtaattttgatccagctaaaatgctcactgattctgggaagctccacaccttggatatgctactacggcgccttcgagctgaaggtcaccgtgtgcttctttttgctcagatgactaaaatgctggacattcttgaggattacatgaattttagaaaattcaagtatttcagacttgatgggtcttctgcaatctcagaccgccgtgacatggtccgagctttccagaacaggaatgatgtatttgttttcttgttaagcacaagagctggggggcttggtattaatttgactgctgctgatactgttattttttatgaaattgactggaatccaacacaagaccagcaggcaatggatagaacacacagacttggtcaaacaaaggaggtaactgtgtacaggcttatatgcaaagatactatcgaggagaaaatattgcaaagagcaaagcagaaaaatgcagtgcaagagttggttatgaaggggaaacatgttcaggacgatcatttgttgagacaagaggatgttgtttcattacttattgatgacacacaaattgcacataagttgaaagaaatatccatgcaggtaaacatcaca

SEQ ID NO: 1728 - DNA, 2075 bp, Zea Mays
tcattctctagggagctcttggagatgctctaagaattgtggaaaccacaaaacggcagaagtttaggaagccataatatcgttgaacactaggctcatttggctgagctccggcttaggattatctagctcgaaagtcgatcttttaatagagtgatttcgagtgattctctagcaaaaccgaatctatttgacgaaaattgtttgataaataggttgtgaagtgatttttgaggaattagagagtgtggagcaggttgagagcggtgggacgccttcttaaacggtgggtgttaccacttcctcgcagatcgagctccaaaccactgatggcaaacctgctagcacatcagttggtgtatgagctgagctccccacgagcatggatgctcctcctcttctgcgtcttggtcgcatatgcacgctactctttggccacgttcagtgccaagagagcgaggaacaggatgcaggcgcaagcgcagcaccacgtccacgatgacaactacaacaacctgctcccaccgccttcgcctccggctctgcccgtcttgggccacctccacctcgttggttcgctcccccacgtctccctccgcaggctcgccaggaagcactgctccgacgtcatgctcctccgcctcggcgccatgccggtgctcgtcgtgtcgtcgccgcgcgccgccgaggcggtgctgcggacgcacgaccgcgtgtgcgcgtcccggccgtactccctcgtgggcgaggtggtcatgtacgggtcctccgacgtcggcttcgcgccgtacggggactactggcggcggaccaggaagctcatcaccacgcacctgctcaccgtaaggagggtgcaggcgctccgcatcgcccgcgaagaagaggtgagcgcggtgatggccaggattggcgaggctgcagcggcaggagcggcggtggacatgggtgagctgctcggctcgtatgccaacgacctgtcgtgccgcgcagtcatgggcaagtccttccggggcgagggccgaaacaagctgttccgggagctcgtcagcgacacctcgccgctgctgggcggcttcaacgttgaggagttcttcccgttcctggctcgcttcggcgtgctcagtcgggcggtccgcgccaaatctgaggggttgaggaggcggtgggacgaacagctggacaggattattcaggaccacgaatcaacggcgacggcgagaagtcctagcaacgacgacgaggatgatgacttcatacataccttgctcaccgttcgacacgagacgtgttcttcgggggaataagcacagcagccacggcactcgaattcaccgtcgctgagctcatgcggaacccagatgcaatgaggaaactgcaagccgaggtacggagcgtagtacccaagggacaaggtcccgtcagcaacgacagcctgcgcgacatggcctacctgaaagcggtgataaaggagtcgctccggctacacccgccgacgccgatcctgacggcgcacttcaccatggccagctgcagcgtcgacgggttcgcggtgccggccggcgtgagcgtcctggtcaactcctgggctatctccacggacgcgcgtttctgggaggacccggaggccttcgtgcccgagaggttcttcggcggcggcggcgcggcgggcgttgacttcaggggggccgacttccggctcctgccctttggctcctgccgtcccaaagctgacggtcgtcagtctttgccgagagccaacgactgacactcggcaaagaggctttgccgagatgccaagttcacgaccatgtttagtgagcatgttgctcgaagttttcggtacgcttctgcaatcggtcgtaacttatgctaagtaacatgaatatcattttttcatgcacggttttccaagtttcgagtgacctgcagttcaaatttgaattttccgaagaaattcaaataaacgaactaaatctactaacgattgaaactatgttataattgtccataaatgatacatgtaggtctacatagtgtaggaacataccacaaaaagtttgggagacaaaataaaa

SEQ ID NO: 1729 - DNA, 3268 bp, Zea Mays
cggatgtcaaatttaaatggtaaaaataaaaaaaagtatacacaattgttagctctaaactaacttacgttttagaacacatgttcggtcacttagctaaataaaaaagcgagactgcgaggttccttgtcggtgttgtccgctcgtcaatcgtcctccttcgggcttcggcacagcaagcaccacccccttcgccaccgccaccatcaccgctaccgctacggcttcccacctcaaaaccctaaccctaaaccccctccgcgcgggagccctcgcccatggagaaccccaggccccaggccccagcactcacccctcccatggccccgctccccgtccccatccacccgccaatcgccccaatccccgtccctccgccccgcgtgcccgcccccgccccagccgccgccgcttccatggcctccacacccactccctccactggggacggaggcgaggccgagtacgaagtctccgacgaccaccgcgccgcgcgggagcgccacgagcgcgcggtgcaggagctcctccagcggcgccgcgcctacgccatggccgtacccaccaacgactccgctgtgcgggcccgcctccgccgcctcggcgagcccatcacgctattcggcgagcgcgagatggagcgccgcgaccgcctccgagccctcatggtccggctcgaggccgatggccaggtcgaccgtctcctccgcgcgcaggaggacgaccaggccgcgcgcatcggcgaggaggaggaggaggagcagatcgagtaccccttcttcaccgagggctcgcaggagcttctcaaggcgcgccttgacattgcacggtactcgctgccccgtgccaaggccaggatcgagagggccaagcgacgccacgaggaccctgatgaggatccagaggcggaggccgaactcgtcgtcaagcaggccggggagtttgtgctcgagtgcagtgagattggagatgatcgcccgctcactggctgttccttctctcgtgatgcatcgatgctcgccacaagggaagatctggtgcagcggcgagagctatctcattgagtcatcaagtcgtgggtgccaagcagtttctctgcatttgtgggggaaggaggattgtcacggtttatccctttcccagaccccactcatgtgggagcctccaacattgggtttgcccttgctgtaatttttttgttggaagtccatatcagtggcgagagctatctcattgagtcagcaagtcgtgggtccaaagcagtttctctgcatttgcggggaaatgattgcctcggtttatccttttcccagaccccactcatgtgggagcctccaacattggtcctgcttgagcttaattgagattagtttctcaccgcaagagaactgcaactagtaagttcatatatgacattcaaaaaattcagcatctgtccatctgatcacttgggaactaactaagtcagctgtagtttcgatttttagtatctgaagtcactgggctgctaggaagccaggatcaggtattcaggtttgcttttcttctagtggatagagaatgaccaacatattatcaatccaaaattcccgtttggaacttgtatccctacccaatgcacataattctccctttttaacaaaccttggtagaacataaagctgaagttagacatctgtactgtcccccgtggtattgagtattatcaaaataacagcaataagaccatgttcagcgatatttaccttgagccgttaattgaaatcagttagcagttcgtatgcacagaaataagattgttaactgaagttaaacaacttatctatgttaccagtgtcatgtgcaactagttgcttattaaatgttatgatgtctatcatatatttacatttgttttgagctttaacatggtagattatgttctcgtactcttgcttccttttcaggaaataaccatttgcttatccacattgtgtagttcctggagtggaatagtcaaagtatggagcatgccacaaataactaaggttgcaaccttgaaaggtcacacagaacgtgcaactgatgttgtcttctctcctgctgatgactgcttagcaacagcttcagctgatagaactgcaaaattatggaaaccagatgggtcacttttgatgtcttttgatggccaccttgatcgtcttgctcgccttgcttttcatccatctggaaagtaccttggtacagctagctttgacaagacttggagattgtgggacatcaatactggcaaggaactgctactccaagaggggcacagcagaagtgtatatggagttagctttcaccctgatggttctttggcagcatcttgtggtcttgatgcatatgctcgagtatgggatctgagatctggaagattgttctttacactcaagggccatgtgaaacctgtcctaggagtcagcttctctcctaatggttatctggttgcaactggaagtgaagacaatttctgtcggatatgggatttgaggaaaaggcaaatgttgtattctattccagctcataagagtattatttcacatgtgaaatttgaaccccaagaagggtattatttagcgacttcttcctatgacaccaaagcagccctgtggtcagctcgtgattacaaaccaatcaaaagtttggtgggccatgagtcgaaggttactagtttggatattagtggagatggacagaagattgtgactgtgtcgcttgatcgtacgataaaaatttggtcatgcagaagtagcacacaagataatgagatggaactggattgagacaattgggttcattgttgccagccccgcttctctattcatcagctagaagtagatattctccctttttgctgatcagacattccaatcagtcattggtgctattgcacggaactatttcatagcatgtataaacccttggcttgagaaatatgttctgcacttactttgctgatattccttgtcatatactagggctagtttggctaccccattttttaagggattttcatttttctaacgacccgtttggatcattagaatttaacaatagtaattttggcatatattaattaagctaattcagttttatacaaaatatatttatatattattttagtaagatgtcagagatatttatgtgctacatttttactatagaggattgggacgaaaagtgtcatgtaagttatagagtagaaacaaattttactgatacataaaatcatttttcatatcat

SEQ ID NO: 1730 - DNA, 3259 bp, Zea Mays
cgagactgcgaggttccttgtcggtgttgtccgctcgtcaatcgtcctccttcgggcttcggcacagcaagcaccacccccttcgccaccgccaccatcaccgctaccgctacggcttcccacctcaaaaccctaaccctaaaccccctccgcgcgggagccctcgcccatggagaaccccaggccccaggccccagcactcacccctcccatggccccgctccccgtccccatccacccgccaatcgccccaatccccgtccctccgccccgcgtgcccgcccccgccccagccgccgccgcttccatggcctccacacccactccctccactggggacggaggcgaggccgagtacgaagtctccgacgaccaccgcgccgcgcgggagcgccacgagcgcgcggtgcaggagctcctccagcggcgccgcgcctacgccatggccgtacccaccaacgactccgctgtgcgggcccgcctccgccgcctcggcgagcccatcacgctattcggcgagcgcgagatggagcgccgcgaccgcctccgagccctcatggtccggctcgaggccgatggccaggtcgaccgtctcctccgcgcgcaggaggacgaccaggccgcgcgcatcggcgaggaggaggaggaggagcagatcgagtaccccttcttcaccgagggctcgcaggagcttctcaaggcgcgccttgacattgcacggtactcgctgccccgtgccaaggccaggatcgagagggccaagcgacgccacgaggaccctgatgaggatccagaggcggaggccgaactcgtcgtcaagcaggccggggagtttgtgctcgagtgcagtgagattggagatgatcgcccgctcactggctgttccttctctcgtgatgcatcgatgctcgccacaagtgttttttttttgttgttgaagggaagatctggtgcagcggcgagagctatctcattgagtcatcaagtcgtgggtgccaagcagtttctctgcatttgtgggggaaggaggattgtcacggtttatccctttcccagaccccactcatgtgggagcctccaacattgggtttgcccttgctgtaatttttttgttggaagtccatatcagtggcgagagctatctcattgagtcagcaagtcgtgggtccaaagcagtttctctgcatttgcggggaaatgattgcctcggtttatccttttcccagaccccactcatgtgggagcctccaacattgggtttgcccttgctgcaatttttttgttggaagtccatgtttagtcaatttatttatgatggatttatgcactgtgcagtcctgcttgagcttaattgagattagtttctcaccgcaagagaactgcaactagtaagttcatatatgacattcaaaaaattcagcatctgtccatctgatcacttgggaactaactaagtcagctgtagtttcgatttttagtatctgaagtcactgggctgctaggaagccaggatcaggtattcaggtttgcttttcttctagtggatagagaatgaccaacatattatcaatccaaaattcccgtttggaacttgtatccctacccaatgcacataattctccctttttaacaaaccttggtagaacataaagctgaagttagacatctgtactgtcccccgtggtattgagtattatcaaaataacagcaataagaccatgttcagcgatatttaccttgagccgttaattgaaatcagttagcagttcgtatgcacagaaataagattgttaactgaagttaaacaacttatctatgttaccagtgtcatgtgcaactagttgcttattaaatgttatgatgtctatcatatatttacatttgttttgagctttaacatggtagattatgttctcgtactcttgcttccttttcaggaaataaccatttgcttatccacattgtgtagttcctggagtggaatagtcaaagtatggagcatgccacaaataactaaggttgcaaccttgaaaggtcacacagaacgtgcaactgatgttgtcttctctcctgctgatgactgcttagcaacagcttcagctgatagaactgcaaaattatggaaaccagatgggtcacttttgatgtcttttgatggccaccttgatcgtcttgctcgccttgcttttcatccatctggaaagtaccttggtacagctagctttgacaagacttggagattgtgggacatcaatactggcaaggaactgctactccaagaggggcacagcagaagtgtatatggagttagctttcaccctgatggttctttggcagcatcttgtggtcttgatgcatatgctcgagtatgggatctgagatctggaagattgttctttacactcaagggccatgtgaaacctgtcctaggagtcagcttctctcctaatggttatctggttgcaactggaagtgaagacaatttctgtcggatatgggatttgaggaaaaggcaaatgttgtattctattccagctcataagagtattatttcacatgtgaaatttgaaccccaagaagggtattatttagcgacttcttcctatgacaccaaagcagccctgtggtcagctcgtgattacaaaccaatcaaaagtttggtgggccatgagtcgaaggttactagtttggatattagtggagatggacagaagattgtgactgtgtcgcttgatcgtacgataaaaatttggtcatgcagaagtagcacacaagataatgagatggaactggattgagacaattgggttcattgttgccagccccgcttctctattcatcagctagaagtagatattctccctttttgctgatcagacattccaatcagtcattggtgctattgcacggaactatttcatagcatgtataaacccttggcttgagaaatatgttctgcacttactttgctgatattccttgtcatatactagggctagtttggctaccccattttttaagggattttcatttttctaacgacccgtttggatcattagaatttaacaatagtaattttggcatatattaattaagctaattcagttttatacaaaatatatttatatattattttagtaagatgtcagagatatttatgtgctacatttttactatagaggattgggacgaaaagtgtcatgtaagttatagagtagaaacaaattttactgatacataaaatcatttttcatatcat

SEQ ID NO: 1731 - DNA, 3193 bp, Zea Mays
gtccgctcgtcaatcgtcctccttcgggcttcggcacagcaagcaccacccccttcgccaccgccaccatcaccgctaccgctacggcttcccacctcaaaaccctaaccctaaaccccctccgcgcgggagccctcgcccatggagaaccccaggccccaggccccagcactcacccctcccatggccccgctccccgtccccatccacccgccaatcgccccaatccccgtccctccgccccgcgtgcccgcccccgccccagccgccgccgcttccatggcctccacacccactccctccactggggacggaggcgaggccgagtacgaagtctccgacgaccaccgcgccgcgcgggagcgccacgagcgcgcggtgcaggagctcctccagcggcgccgcgcctacgccatggccgtacccaccaacgactccgctgtgcgggcccgcctccgccgcctcggcgagcccatcacgctattcggcgagcgcgagatggagcgccgcgaccgcctccgagccctcatggtccggctcgaggccgatggccaggtcgaccgtctcctccgcgcgcaggaggacgaccaggccgcgcgcatcggcgaggaggaggaggaggagcagatcgagtaccccttcttcaccgagggctcgcaggagcttctcaaggcgcgccttgacattgcacggtactcgctgccccgtgccaaggccaggatcgagagggccaagcgacgccacgaggaccctgatgaggatccagaggcggaggccgaactcgtcgtcaagcaggccggggagtttgtgctcgagtgcagtgagattggagatgatcgcccgctcactggctgttccttctctcgtgatgcatcgatgctcgccacaagcggcgagagctatctcattgagtcatcaagtcgtgggtgccaagcagtttctctgcatttgtgggggaaggaggattgtcacggtttatccctttcccagaccccactcatgtgggagcctccaacattgggtttgcccttgctgtaatttttttgttggaagtccatatcagtggcgagagctatctcattgagtcagcaagtcgtgggtccaaagcagtttctctgcatttgcggggaaatgattgcctcggtttatccttttcccagaccccactcatgtgggagcctccaacattgggtttgcccttgctgcaatttttttgttggaagtccatgtttagtcaatttatttatgatggatttatgcactgtgcagtcctgcttgagcttaattgagattagtttctcaccgcaagagaactgcaactagtaagttcatatatgacattcaaaaaattcagcatctgtccatctgatcacttgggaactaactaagtcagctgtagtttcgatttttagtatctgaagtcactgggctgctaggaagccaggatcaggtattcaggtttgcttttcttctagtggatagagaatgaccaacatattatcaatccaaaattcccgtttggaacttgtatccctacccaatgcacataattctccctttttaacaaaccttggtagaacataaagctgaagttagacatctgtactgtcccccgtggtattgagtattatcaaaataacagcaataagaccatgttcagcgatatttaccttgagccgttaattgaaatcagttagcagttcgtatgcacagaaataagattgttaactgaagttaaacaacttatctatgttaccagtgtcatgtgcaactagttgcttattaaatgttatgatgtctatcatatatttacatttgttttgagctttaacatggtagattatgttctcgtactcttgcttccttttcaggaaataaccatttgcttatccacattgtgtagttcctggagtggaatagtcaaagtatggagcatgccacaaataactaaggttgcaaccttgaaaggtcacacagaacgtgcaactgatgttgtcttctctcctgctgatgactgcttagcaacagcttcagctgatagaactgcaaaattatggaaaccagatgggtcacttttgatgtcttttgatggccaccttgatcgtcttgctcgccttgcttttcatccatctggaaagtaccttggtacagctagctttgacaagacttggagattgtgggacatcaatactggcaaggaactgctactccaagaggggcacagcagaagtgtatatggagttagctttcaccctgatggttctttggcagcatcttgtggtcttgatgcatatgctcgagtatgggatctgagatctggaagattgttctttacactcaagggccatgtgaaacctgtcctaggagtcagcttctctcctaatggttatctggttgcaactggaagtgaagacaatttctgtcggatatgggatttgaggaaaaggcaaatgttgtattctattccagctcataagagtattatttcacatgtgaaatttgaaccccaagaagggtattatttagcgacttcttcctatgacaccaaagcagccctgtggtcagctcgtgattacaaaccaatcaaaagtttggtgggccatgagtcgaaggttactagtttggatattagtggagatggacagaagattgtgactgtgtcgcttgatcgtacgataaaaatttggtcatgcagaagtagcacacaagataatgagatggaactggattgagacaattgggttcattgttgccagccccgcttctctattcatcagctagaagtagatattctccctttttgctgatcagacattccaatcagtcattggtgctattgcacggaactatttcatagcatgtataaacccttggcttgagaaatatgttctgcacttactttgctgatattccttgtcatatactagggctagtttggctaccccattttttaagggattttcatttttctaacgacccgtttggatcattagaatttaacaatagtaattttggcatatattaattaagctaattcagttttatacaaaatatatttatatattattttagtaagatgtcagagatatttatgtgctacatttttactatagaggattgggacgaaaagtgtcatgtaagttatagagtagaaacaaattttactgatacataaaatcatttttcatatcat

SEQ ID NO: 1732 - DNA, 3204 bp, Zea Mays
gtccgctcgtcaatcgtcctccttcgggcttcggcacagcaagcaccacccccttcgccaccgccaccatcaccgctaccgctacggcttcccacctcaaaaccctaaccctaaaccccctccgcgcgggagccctcgcccatggagaaccccaggccccaggccccagcactcacccctcccatggccccgctccccgtccccatccacccgccaatcgccccaatccccgtccctccgccccgcgtgcccgcccccgccccagccgccgccgcttccatggcctccacacccactccctccactggggacggaggcgaggccgagtacgaagtctccgacgaccaccgcgccgcgcgggagcgccacgagcgcgcggtgcaggagctcctccagcggcgccgcgcctacgccatggccgtacccaccaacgactccgctgtgcgggcccgcctccgccgcctcggcgagcccatcacgctattcggcgagcgcgagatggagcgccgcgaccgcctccgagccctcatggtccggctcgaggccgatggccaggtcgaccgtctcctccgcgcgcaggaggacgaccaggccgcgcgcatcggcgaggaggaggaggaggagcagatcgagtaccccttcttcaccgagggctcgcaggagcttctcaaggcgcgccttgacattgcacggtactcgctgccccgtgccaaggccaggatcgagagggccaagcgacgccacgaggaccctgatgaggatccagaggcggaggccgaactcgtcgtcaagcaggccggggagtttgtgctcgagtgcagtgagattggagatgatcgcccgctcactggctgttccttctctcgtgatgcatcgatgctcgccacaagatctggtgcagcggcgagagctatctcattgagtcatcaagtcgtgggtgccaagcagtttctctgcatttgtgggggaaggaggattgtcacggtttatccctttcccagaccccactcatgtgggagcctccaacattgggtttgcccttgctgtaatttttttgttggaagtccatatcagtggcgagagctatctcattgagtcagcaagtcgtgggtccaaagcagtttctctgcatttgcggggaaatgattgcctcggtttatccttttcccagaccccactcatgtgggagcctccaacattgggtttgcccttgctgcaatttttttgttggaagtccatgtttagtcaatttatttatgatggatttatgcactgtgcagtcctgcttgagcttaattgagattagtttctcaccgcaagagaactgcaactagtaagttcatatatgacattcaaaaaattcagcatctgtccatctgatcacttgggaactaactaagtcagctgtagtttcgatttttagtatctgaagtcactgggctgctaggaagccaggatcaggtattcaggtttgcttttcttctagtggatagagaatgaccaacatattatcaatccaaaattcccgtttggaacttgtatccctacccaatgcacataattctccctttttaacaaaccttggtagaacataaagctgaagttagacatctgtactgtcccccgtggtattgagtattatcaaaataacagcaataagaccatgttcagcgatatttaccttgagccgttaattgaaatcagttagcagttcgtatgcacagaaataagattgttaactgaagttaaacaacttatctatgttaccagtgtcatgtgcaactagttgcttattaaatgttatgatgtctatcatatatttacatttgttttgagctttaacatggtagattatgttctcgtactcttgcttccttttcaggaaataaccatttgcttatccacattgtgtagttcctggagtggaatagtcaaagtatggagcatgccacaaataactaaggttgcaaccttgaaaggtcacacagaacgtgcaactgatgttgtcttctctcctgctgatgactgcttagcaacagcttcagctgatagaactgcaaaattatggaaaccagatgggtcacttttgatgtcttttgatggccaccttgatcgtcttgctcgccttgcttttcatccatctggaaagtaccttggtacagctagctttgacaagacttggagattgtgggacatcaatactggcaaggaactgctactccaagaggggcacagcagaagtgtatatggagttagctttcaccctgatggttctttggcagcatcttgtggtcttgatgcatatgctcgagtatgggatctgagatctggaagattgttctttacactcaagggccatgtgaaacctgtcctaggagtcagcttctctcctaatggttatctggttgcaactggaagtgaagacaatttctgtcggatatgggatttgaggaaaaggcaaatgttgtattctattccagctcataagagtattatttcacatgtgaaatttgaaccccaagaagggtattatttagcgacttcttcctatgacaccaaagcagccctgtggtcagctcgtgattacaaaccaatcaaaagtttggtgggccatgagtcgaaggttactagtttggatattagtggagatggacagaagattgtgactgtgtcgcttgatcgtacgataaaaatttggtcatgcagaagtagcacacaagataatgagatggaactggattgagacaattgggttcattgttgccagccccgcttctctattcatcagctagaagtagatattctccctttttgctgatcagacattccaatcagtcattggtgctattgcacggaactatttcatagcatgtataaacccttggcttgagaaatatgttctgcacttactttgctgatattccttgtcatatactagggctagtttggctaccccattttttaagggattttcatttttctaacgacccgtttggatcattagaatttaacaatagtaattttggcatatattaattaagctaattcagttttatacaaaatatatttatatattattttagtaagatgtcagagatatttatgtgctacatttttactatagaggattgggacgaaaagtgtcatgtaagttatagagtagaaacaaattttactgatacataaaatcatttttcatatcat

SEQ ID NO: 1733 - DNA, 3479 bp, Zea Mays
gtccgctcgtcaatcgtcctccttcgggcttcggcacagcaagcaccacccccttcgccaccgccaccatcaccgctaccgctacggcttcccacctcaaaaccctaaccctaaaccccctccgcgcgggagccctcgcccatggagaaccccaggccccaggccccagcactcacccctcccatggccccgctccccgtccccatccacccgccaatcgccccaatccccgtccctccgccccgcgtgcccgcccccgccccagccgccgccgcttccatggcctccacacccactccctccactggggacggaggcgaggccgagtacgaagtctccgacgaccaccgcgccgcgcgggagcgccacgagcgcgcggtgcaggagctcctccagcggcgccgcgcctacgccatggccgtacccaccaacgactccgctgtgcgggcccgcctccgccgcctcggcgagcccatcacgctattcggcgagcgcgagatggagcgccgcgaccgcctccgagccctcatggtccggctcgaggccgatggccaggtcgaccgtctcctccgcgcgcaggaggacgaccaggccgcgcgcatcggcgaggaggaggaggaggagcagatcgagtaccccttcttcaccgagggctcgcaggagcttctcaaggcgcgccttgacattgcacggtactcgctgccccgtgccaaggccaggatcgagagggccaagcgacgccacgaggaccctgatgaggatccagaggcggaggccgaactcgtcgtcaagcaggccggggagtttgtgctcgagtgcagtgagattggagatgatcgcccgctcactggctgttccttctctcgtgatgcatcgatgctcgccacaaggtacttccttttaaccataaggaattaaatgtgcgttgttcttgtatgtctcaaacaattgctgtgacgcaaggatgcagaaacccgttacctattactaaccttatatgtgatttcagaaatgtagttacttctgggtctggcaatacttctaattgtttagcatatcataagggatatccaatatagaaagagctttttttgttgagctgaacaacaatgataaaaaataatctggactactgtagtgttttttttttgttgttgaagggaagatctggtgcagcggcgagagctatctcattgagtcatcaagtcgtgggtgccaagcagtttctctgcatttgtgggggaaggaggattgtcacggtttatccctttcccagaccccactcatgtgggagcctccaacattgggtttgcccttgctgtaatttttttgttggaagtccatatcagtggcgagagctatctcattgagtcagcaagtcgtgggtccaaagcagtttctctgcatttgcggggaaatgattgcctcggtttatccttttcccagaccccactcatgtgggagcctccaacattgggtttgcccttgctgcaatttttttgttggaagtccatgtttagtcaatttatttatgatggatttatgcactgtgcagtcctgcttgagcttaattgagattagtttctcaccgcaagagaactgcaactagtaagttcatatatgacattcaaaaaattcagcatctgtccatctgatcacttgggaactaactaagtcagctgtagtttcgatttttagtatctgaagtcactgggctgctaggaagccaggatcaggtattcaggtttgcttttcttctagtggatagagaatgaccaacatattatcaatccaaaattcccgtttggaacttgtatccctacccaatgcacataattctccctttttaacaaaccttggtagaacataaagctgaagttagacatctgtactgtcccccgtggtattgagtattatcaaaataacagcaataagaccatgttcagcgatatttaccttgagccgttaattgaaatcagttagcagttcgtatgcacagaaataagattgttaactgaagttaaacaacttatctatgttaccagtgtcatgtgcaactagttgcttattaaatgttatgatgtctatcatatatttacatttgttttgagctttaacatggtagattatgttctcgtactcttgcttccttttcaggaaataaccatttgcttatccacattgtgtagttcctggagtggaatagtcaaagtatggagcatgccacaaataactaaggttgcaaccttgaaaggtcacacagaacgtgcaactgatgttgtcttctctcctgctgatgactgcttagcaacagcttcagctgatagaactgcaaaattatggaaaccagatgggtcacttttgatgtcttttgatggccaccttgatcgtcttgctcgccttgcttttcatccatctggaaagtaccttggtacagctagctttgacaagacttggagattgtgggacatcaatactggcaaggaactgctactccaagaggggcacagcagaagtgtatatggagttagctttcaccctgatggttctttggcagcatcttgtggtcttgatgcatatgctcgagtatgggatctgagatctggaagattgttctttacactcaagggccatgtgaaacctgtcctaggagtcagcttctctcctaatggttatctggttgcaactggaagtgaagacaatttctgtcggatatgggatttgaggaaaaggcaaatgttgtattctattccagctcataagagtattatttcacatgtgaaatttgaaccccaagaagggtattatttagcgacttcttcctatgacaccaaagcagccctgtggtcagctcgtgattacaaaccaatcaaaagtttggtgggccatgagtcgaaggttactagtttggatattagtggagatggacagaagattgtgactgtgtcgcttgatcgtacgataaaaatttggtcatgcagaagtagcacacaagataatgagatggaactggattgagacaattgggttcattgttgccagccccgcttctctattcatcagctagaagtagatattctccctttttgctgatcagacattccaatcagtcattggtgctattgcacggaactatttcatagcatgtataaacccttggcttgagaaatatgttctgcacttactttgctgatattccttgtcatatactagggctagtttggctaccccattttttaagggattttcatttttctaacgacccgtttggatcattagaatttaacaatagtaattttggcatatattaattaagctaattcagttttatacaaaatatatttatatattattttagtaagatgtcagagatatttatgtgctacatttttactatagaggattgggacgaaaagtgtcatgtaagttatagagtagaaacaaattttactgatacataaaatcatttttcatatcat

SEQ ID NO: 1734 - DNA, 2679 bp, Zea Mays
gtccgctcgtcaatcgtcctccttcgggcttcggcacagcaagcaccacccccttcgccaccgccaccatcaccgctaccgctacggcttcccacctcaaaaccctaaccctaaaccccctccgcgcgggagccctcgcccatggagaaccccaggccccaggccccagcactcacccctcccatggccccgctccccgtccccatccacccgccaatcgccccaatccccgtccctccgccccgcgtgcccgcccccgccccagccgccgccgcttccatggcctccacacccactccctccactggggacggaggcgaggccgagtacgaagtctccgacgaccaccgcgccgcgcgggagcgccacgagcgcgcggtgcaggagctcctccagcggcgccgcgcctacgccatggccgtacccaccaacgactccgctgtgcgggcccgcctccgccgcctcggcgagcccatcacgctattcggcgagcgcgagatggagcgccgcgaccgcctccgagccctcatggtccggctcgaggccgatggccaggtcgaccgtctcctccgcgcgcaggaggacgaccaggccgcgcgcatcggcgaggaggaggaggaggagcagatcgagtaccccttcttcaccgagggctcgcaggagcttctcaaggcgcgccttgacattgcacggtactcgctgccccgtgccaaggccaggatcgagagggccaagcgacgccacgaggaccctgatgaggatccagaggcggaggccgaactcgtcgtcaagcaggccggggagtttgtgctcgagtgcagtgagattggagatgatcgcccgctcactggctgttccttctctcgtgatgcatcgatgctcgccacaagggaagatctggtgcagcggcgagagctatctcattgagtcatcaagtcgtgggtgccaagcagtttctctgcatttgtgggggaaggaggattgtcacggtttatccctttcccagaccccactcatgtgggagcctccaacattgggtttgcccttgctgtaatttttttgttggaagtccatatcagtggcgagagctatctcattgagtcagcaagtcgtgggtccaaagcagtttctctgcatttgcggggaaatgattgcctcggtttatccttttcccagaccccactcatgtgggagcctccaacattgggtttgcccttgctgcaatttttttgttggaagtccatgtttagtcaatttatttatgatggatttatgcactgtgcagtcctgcttgagcttaattgagattagtttctcaccgcaagagaactgcaactatttcgatttttagtatctgaagtcactgggctgctaggaagccaggatcagttcctggagtggaatagtcaaagtatggagcatgccacaaataactaaggttgcaaccttgaaaggtcacacagaacgtgcaactgatgttgtcttctctcctgctgatgactgcttagcaacagcttcagctgatagaactgcaaaattatggaaaccagatgggtcacttttgatgtcttttgatggccaccttgatcgtcttgctcgccttgcttttcatccatctggaaagtaccttggtacagctagctttgacaagacttggagattgtgggacatcaatactggcaaggaactgctactccaagaggggcacagcagaagtgtatatggagttagctttcaccctgatggttctttggcagcatcttgtggtcttgatgcatatgctcgagtatgggatctgagatctggaagattgttctttacactcaagggccatgtgaaacctgtcctaggagtcagcttctctcctaatggttatctggttgcaactggaagtgaagacaatttctgtcggatatgggatttgaggaaaaggcaaatgttgtattctattccagctcataagagtattatttcacatgtgaaatttgaaccccaagaagggtattatttagcgacttcttcctatgacaccaaagcagccctgtggtcagctcgtgattacaaaccaatcaaaagtttggtgggccatgagtcgaaggttactagtttggatattagtggagatggacagaagattgtgactgtgtcgcttgatcgtacgataaaaatttggtcatgcagaagtagcacacaagataatgagatggaactggattgagacaattgggttcattgttgccagccccgcttctctattcatcagctagaagtagatattctccctttttgctgatcagacattccaatcagtcattggtgctattgcacggaactatttcatagcatgtataaacccttggcttgagaaatatgttctgcacttactttgctgatattccttgtcatatactagggctagtttggctaccccattttttaagggattttcatttttctaacgacccgtttggatcattagaatttaacaatagtaattttggcatatattaattaagctaattcagttttatacaaaatatatttatatattattttagtaagatgtcagagatatttatgtgctacatttttactatagaggattgggacgaaaagtgtcatgtaagttatagagtagaaacaaattttactgatacataaaatcatttttcatatcat

SEQ ID NO: 1735 - DNA, 2961 bp, Zea Mays
gtccgctcgtcaatcgtcctccttcgggcttcggcacagcaagcaccacccccttcgccaccgccaccatcaccgctaccgctacggcttcccacctcaaaaccctaaccctaaaccccctccgcgcgggagccctcgcccatggagaaccccaggccccaggccccagcactcacccctcccatggccccgctccccgtccccatccacccgccaatcgccccaatccccgtccctccgccccgcgtgcccgcccccgccccagccgccgccgcttccatggcctccacacccactccctccactggggacggaggcgaggccgagtacgaagtctccgacgaccaccgcgccgcgcgggagcgccacgagcgcgcggtgcaggagctcctccagcggcgccgcgcctacgccatggccgtacccaccaacgactccgctgtgcgggcccgcctccgccgcctcggcgagcccatcacgctattcggcgagcgcgagatggagcgccgcgaccgcctccgagccctcatggtccggctcgaggccgatggccaggtcgaccgtctcctccgcgcgcaggaggacgaccaggccgcgcgcatcggcgaggaggaggaggaggagcagatcgagtaccccttcttcaccgagggctcgcaggagcttctcaaggcgcgccttgacattgcacggtactcgctgccccgtgccaaggccaggatcgagagggccaagcgacgccacgaggaccctgatgaggatccagaggcggaggccgaactcgtcgtcaagcaggccggggagtttgtgctcgagtgcagtgagattggagatgatcgcccgctcactggctgttccttctctcgtgatgcatcgatgctcgccacaagggaagatctggtgcagcggcgagagctatctcattgagtcatcaagtcgtgggtgccaagcagtttctctgcatttgtgggggaaggaggattgtcacggtttatccctttcccagaccccactcatgtgggagcctccaacattggtcctgcttgagcttaattgagattagtttctcaccgcaagagaactgcaactagtaagttcatatatgacattcaaaaaattcagcatctgtccatctgatcacttgggaactaactaagtcagctgtagtttcgatttttagtatctgaagtcactgggctgctaggaagccaggatcaggtattcaggtttgcttttcttctagtggatagagaatgaccaacatattatcaatccaaaattcccgtttggaacttgtatccctacccaatgcacataattctccctttttaacaaaccttggtagaacataaagctgaagttagacatctgtactgtcccccgtggtattgagtattatcaaaataacagcaataagaccatgttcagcgatatttaccttgagccgttaattgaaatcagttagcagttcgtatgcacagaaataagattgttaactgaagttaaacaacttatctatgttaccagtgtcatgtgcaactagttgcttattaaatgttatgatgtctatcatatatttacatttgttttgagctttaacatggtagattatgttctcgtactcttgcttccttttcaggaaataaccatttgcttatccacattgtgtagttcctggagtggaatagtcaaagtatggagcatgccacaaataactaaggttgcaaccttgaaaggtcacacagaacgtgcaactgatgttgtcttctctcctgctgatgactgcttagcaacagcttcagctgatagaactgcaaaattatggaaaccagatgggtcacttttgatgtcttttgatggccaccttgatcgtcttgctcgccttgcttttcatccatctggaaagtaccttggtacagctagctttgacaagacttggagattgtgggacatcaatactggcaaggaactgctactccaagaggggcacagcagaagtgtatatggagttagctttcaccctgatggttctttggcagcatcttgtggtcttgatgcatatgctcgagtatgggatctgagatctggaagattgttctttacactcaagggccatgtgaaacctgtcctaggagtcagcttctctcctaatggttatctggttgcaactggaagtgaagacaatttctgtcggatatgggatttgaggaaaaggcaaatgttgtattctattccagctcataagagtattatttcacatgtgaaatttgaaccccaagaagggtattatttagcgacttcttcctatgacaccaaagcagccctgtggtcagctcgtgattacaaaccaatcaaaagtttggtgggccatgagtcgaaggttactagtttggatattagtggagatggacagaagattgtgactgtgtcgcttgatcgtacgataaaaatttggtcatgcagaagtagcacacaagataatgagatggaactggattgagacaattgggttcattgttgccagccccgcttctctattcatcagctagaagtagatattctccctttttgctgatcagacattccaatcagtcattggtgctattgcacggaactatttcatagcatgtataaacccttggcttgagaaatatgttctgcacttactttgctgatattccttgtcatatactagggctagtttggctaccccattttttaagggattttcatttttctaacgacccgtttggatcattagaatttaacaatagtaattttggcatatattaattaagctaattcagttttatacaaaatatatttatatattattttagtaagatgtcagagatatttatgtgctacatttttactatagaggattgggacgaaaagtgtcatgtaagttatagagtagaaacaaattttactgatacataaaatcatttttcatatcat

SEQ ID NO: 1736 - DNA, 1540 bp, Zea Mays
gaagatctggtgcagcggcgagagctatctcattgagtcatcaagtcgtgggtgccaagcagtttctctgcatttgtgggggaaggaggattgtcacggtttatccctttcccagaccccactcatgtgggagcctccaacattggtcctgcttgagcttaattgagattagtttctcaccgcaagagaactgcaactatttcgatttttagtatctgaagtcactgggctgctaggaagccaggatcagttcctggagtggaatagtcaaagtatggagcatgccacaaataactaaggttgcaaccttgaaaggtcacacagaacgtgcaactgatgttgtcttctctcctgctgatgactgcttagcaacagcttcagctgatagaactgcaaaattatggaaaccagatgggtcacttttgatgtcttttgatggccaccttgatcgtcttgctcgccttgcttttcatccatctggaaagtaccttggtacagctagctttgacaagacttggagattgtgggacatcaatactggcaaggaactgctactccaagaggggcacagcagaagtgtatatggagttagctttcaccctgatggttctttggcagcatcttgtggtcttgatgcatatgctcgagtatgggatctgagatctggaagattgttctttacactcaagggccatgtgaaacctgtcctaggagtcagcttctctcctaatggttatctggttgcaactggaagtgaagacaatttctgtcggatatgggatttgaggaaaaggcaaatgttgtattctattccagctcataagagtattatttcacatgtgaaatttgaaccccaagaagggtattatttagcgacttcttcctatgacaccaaagcagccctgtggtcagctcgtgattacaaaccaatcaaaagtttggtgggccatgagtcgaaggttactagtttggatattagtggagatggacagaagattgtgactgtgtcgcttgatcgtacgataaaaatttggtcatgcagaagtagcacacaagataatgagatggaactggattgagacaattgggttcattgttgccagccccgcttctctattcatcagctagaagtagatattctccctttttgctgatcagacattccaatcagtcattggtgctattgcacggaactatttcatagcatgtataaacccttggcttgagaaatatgttctgcacttactttgctgatattccttgtcatatactagggctagtttggctaccccattttttaagggattttcatttttctaacgacccgtttggatcattagaatttaacaatagtaattttggcatatattaattaagctaattcagttttatacaaaatatatttatatattattttagtaagatgtcagagatatttatgtgctacatttttactatagaggattgggacgaaaagtgtcatgtaagttatagagtagaaacaaattttactgatacataaaatcatttttcatatcat

SEQ ID NO: 1737 - DNA, 1359 bp, Zea Mays
gggggaaggaggattgtcacggtttatccctttcccagaccccactcatgtgggagcctccaacattggttcctggagtggaatagtcaaagtatggagcatgccacaaataactaaggttgcaaccttgaaaggtcacacagaacgtgcaactgatgttgtcttctctcctgctgatgactgcttagcaacagcttcagctgatagaactgcaaaattatggaaaccagatgggtcacttttgatgtcttttgatggccaccttgatcgtcttgctcgccttgcttttcatccatctggaaagtaccttggtacagctagctttgacaagacttggagattgtgggacatcaatactggcaaggaactgctactccaagaggggcacagcagaagtgtatatggagttagctttcaccctgatggttctttggcagcatcttgtggtcttgatgcatatgctcgagtatgggatctgagatctggaagattgttctttacactcaagggccatgtgaaacctgtcctaggagtcagcttctctcctaatggttatctggttgcaactggaagtgaagacaatttctgtcggatatgggatttgaggaaaaggcaaatgttgtattctattccagctcataagagtattatttcacatgtgaaatttgaaccccaagaagggtattatttagcgacttcttcctatgacaccaaagcagccctgtggtcagctcgtgattacaaaccaatcaaaagtttggtgggccatgagtcgaaggttactagtttggatattagtggagatggacagaagattgtgactgtgtcgcttgatcgtacgataaaaatttggtcatgcagaagtagcacacaagataatgagatggaactggattgagacaattgggttcattgttgccagccccgcttctctattcatcagctagaagtagatattctccctttttgctgatcagacattccaatcagtcattggtgctattgcacggaactatttcatagcatgtataaacccttggcttgagaaatatgttctgcacttactttgctgatattccttgtcatatactagggctagtttggctaccccattttttaagggattttcatttttctaacgacccgtttggatcattagaatttaacaatagtaattttggcatatattaattaagctaattcagttttatacaaaatatatttatatattattttagtaagatgtcagagatatttatgtgctacatttttactatagaggattgggacgaaaagtgtcatgtaagttatagagtagaaacaaattttactgatacataaaatcatttttcatatcat

SEQ ID NO: 1738 - DNA, 1698 bp, Zea Mays
gggggaaggaggattgtcacggtttatccctttcccagaccccactcatgtgggagcctccaacattgggtttgcccttgctgtaatttttttgttggaagtccatatcagtggcgagagctatctcattgagtcagcaagtcgtgggtccaaagcagtttctctgcatttgcggggaaatgattgcctcggtttatccttttcccagaccccactcatgtgggagcctccaacattgggtttgcccttgctgcaatttttttgttggaagtccatgtttagtcaatttatttatgatggatttatgcactgtgcagtcctgcttgagcttaattgagattagtttctcaccgcaagagaactgcaactatatctgaagtcactgggctgctaggaagccaggatcagttcctggagtggaatagtcaaagtatggagcatgccacaaataactaaggttgcaaccttgaaaggtcacacagaacgtgcaactgatgttgtcttctctcctgctgatgactgcttagcaacagcttcagctgatagaactgcaaaattatggaaaccagatgggtcacttttgatgtcttttgatggccaccttgatcgtcttgctcgccttgcttttcatccatctggaaagtaccttggtacagctagctttgacaagacttggagattgtgggacatcaatactggcaaggaactgctactccaagaggggcacagcagaagtgtatatggagttagctttcaccctgatggttctttggcagcatcttgtggtcttgatgcatatgctcgagtatgggatctgagatctggaagattgttctttacactcaagggccatgtgaaacctgtcctaggagtcagcttctctcctaatggttatctggttgcaactggaagtgaagacaatttctgtcggatatgggatttgaggaaaaggcaaatgttgtattctattccagctcataagagtattatttcacatgtgaaatttgaaccccaagaagggtattatttagcgacttcttcctatgacaccaaagcagccctgtggtcagctcgtgattacaaaccaatcaaaagtttggtgggccatgagtcgaaggttactagtttggatattagtggagatggacagaagattgtgactgtgtcgcttgatcgtacgataaaaatttggtcatgcagaagtagcacacaagataatgagatggaactggattgagacaattgggttcattgttgccagccccgcttctctattcatcagctagaagtagatattctccctttttgctgatcagacattccaatcagtcattggtgctattgcacggaactatttcatagcatgtataaacccttggcttgagaaatatgttctgcacttactttgctgatattccttgtcatatactagggctagtttggctaccccattttttaagggattttcatttttctaacgacccgtttggatcattagaatttaacaatagtaattttggcatatattaattaagctaattcagttttatacaaaatatatttatatattattttagtaagatgtcagagatatttatgtgctacatttttactatagaggattgggacgaaaagtgtcatgtaagttatagagtagaaacaaattttactgatacataaaatcatttttcatatcat

SEQ ID NO: 1739 - DNA, 1323 bp, Zea Mays
gattagtttctcaccgcaagagaactgcaactattcctggagtggaatagtcaaagtatggagcatgccacaaataactaaggttgcaaccttgaaaggtcacacagaacgtgcaactgatgttgtcttctctcctgctgatgactgcttagcaacagcttcagctgatagaactgcaaaattatggaaaccagatgggtcacttttgatgtcttttgatggccaccttgatcgtcttgctcgccttgcttttcatccatctggaaagtaccttggtacagctagctttgacaagacttggagattgtgggacatcaatactggcaaggaactgctactccaagaggggcacagcagaagtgtatatggagttagctttcaccctgatggttctttggcagcatcttgtggtcttgatgcatatgctcgagtatgggatctgagatctggaagattgttctttacactcaagggccatgtgaaacctgtcctaggagtcagcttctctcctaatggttatctggttgcaactggaagtgaagacaatttctgtcggatatgggatttgaggaaaaggcaaatgttgtattctattccagctcataagagtattatttcacatgtgaaatttgaaccccaagaagggtattatttagcgacttcttcctatgacaccaaagcagccctgtggtcagctcgtgattacaaaccaatcaaaagtttggtgggccatgagtcgaaggttactagtttggatattagtggagatggacagaagattgtgactgtgtcgcttgatcgtacgataaaaatttggtcatgcagaagtagcacacaagataatgagatggaactggattgagacaattgggttcattgttgccagccccgcttctctattcatcagctagaagtagatattctccctttttgctgatcagacattccaatcagtcattggtgctattgcacggaactatttcatagcatgtataaacccttggcttgagaaatatgttctgcacttactttgctgatattccttgtcatatactagggctagtttggctaccccattttttaagggattttcatttttctaacgacccgtttggatcattagaatttaacaatagtaattttggcatatattaattaagctaattcagttttatacaaaatatatttatatattattttagtaagatgtcagagatatttatgtgctacatttttactatagaggattgggacgaaaagtgtcatgtaagttatagagtagaaacaaattttactgatacataaaatcatttttcatatcat

SEQ ID NO: 1740 - DNA, 666 bp, Zea Mays
ctcacctatatcatttctggttagcacaacggacgccaaatcgtcactgttatcaaacttccatatcatatcactaacaaggacagatgggctgcaacaaacgagatgactaattcaacctaacgggaaaacacaacagctacgtatttactcaatcaataagatatagcatagcttttgagataaatataatgtagaaagaacagagcaggtgagagcagcaacaaaaggtacatcaaacatgaagaaagcaacatgtaagatgctaaggatacatggtgcagttgaagctcacaatagtatggtacccaaaagaacatgcatagatccaaattatagaacacaaaatgagttagggtgcaactggtactacagcggattacatatattgaaacactattagaaagttgtgtcttgagtgtttaactgaattggctgtaactttgtttctcctgcattcatgcaagcatcaaatgctggttgaaagatatacttgaaacatactaatattgtggtacagtggggattctgatctaatgttagaacataatctagagaacagaaaagcaaaggcatagagatgacaggcaacaagtcaagagattttactggaagcaagcttggcaacatacatggctgtttcagggcagcactggaggactaaat

SEQ ID NO: 1741 - DNA, 1677 bp, Zea Mays
cgggcgcgtctcgcgagtcttgcctcgtctctctgcaaatgggtgccgtccatatataaactggacgcggcagtggtcctcagtcttcacactccccactcctctctctctttctccctccctcgtcgtcccatcggaactcggatggggagcgggagcgaggcgcatctgccgcggagccgttcggtctccgcgcagccttgagcgccgcaccgtgtcttcgggctgtccagcttgcgtcgcgaggggcgagacgctacgcgagagcgcgacagggctcttggatccccccagagggccacagagcccacacaacagcagatacccgccgcgcagtggagcctagatagagagagagagagagagtagtgcagccgctaccgctctcgctcgctcggccgtcggcgacatggacaaggagaagaggaggaggagctggatcgagcgcatcaggcggctcttcaccacctcgtcgtccgaccccaagcccgcgcccaaaccagcaccagacaaggagcagcagcaggcgagcaacaagcggtgggacagcagcatcttctccaaggaagagatgagcgccatgacgaggagcaaggaggaggcggccctcaagcgcgtgcgcgcgctgcagtacgcctccctgcacaacgagaagctgggcctccggcggccgccctccccctccatgtccagggacgacgaggcggacgcgctgaacaaccagcgctggagctggctggaggagtgggtcggctcgcagcccttcgacaaggacgtccccgtggcgcaccagtccccgtacacccgcagcgccagcaggggtgagcacgacgacgtcgtcgaccggctcggctgctcggcccgccgctccttcgcccggccgacgcgcacgccgccgaggggggactgctacggcgacgcggcgcagttcccggggtacatggcctccaccgcgtccgccaaggccaagttcaggtccatgagcacgcccaaggagcgctccgccgccggctacgacgcctactcggagcactgcttcccgttcgccgaccgcctgctctcgccgatcccgtccatgtcgcccatcccctccgtcgccagcgacatgggcttcgccaggccgcccgtcgcgcagcggtcgccgcgggtgccggccaagagccccatgacgcccgcgagggcgcgcacgcggaggtcgcacggcggccaccacagcttcggctccgaggctgcgctgcaccagctgcagatggagcactacaccccagtccgctgaacgtttgctctttttctgatgatgcgatgcaacgagcaacgatgccgtccgtcggtcctttgtgaagatacaattcttttgtttgttcgacttccttaccataaattggtgggttcaaatgttggatgcaagacgatggaactttcaatcgcactgtaggtgacaatgcaccgtggatccatgatgtaagagcgcaaactatatgaattgtgatctgggcctagtcagtcctgaacagaggcacggtcccctttcccactgtctagggaataagagtcgccaacaggagtatgtaaactccttgattgcacgcttcctgagtcgccaacagggaataagcacaataattatcttctttgcatgttagtacttggtatctcaataaaaatactagactcgcc

SEQ ID NO: 1742 - DNA, 1998 bp, Zea Mays
cgggcgcgtctcgcgagtcttgcctcgtctctctgcaaatgggtgccgtccatatataaactggacgcggcagtggtcctcagtcttcacactccccactcctctctctctttctccctccctcgtcgtcccatcggaactcggatggggagcgggagcgaggcgcatctgccgcggagccgttcggtctccgcgcagccttgagcgccgcaccgtgtcttcgggctgtccagcttgcgtcgcgaggggcgagacgctacgcgagagcgcgacagggctcttggatccccccagagggccacagagcccacacaacagcagatacccgccgcgcagtggagcctagatagagagagagagagagagtagtgcagccgctaccgctctcgctcgctcggccgtcggcgacatggacaaggagaagaggaggaggagctggatcgagcgcatcaggcggctcttcaccacctcgtcgtccgaccccaagcccgcgcccaaaccagcaccagacaagaaggccaagagcaagcggtggctgccggggaagctgcgcgcgcagcagtcgttcgcgctcccggcgcccgcgcccgcggccacggaaccggaccagatcaggcgggcggaggacgagcagagcaagcacgccgtggccgtcgccctcgccaccgcggccgccgccgaggccgctgtcgccgccgcgcacgccgccgcccacgtggtccgcctcaccggccaggcgccggtggtgccgcccttgccccggcaggtgcgggggcaggagaaggagcgggagcaggccgccgtcgccatccagtcggcttaccgcggatacctggagcagcagcaggcgagcaacaagcggtgggacagcagcatcttctccaaggaagagatgagcgccatgacgaggagcaaggaggaggcggccctcaagcgcgtgcgcgcgctgcagtacgcctccctgcacaacgagaagctgggcctccggcggccgccctccccctccatgtccagggacgacgaggcggacgcgctgaacaaccagcgctggagctggctggaggagtgggtcggctcgcagcccttcgacaaggacgtccccgtggcgcaccagtccccgtacacccgcagcgccagcaggggtgagcacgacgacgtcgtcgaccggctcggctgctcggcccgccgctccttcgcccggccgacgcgcacgccgccgaggggggactgctacggcgacgcggcgcagttcccggggtacatggcctccaccgcgtccgccaaggccaagttcaggtccatgagcacgcccaaggagcgctccgccgccggctacgacgcctactcggagcactgcttcccgttcgccgaccgcctgctctcgccgatcccgtccatgtcgcccatcccctccgtcgccagcgacatgggcttcgccaggccgcccgtcgcgcagcggtcgccgcgggtgccggccaagagccccatgacgcccgcgagggcgcgcacgcggaggtcgcacggcggccaccacagcttcggctccgaggctgcgctgcaccagctgcagatggagcactacaccccagtccgctgaacgtttgctctttttctgatgatgcgatgcaacgagcaacgatgccgtccgtcggtcctttgtgaagatacaattcttttgtttgttcgacttccttaccataaattggtgggttcaaatgttggatgcaagacgatggaactttcaatcgcactgtaggtgacaatgcaccgtggatccatgatgtaagagcgcaaactatatgaattgtgatctgggcctagtcagtcctgaacagaggcacggtcccctttcccactgtctagggaataagagtcgccaacaggagtatgtaaactccttgattgcacgcttcctgagtcgccaacagggaataagcacaataattatcttctttgcatgttagtacttggtatctcaataaaaatactagactcgcc

SEQ ID NO: 1743 - DNA, 285 bp, Zea Mays
atggacaaggaaaaggaggtaaaggaaaaggaagattacatggaccagctatctaaccaaagcgaaatagtatcctggaaacgatttttggtcctatggatgagcagggacatttttttcctaaacgccttgacacaactaaatctgaatcatggtattattggacctaatttacatatacacgtcttgtgtcaaaaagattgcacacatagatgtggaactcccgatggaatctgcaccatgcattacccgtttgaccatgcaccacatgccatcataaaataa

SEQ ID NO: 1744 - DNA, 314 bp, Zea Mays
ccaaggatggaaggtggtgcgacagctatggattttgggcgaggattcctccagcacgaatgggccttccttccagagcgaggggggcctttattccaacacgaggaggctacttccatgcgcatgtgtgagagggtgcgagggtaagcgagggtacaacgggggctagccgaaattggcgggcatagccgagattggcgagcatggctggcgcgagatccacggcggggggcgagattcaggacggggcggtggcgaaaaggtgtctgcgcgatcgtgaggggaggggcgttgcgggggatggcggtctgcgg

SEQ ID NO: 1745 - DNA, 2563 bp, Zea Mays
tcgagcgatccatttttacgacctacgcgagaagcggtgtatttcaccgagcagcaacttacagcgacctgttttgctaaatttctcgttgaatcaacagcaaccaaaatgtaagcttaaacccaaggaaaaatttcaaacccgaaacccactagtaccgccacacgaattcccgaccccgatggcgacatcgccaccgcagaaccctagctccggcgagccctccgatgcgtcgagcctcgcagccgcggcgctcgaggcgcccgtgcgcgtatggagatccctcgtcgcgcgcttccctcccctcccggactcctccagcttccttgctggcgtctccgacctccagctccgctacttcggcaacagccggccccgccgccgcaggcgctccgctctacctctccctctccgcccggtggccgcgcactctgctcggattgctggtgagatgcccaaagcctttgtgatcttagatgatgttgtgcaacacaccctgactaatttgcacagtattcacaaaagcttactattttggcaggccaaggctgagggaacaaattctcagaaagtgtactttatgatatttgagagaggtccaagggcctttgttgatgcaacatatcaaacactcactagactcgggagcaatggacgccctgtccaatacattttgcattctgcatctgatatggtgtcaacaaaactcgctgccctgacaagtatgcaacactgcttggccgcttttcttgcagaggttcattctgaagttgataaatgcagggaaggattaactgaaaactcagataaatcgctacatacattattcattgttttgaataccacattctccaagttggaggtatcacttagaaatgcttgtgagggtcaagatgaactatttatagatgatggaaacttgcatgaactgtttgggaaattaccagaagttgatgtagagagttcagaatggacagaggccttggcaacagatggtacaagtttaatctatcaaaaccttcagaagctagatagttttctgtcctctcagctctcaagccataaaagaccaaacaaattgaccatatattggttaccctatacatgtggagcagtaggtctctctgtgtgttctctgtggcttttacgccatagcagtttgatgggaagccctgatatcgacaattggattcgagatgctaaggagtctgtggctggattttgggatgaacatgttgagaaaccaagatgagcttttcgagacattcaagcaaagagataaaggtgtaatggaaaagcaagaggtccaactaactgaagattcattgcgcaggatgttagttgccttttgtgagcaaacagagggtcaaaagttgctggaagatttaccagtgcaggcgatgttggagactctcacaaagagatacgagaaggaattgatacacccaattcaaaacctgttcagtggagaattagcccgtgctatgcttattcagattcaaaagcttaaactggaccttgaatcgggactactggaaatggatcagattctaagggcaaatgctataaactttgctgttcttgcagcgcttcctgcttttggtctttcacttctgttgcttgtgttactgcgagcatgggttcagcgtgaccatggtgctgagggaagaggtaatattgcacgatgtcaacggaggctgcttcttgttgatgtagagagaaggcttatggagtttcaacattacagggataatggaatggaggaagaggcacggtgcaagtttggcttagtactttacacgcttgatagactctgcaaagctgttgagtcacacgcaaaagaaacaggcgaatggttaagcttgagacaagatatttttgatctgtcgaagctcgacatgggaatgccagataagatgattgtcgtttcacggttgaagtggatgtataactgcttgcttccattctcatcgagccgtttgccacgcctctagagcagtgagcaactggacgtcgtgtgttgcattttggataaagattttgacacggatacctggaactctatgtcggaaggatggttctttcatgcccacaagatgttctgtagattttagcagagctggatgaagcatatcggaagggggcagattgggtggatgcagtatccatcgagccctccgttgacaattcttgcattgctaggcatgttgatttggattggctgttgcaccgaatggtttgcgtcgatgggctacatctacatgtgtgcgagcattgtaccctttggccttgttccacttgcaattccaattccaatggttgttccatatcccatactagttcataagtcataacatgacaacagaatgctcttcttttatctattccgcagagatgggtacaatcttatttaactgtttcatttgaaagaacgtgttattattcatgtggccacacgacaccctgggttcctttcacttgccgatgatggcgagcagcgcttccttgtagtggccatgggtgttcttggccacggcgtcggcgagctttgtcccgtactgcc

SEQ ID NO: 1746 - DNA, 2600 bp, Zea Mays
gagcgatccatttttacgacctacgcgagaagcggtgtatttcaccgagcagcaacttacagcgacctgttttgctaaatttctcgttgaatcaacagcaaccaaaatgtaagcttaaacccaaggaaaaatttcaaacccgaaacccactagtaccgccacacgaattcccgaccccgatggcgacatcgccaccgcagaaccctagctccggcgagccctccgatgcgtcgagcctcgcagccgcggcgctcgaggcgcccgtgcgcgtatggagatccctcgtcgcgcgcttccctcccctcccggactcctccagcttccttgctggcgtctccgacctccagctccgctacttcggcaacagccggccccgccgccgcaggcgctccgctctacctctccctctccgcccggtggccgcgcactctgctcggattgctggtgagatgcccaaagcctttgtgatcttagatgatgttgtgcaacacaccctgactaatttgcacagtattcacaaaagcttactattttggcaggccaaggctgagggaacaaattctcagaaagtgtactttatgatatttgagagaggtccaagggcctttgttgatgcaacatatcaaacactcactagactcgggagcaatggacgccctgtccaatacattttgcattctgcatctgatatggtgtcaacaaaactcgctgccctgacaagtatgcaacactgcttggccgcttttcttgcagaggttcgttttcttcagtttatcaactgttcattctgaagttgataaatgcagggaaggattaactgaaaactcagataaatcgctacatacattattcattgttttgaataccacattctccaagttggaggtatcacttagaaatgcttgtgagggtcaagatgaactatttatagatgatggaaacttgcatgaactgtttgggaaattaccagaagttgatgtagagagttcagaatggacagaggccttggcaacagatggtacaagtttaatctatcaaaaccttcagaagctagatagttttctgtcctctcagctctcaagccataaaagaccaaacaaattgaccatatattggttaccctatacatgtggagcagtaggtctctctgtgtgttctctgtggcttttacgccatagcagtttgatgggaagccctgatatcgacaattggattcgagatgctaaggagtctgtggctggattttgggatgaacatgttgagaaaccaatcatttccattagagatgagcttttcgagacattcaagcaaagagataaaggtgtaatggaaaagcaagaggtccaactaactgaagattcattgcgcaggatgttagttgccttttgtgagcaaacagagggtcaaaagttgctggaagatttaccagtgcaggcgatgttggagactctcacaaagagatacgagaaggaattgatacacccaattcaaaacctgttcagtggagaattagcccgtgctatgcttattcagattcaaaagcttaaactggaccttgaatcgggactactggaaatggatcagattctaagggcaaatgctataaactttgctgttcttgcagcgcttcctgcttttggtctttcacttctgttgcttgtgttactgcgagcatgggttcagcgtgaccatggtgctgagggaagaggtaatattgcacgatgtcaacggaggctgcttcttgttgatgtagagagaaggcttatggagtttcaacattacagggataatggaatggaggaagaggcacggtgcaagtttggcttagtactttacacgcttgatagactctgcaaagctgttgagtcacacgcaaaagaaacaggcgaatggttaagcttgagacaagatatttttgatctgtcgaagctcgacatgggaatgccagataagatgattgtcgtttcacggttgaagtggatgtataactgcttgcttccattctcatcgagccgtttgccacgcctctagagcagtgagcaactggacgtcgtgtgttgcattttggataaagattttgacacggatacctggaactctatgtcggaaggatggttctttcatgcccacaagatgttctgtagattttagcagagctggatgaagcatatcggaagggggcagattgggtggatgcagtatccatcgagccctccgttgacaattcttgcattgctaggcatgttgatttggattggctgttgcaccgaatggtttgcgtcgatgggctacatctacatgtgtgcgagcattgtaccctttggccttgttccacttgcaattccaattccaatggttgttccatatcccatactagttcataagtcataacatgacaacagaatgctcttcttttatctattccgcagagatgggtacaatcttatttaactgtttcatttgaaagaacgtgttattattcatgtggccacacgacaccctgggttcctttcacttgccgatgatggcgagcagcgcttccttgtagtggccatgggtgttcttggccacggcgtcggcgagctttgtcccgtactgcc

SEQ ID NO: 1747 - DNA, 2442 bp, Zea Mays
atttttacgacctacgcgagaagcggtgtatttcaccgagcagcaacttacagcgacctgttttgctaaatttctcgttgaatcaacagcaaccaaaatgtaagcttaaacccaaggaaaaatttcaaacccgaaacccactagtaccgccacacgaattcccgaccccgatggcgacatcgccaccgcagaaccctagctccggcgagccctccgatgcgtcgagcctcgcagccgcggcgctcgaggcgcccgtgcgcgtatggagatccctcgtcgcgcgcttccctcccctcccggactcctccagcttccttgctggcgtctccgacctccagctccgctacttcggcaacagccggccccgccgccgcaggcgctccgctctacctctccctctccgcccggtggccgcgcactctgctcggattgctggtgagatgcccaaagcctttgtgatcttagatgatgttgtgcaacacaccctgactaatttgcacagtattcacaaaagcttactattttggcaggccaaggctgagggaacaaattctcagaaagtgtactttatgatatttgagagaggtccaagggcctttgttgatgcaacatatcaaacactcactagactcgggagcaatggacgccctgtccaatacattttgcattctgcatctgatatggtgtcaacaaaactcgctgccctgacaagtatgcaacactgcttggccgcttttcttgcagaggttcattctgaagttgataaatgcagggaaggattaactgaaaactcagataaatcgctacatacattattcattgttttgaataccacattctccaagttggaggtatcacttagaaatgcttgtgagggtcaagatgaactatttatagatgatggaaacttgcatgaactgtttgggaaattaccagaagttgatgtagagagttcagaatggacagaggccttggcaacagatggtacaagtttaatctatcaaaaccttcagaagctagatagttttctgtcctctcagctctcaagccataaaagaccaaacaaattgaccatatattggttaccctatacatgtggagcagtaggtctctctgtgtgttctctgtggcttttacgccatagcagtttgatgggaagccctgatatcgacaattggattcgagatgctaaggagtctgtggctggattttgggatgaacatgttgagaaaccaatcatttccattagagatgagcttttcgagacattcaagcaaagagataaaggtgtaatggaaaagcaagaggtccaactaactgaagattcattgcgcaggatgttagttgccttttgtgagcaaacagagggtcaaaagttgctggaagatttaccagtgcaggcgatgttggagactctcacaaagagatacgagaaggaattgatacacccaattcaaaacctgttcagtggagaattagcccgtgctatgcttattcagattcaaaagcttaaactggaccttgaatcgaccatggtgctgagggaagaggtaatattgcacgatgtcaacggaggctgcttcttgttgatgtagagagaaggcttatggagtttcaacattacagggataatggaatggaggaagaggcacggtgcaagtttggcttagtactttacacgcttgatagactctgcaaagctgttgagtcacacgcaaaagaaacaggcgaatggttaagcttgagacaagatatttttgatctgtcgaagctcgacatgggaatgccagataagatgattgtcgtttcacggttgaagtggatgtataactgcttgcttccattctcatcgagccgtttgccacgcctctagagcagtgagcaactggacgtcgtgtgttgcattttggataaagattttgacacggatacctggaactctatgtcggaaggatggttctttcatgcccacaagatgttctgtagattttagcagagctggatgaagcatatcggaagggggcagattgggtggatgcagtatccatcgagccctccgttgacaattcttgcattgctaggcatgttgatttggattggctgttgcaccgaatggtttgcgtcgatgggctacatctacatgtgtgcgagcattgtaccctttggccttgttccacttgcaattccaattccaatggttgttccatatcccatactagttcataagtcataacatgacaacagaatgctcttcttttatctattccgcagagatgggtacaatcttatttaactgtttcatttgaaagaacgtgttattattcatgtggccacacgacaccctgggttcctttcacttgccgatgatggcgagcagcgcttccttgtagtggccatgggtgttcttggccacggcgtcggcgagctttgtcccgtactgcc

SEQ ID NO: 1748 - DNA, 2479 bp, Zea Mays
gtgtatttcaccgagcagcaacttacagcgacctgttttgctaaatttctcgttgaatcaacagcaaccaaaatgtaagcttaaacccaaggaaaaatttcaaacccgaaacccactagtaccgccacacgaattcccgaccccgatggcgacatcgccaccgcagaaccctagctccggcgagccctccgatgcgtcgagcctcgcagccgcggcgctcgaggcgcccgtgcgcgtatggagatccctcgtcgcgcgcttccctcccctcccggactcctccagcttccttgctggcgtctccgacctccagctccgctacttcggcaacagccggccccgccgccgcaggcgctccgctctacctctccctctccgcccggtggccgcgcactctgctcggattgctggtgagatgcccaaagcctttgtgatcttagatgatgttgtgcaacacaccctgactaatttgcacagtattcacaaaagcttactattttggcaggccaaggctgagggaacaaattctcagaaagtgtactttatgatatttgagagaggtccaagggcctttgttgatgcaacatatcaaacactcactagactcgggagcaatggacgccctgtccaatacattttgcattctgcatctgatatggtgtcaacaaaactcgctgccctgacaagtatgcaacactgcttggccgcttttcttgcagaggttcattctgaagttgataaatgcagggaaggattaactgaaaactcagataaatcgctacatacattattcattgttttgaataccacattctccaagttggaggtatcacttagaaatgcttgtgagggtcaagatgaactatttatagatgatggaaacttgcatgaactgtttgggaaattaccagaagttgatgtagagagttcagaatggacagaggccttggcaacagatggtacaagtttaatctatcaaaaccttcagaagctagatagttttctgtcctctcagctctcaagccataaaagaccaaacaaattgaccatatattggttaccctatacatgtggagcagtaggtctctctgtgtgttctctgtggcttttacgccatagcagtttgatgggaagccctgatatcgacaattggattcgagatgctaaggagtctgtggctggattttgggatgaacatgttgagaaaccaatcatttccattagagatgagcttttcgagacattcaagcaaagagataaaggtgtaatggaaaagcaagaggtccaactaactgaagattcattgcgcaggatgttagttgccttttgtgagcaaacagagggtcaaaagttgctggaagatttaccagtgcaggcgatgttggagactctcacaaagagatacgagaaggaattgatacacccaattcaaaacctgttcagtggagaattagcccgtgctatgcttattcagattcaaaagcttaaactggaccttgaatccgcttcctgcttttggtctttcacttctgttgcttgtgttactgcgagcatgggttcagcgtgaccatggtgctgagggaagaggtaatattgcacgatgtcaacggaggctgcttcttgttgatgtagagagaaggcttatggagtttcaacattacagggataatggaatggaggaagaggcacggtgcaagtttggcttagtactttacacgcttgatagactctgcaaagctgttgagtcacacgcaaaagaaacaggcgaatggttaagcttgagacaagatatttttgatctgtcgaagctcgacatgggaatgccagataagatgattgtcgtttcacggttgaagtggatgtataactgcttgcttccattctcatcgagccgtttgccacgcctctagagcagtgagcaactggacgtcgtgtgttgcattttggataaagattttgacacggatacctggaactctatgtcggaaggatggttctttcatgcccacaagatgttctgtagattttagcagagctggatgaagcatatcggaagggggcagattgggtggatgcagtatccatcgagccctccgttgacaattcttgcattgctaggcatgttgatttggattggctgttgcaccgaatggtttgcgtcgatgggctacatctacatgtgtgcgagcattgtaccctttggccttgttccacttgcaattccaattccaatggttgttccatatcccatactagttcataagtcataacatgacaacagaatgctcttcttttatctattccgcagagatgggtacaatcttatttaactgtttcatttgaaagaacgtgttattattcatgtggccacacgacaccctgggttcctttcacttgccgatgatggcgagcagcgcttccttgtagtggccatgggtgttcttggccacggcgtcggcgagctttgtcccgtactgcc

SEQ ID NO: 1749 - DNA, 2498 bp, Zea Mays
cttacagcgacctgttttgctaaatttctcgttgaatcaacagcaaccaaaatgtaagcttaaacccaaggaaaaatttcaaacccgaaacccactagtaccgccacacgaattcccgaccccgatggcgacatcgccaccgcagaaccctagctccggcgagccctccgatgcgtcgagcctcgcagccgcggcgctcgaggcgcccgtgcgcgtatggagatccctcgtcgcgcgcttccctcccctcccggactcctccagcttccttgctggcgtctccgacctccagctccgctacttcggcaacagccggccccgccgccgcaggcgctccgctctacctctccctctccgcccggtggccgcgcactctgctcggattgctggtgagatgcccaaagcctttgtgatcttagatgatgttgtgcaacacaccctgactaatttgcacagtattcacaaaagcttactattttggcaggccaaggctgagggaacaaattctcagaaagtgtactttatgatatttgagagaggtccaagggcctttgttgatgcaacatatcaaacactcactagactcgggagcaatggacgccctgtccaatacattttgcattctgcatctgatatggtgtcaacaaaactcgctgccctgacaagtatgcaacactgcttggccgcttttcttgcagaggttcattctgaagttgataaatgcagggaaggattaactgaaaactcagataaatcgctacatacattattcattgttttgaataccacattctccaagttggaggtatcacttagaaatgcttgtgagatgatggaaacttgcatgaactgtttgggaaattaccagaagttgatgtagagagttcagaatggacagaggccttggcaacagatggtacaagtttaatctatcaaaaccttcagaagctagatagttttctgtcctctcagctctcaagccataaaagaccaaacaaattgaccatatattggttaccctatacatgtggagcagtaggtctctctgtgtgttctctgtggcttttacgccatagcagtttgatgggaagccctgatatcgacaattggattcgagatgctaaggagtctgtggctggattttgggatgaacatgttgagaaaccaatcatttccattagagatgagcttttcgagacattcaagcaaagagataaaggtgtaatggaaaagcaagaggtccaactaactgaagattcattgcgcaggatgttagttgccttttgtgagcaaacagagggtcaaaagttgctggaagatttaccagtgcaggcgatgttggagactctcacaaagagatacgagaaggaattgatacacccaattcaaaacctgttcagtggagaattagcccgtgctatgcttattcagattcaaaagcttaaactggaccttgaatcgggactactggaaatggatcagattctaagggcaaatgctataaactttgctgttcttgcagcgcttcctgcttttggtctttcacttctgttgcttgtgttactgcgagcatgggttcagcgtgaccatggtgctgagggaagaggtaatattgcacgatgtcaacggaggctgcttcttgttgatgtagagagaaggcttatggagtttcaacattacagggataatggaatggaggaagaggcacggtgcaagtttggcttagtactttacacgcttgatagactctgcaaagctgttgagtcacacgcaaaagaaacaggcgaatggttaagcttgagacaagatatttttgatctgtcgaagctcgacatgggaatgccagataagatgattgtcgtttcacggttgaagtggatgtataactgcttgcttccattctcatcgagccgtttgccacgcctctagagcagtgagcaactggacgtcgtgtgttgcattttggataaagattttgacacggatacctggaactctatgtcggaaggatggttctttcatgcccacaagatgttctgtagattttagcagagctggatgaagcatatcggaagggggcagattgggtggatgcagtatccatcgagccctccgttgacaattcttgcattgctaggcatgttgatttggattggctgttgcaccgaatggtttgcgtcgatgggctacatctacatgtgtgcgagcattgtaccctttggccttgttccacttgcaattccaattccaatggttgttccatatcccatactagttcataagtcataacatgacaacagaatgctcttcttttatctattccgcagagatgggtacaatcttatttaactgtttcatttgaaagaacgtgttattattcatgtggccacacgacaccctgggttcctttcacttgccgatgatggcgagcagcgcttccttgtagtggccatgggtgttcttggccacggcgtcggcgagctttgtcccgtactgcc

SEQ ID NO: 1750 - DNA, 2437 bp, Zea Mays
ctaaatttctcgttgaatcaacagcaaccaaaatgtaagcttaaacccaaggaaaaatttcaaacccgaaacccactagtaccgccacacgaattcccgaccccgatggcgacatcgccaccgcagaaccctagctccggcgagccctccgatgcgtcgagcctcgcagccgcggcgctcgaggcgcccgtgcgcgtatggagatccctcgtcgcgcgcttccctcccctcccggactcctccagcttccttgctggcgtctccgacctccagctccgctacttcggcaacagccggccccgccgccgcaggcgctccgctctacctctccctctccgcccggtggccgcgcactctgctcggattgctggtgagatgcccaaagcctttgtgatcttagatgatgttgtgcaacacaccctgactaatttgcacagtattcacaaaagcttactattttggcaggccaaggctgagggaacaaattctcagaaagtgtactttatgatatttgagagaggtccaagggcctttgttgatgcaacatatcaaacactcactagactcgggagcaatggacgccctgtccaatacattttgcattctgcatctgatatggtgtcaacaaaactcgctgccctgacaagtatgcaacactgcttggccgcttttcttgcagaggttcattctgaagttgataaatgcagggaaggattaactgaaaactcagataaatcgctacatacattattcattgttttgaataccacattctccaagttggaggtatcacttagaaatgcttgtgagggtcaagatgaactatttatagatgatggaaacttgcatgaactgtttgggaaattaccagaagttgatgtagagagttcagaatggacagaggccttggcaacagatggtacaagtttaatctatcaaaaccttcagaagctagatagttttctgtcctctcagtaggtctctctgtgtgttctctgtggcttttacgccatagcagtttgatgggaagccctgatatcgacaattggattcgagatgctaaggagtctgtggctggattttgggatgaacatgttgagaaaccaatcatttccattagagatgagcttttcgagacattcaagcaaagagataaaggtgtaatggaaaagcaagaggtccaactaactgaagattcattgcgcaggatgttagttgccttttgtgagcaaacagagggtcaaaagttgctggaagatttaccagtgcaggcgatgttggagactctcacaaagagatacgagaaggaattgatacacccaattcaaaacctgttcagtggagaattagcccgtgctatgcttattcagattcaaaagcttaaactggaccttgaatcgggactactggaaatggatcagattctaagggcaaatgctataaactttgctgttcttgcagcgcttcctgcttttggtctttcacttctgttgcttgtgttactgcgagcatgggttcagcgtgaccatggtgctgagggaagaggtaatattgcacgatgtcaacggaggctgcttcttgttgatgtagagagaaggcttatggagtttcaacattacagggataatggaatggaggaagaggcacggtgcaagtttggcttagtactttacacgcttgatagactctgcaaagctgttgagtcacacgcaaaagaaacaggcgaatggttaagcttgagacaagatatttttgatctgtcgaagctcgacatgggaatgccagataagatgattgtcgtttcacggttgaagtggatgtataactgcttgcttccattctcatcgagccgtttgccacgcctctagagcagtgagcaactggacgtcgtgtgttgcattttggataaagattttgacacggatacctggaactctatgtcggaaggatggttctttcatgcccacaagatgttctgtagattttagcagagctggatgaagcatatcggaagggggcagattgggtggatgcagtatccatcgagccctccgttgacaattcttgcattgctaggcatgttgatttggattggctgttgcaccgaatggtttgcgtcgatgggctacatctacatgtgtgcgagcattgtaccctttggccttgttccacttgcaattccaattccaatggttgttccatatcccatactagttcataagtcataacatgacaacagaatgctcttcttttatctattccgcagagatgggtacaatcttatttaactgtttcatttgaaagaacgtgttattattcatgtggccacacgacaccctgggttcctttcacttgccgatgatggcgagcagcgcttccttgtagtggccatgggtgttcttggccacggcgtcggcgagctttgtcccgtactgcc

SEQ ID NO: 1751 - DNA, 2477 bp, Zea Mays
ctaaatttctcgttgaatcaacagcaaccaaaatgtaagcttaaacccaaggaaaaatttcaaacccgaaacccactagtaccgccacacgaattcccgaccccgatggcgacatcgccaccgcagaaccctagctccggcgagccctccgatgcgtcgagcctcgcagccgcggcgctcgaggcgcccgtgcgcgtatggagatccctcgtcgcgcgcttccctcccctcccggactcctccagcttccttgctggcgtctccgacctccagctccgctacttcggcaacagccggccccgccgccgcaggcgctccgctctacctctccctctccgcccggtggccgcgcactctgctcggattgctggtgagatgcccaaagcctttgtgatcttagatgatgttgtgcaacacaccctgactaatttgcacagtattcacaaaagcttactattttggcaggccaaggctgagggaacaaattctcagaaagtgtactttatgatatttgagagaggtccaagggcctttgttgatgcaacatatcaaacactcactagactcgggagcaatggacgccctgtccaatacattttgcattctgcatctgatatggtgtcaacaaaactcgctgccctgacaagtatgcaacactgcttggccgcttttcttgcagaggttcattctgaagttgataaatgcagggaaggattaactgaaaactcagataaatcgctacatacattattcattgttttgaataccacattctccaagttggagggtcaagatgaactatttatagatgatggaaacttgcatgaactgtttgggaaattaccagaagttgatgtagagagttcagaatggacagaggccttggcaacagatggtacaagtttaatctatcaaaaccttcagaagctagatagttttctgtcctctcagctctcaagccataaaagaccaaacaaattgaccatatattggttaccctatacatgtggagcagtaggtctctctgtgtgttctctgtggcttttacgccatagcagtttgatgggaagccctgatatcgacaattggattcgagatgctaaggagtctgtggctggattttgggatgaacatgttgagaaaccaatcatttccattagagatgagcttttcgagacattcaagcaaagagataaaggtgtaatggaaaagcaagaggtccaactaactgaagattcattgcgcaggatgttagttgccttttgtgagcaaacagagggtcaaaagttgctggaagatttaccagtgcaggcgatgttggagactctcacaaagagatacgagaaggaattgatacacccaattcaaaacctgttcagtggagaattagcccgtgctatgcttattcagattcaaaagcttaaactggaccttgaatcgggactactggaaatggatcagattctaagggcaaatgctataaactttgctgttcttgcagcgcttcctgcttttggtctttcacttctgttgcttgtgttactgcgagcatgggttcagcgtgaccatggtgctgagggaagaggtaatattgcacgatgtcaacggaggctgcttcttgttgatgtagagagaaggcttatggagtttcaacattacagggataatggaatggaggaagaggcacggtgcaagtttggcttagtactttacacgcttgatagactctgcaaagctgttgagtcacacgcaaaagaaacaggcgaatggttaagcttgagacaagatatttttgatctgtcgaagctcgacatgggaatgccagataagatgattgtcgtttcacggttgaagtggatgtataactgcttgcttccattctcatcgagccgtttgccacgcctctagagcagtgagcaactggacgtcgtgtgttgcattttggataaagattttgacacggatacctggaactctatgtcggaaggatggttctttcatgcccacaagatgttctgtagattttagcagagctggatgaagcatatcggaagggggcagattgggtggatgcagtatccatcgagccctccgttgacaattcttgcattgctaggcatgttgatttggattggctgttgcaccgaatggtttgcgtcgatgggctacatctacatgtgtgcgagcattgtaccctttggccttgttccacttgcaattccaattccaatggttgttccatatcccatactagttcataagtcataacatgacaacagaatgctcttcttttatctattccgcagagatgggtacaatcttatttaactgtttcatttgaaagaacgtgttattattcatgtggccacacgacaccctgggttcctttcacttgccgatgatggcgagcagcgcttccttgtagtggccatgggtgttcttggccacggcgtcggcgagctttgtcccgtactgcc

SEQ ID NO: 1752 - DNA, 2705 bp, Zea Mays
ccaaaatgtaagcttaaacccaaggaaaaatttcaaacccgaaacccactagtaccgccacacgaattcccgaccccgatggcgacatcgccaccgcagaaccctagctccggcgagccctccgatgcgtcgagcctcgcagccgcggcgctcgaggcgcccgtgcgcgtatggagatccctcgtcgcgcgcttccctcccctcccggactcctccagcttccttgctggcgtctccgacctccagctccgctacttcggcaacagccggccccgccgccgcaggcgctccgctctacctctccctctccgcccggtggccgcgcactctgctcggattgctggtgagatgcccaaagcctttgtgatcttagatgatgttgtgcaacacaccctgactaatttgcacagtattcacaaaagcttactattttggcaggccaaggctgagggaacaaattctcagaaagtgtactttatgatatttgagagaggtccaagggcctttgttgatgcaacatatcaaacactcactagactcgggagcaatggacgccctgtccaatacattttgcattctgcatctgatatggtgtcaacaaaactcgctgccctgacaagtatgcaacactgcttggccgcttttcttgcagaggttcattctgaagttgataaatgcagggaaggattaactgaaaactcagataaatcgctacatacattattcattgttttgaataccacattctccaagttggaggtatcacttagaaatgcttgtgagggtcaagatgaactatttatagatgatggaaacttgcatgaactgtttgggaaattaccagaagttgatgtagagagttcagaatggacagaggccttggcaacagatggtacaagtttaatctatcaaaaccttcagaagctagatagttttctgtcctctcagctctcaagccataaaagaccaaacaaattgaccatatattggttaccctatacatgtggagcagtaggtctctctgtgtgttctctgtggcttttacgccatagcagtttgatgggaagccctgatatcgacaattggattcgagatgctaaggagtctgtggctggattttgggatgaacatgttgagaaaccaatcatttccattagagatgagcttttcgagacattcaagcaaagagataaaggtgtaatggaaaagcaagaggtccaactaactgaagattcattgcgcaggatgttagttgccttttgtgagcaaacagagggtcaaaagttgctggaagatttaccagtgcaggcgatgttggagactctcacaaagagatacgagaaggaattgatacacccaattcaaaacctgttcagtggagaattagcccgtgctatgcttattcagattcaaaagcttaaactggaccttgaatcgggactactggaaatggatcagattctaagggcaaatgctataaactttgctgttcttgcagcgcttcctgcttttggtctttcacttctgttgcttgtgttactgcgagcatgggttcagcgtgtatgtatataaaccatcaaagaaacatttccttgtgcacaatttcttctttctggtctatctgcagtagttgtgggtacactgcatcatgacgtctttctcttcaaagttcaatctatcggtgttacttagtttgtcggttatgttgcatgcaaatgaatatggaaagtagaaagtagaaactacaaaggacattatggtaggctaactaaacatctgctcgttccacaggaccatggtgctgagggaagaggtaatattgcacgatgtcaacggaggctgcttcttgttgatgtagagagaaggcttatggagtttcaacattacagggataatggaatggaggaagaggcacggtgcaagtttggcttagtactttacacgcttgatagactctgcaaagctgttgagtcacacgcaaaagaaacaggcgaatggttaagcttgagacaagatatttttgatctgtcgaagctcgacatgggaatgccagataagatgattgtcgtttcacggttgaagtggatgtataactgcttgcttccattctcatcgagccgtttgccacgcctctagagcagtgagcaactggacgtcgtgtgttgcattttggataaagattttgacacggatacctggaactctatgtcggaaggatggttctttcatgcccacaagatgttctgtagattttagcagagctggatgaagcatatcggaagggggcagattgggtggatgcagtatccatcgagccctccgttgacaattcttgcattgctaggcatgttgatttggattggctgttgcaccgaatggtttgcgtcgatgggctacatctacatgtgtgcgagcattgtaccctttggccttgttccacttgcaattccaattccaatggttgttccatatcccatactagttcataagtcataacatgacaacagaatgctcttcttttatctattccgcagagatgggtacaatcttatttaactgtttcatttgaaagaacgtgttattattcatgtggccacacgacaccctgggttcctttcacttgccgatgatggcgagcagcgcttccttgtagtggccatgggtgttcttggccacggcgtcggcgagctttgtcccgtactgcc

SEQ ID NO: 1753 - DNA, 2446 bp, Zea Mays
ccgaaacccactagtaccgccacacgaattcccgaccccgatggcgacatcgccaccgcagaaccctagctccggcgagccctccgatgcgtcgagcctcgcagccgcggcgctcgaggcgcccgtgcgcgtatggagatccctcgtcgcgcgcttccctcccctcccggactcctccagcttccttgctggcgtctccgacctccagctccgctacttcggcaacagccggccccgccgccgcaggcgctccgctctacctctccctctccgcccggtggccgcgcactctgctcggattgctggtgagatgcccaaagcctttgtgatcttagatgatgttgtgcaacacaccctgactaatttgcacagtattcacaaaagcttactattttggcaggccaaggctgagggaacaaattctcagaaagtgtactttatgatatttgagagaggtccaagggcctttgttgatgcaacatatcaaacactcactagactcgggagcaatggacgccctgtccaatacattttgcattctgcatctgatatggtgtcaacaaaactcgctgccctgacaagtatgcaacactgcttggccgcttttcttgcagaggttcattctgaagttgataaatgcagggaaggattaactgaaaactcagataaatcgctacatacattattcattgttttgaataccacattctccaagttggaggtatcacttagaaatgcttgtgagggtcaagatgaactatttatagatgatggaaacttgcatgaactgtttgggaaattaccagaagttgatgtagagagttcagaatggacagaggccttggcaacagatggtacaagtttaatctatcaaaaccttcagaagctagatagttttctgtcctctcagctctcaagccataaaagaccaaacaaattgaccatatattggttaccctatacatgtggagcagtaggtctctctgtgtgttctctgtggcttttacgccatagcagtttgatgggaagccctgatatcgacaattggattcgagatgctaaggagtctgtggctggattttgggatgaacatgttgagaaaccaatcatttccattagagatgagcttttcgagacattcaagcaaagagataaaggtgtaatggaaaagcaagaggtccaactaactgaagattcattgcgcaggatgttagttgccttttgtgagcaaacagagggtcaaaagttgctggaagatttaccagtgcaggcgatgttggagactctcacaaagagatacgagaaggaattgatacacccaattcaaaacctgttcagtggagaattagcccgtgctatgcttattcagattcaaaagcttaaactggaccttgaatcttttacacaggggactactggaaatggatcagattctaagggcaaatgctataaactttgctgttcttgcagcgcttcctgcttttggtctttcacttctgttgcttgtgttactgcgagcatgggttcagcgtgaccatggtgctgagggaagaggtaatattgcacgatgtcaacggaggctgcttcttgttgatgtagagagaaggcttatggagtttcaacattacagggataatggaatggaggaagaggcacggtgcaagtttggcttagtactttacacgcttgatagactctgcaaagctgttgagtcacacgcaaaagaaacaggcgaatggttaagcttgagacaagatatttttgatctgtcgaagctcgacatgggaatgccagataagatgattgtcgtttcacggttgaagtggatgtataactgcttgcttccattctcatcgagccgtttgccacgcctctagagcagtgagcaactggacgtcgtgtgttgcattttggataaagattttgacacggatacctggaactctatgtcggaaggatggttctttcatgcccacaagatgttctgtagattttagcagagctggatgaagcatatcggaagggggcagattgggtggatgcagtatccatcgagccctccgttgacaattcttgcattgctaggcatgttgatttggattggctgttgcaccgaatggtttgcgtcgatgggctacatctacatgtgtgcgagcattgtaccctttggccttgttccacttgcaattccaattccaatggttgttccatatcccatactagttcataagtcataacatgacaacagaatgctcttcttttatctattccgcagagatgggtacaatcttatttaactgtttcatttgaaagaacgtgttattattcatgtggccacacgacaccctgggttcctttcacttgccgatgatggcgagcagcgcttccttgtagtggccatgggtgttcttggccacggcgtcggcgagctttgtcccgtactgcc

SEQ ID NO: 1754 - DNA, 1685 bp, Zea Mays
ccgaccccgatggcgacatcgccaccgcagaaccctagctccggcgagccctccgatgcgtcgagcctcgcagccgcggcgctcgaggcgcccgtgcgcgtatggagatccctcgtcgcgcgcttccctcccctcccggactcctccagcttccttgctggcgtctccgacctccagctccgctacttcggcaacagccggccccgccgccgcaggcgctccgctctacctctccctctccgcccggtggccgcgcactctgctcggattgctggtgagatgcccaaagcctttgtgatcttagatgatgttgtgcaacacaccctgactaatttgcacagtattcacaaaagcttactattttggcaggccaaggctgagggaacaaattctcagaaagtgtactttatgatatttgagagaggtccaagggcctttgttgatgcaacatatcaaacactcactagactcgggagcaatggacgccctgtccaatacattttgcattctgcatctgatatggtgtcaacaaaactcgctgccctgacaagtatgcaacactgcttggccgcttttcttgcagaggttcattctgaagttgataaatgcagggaaggattaactgaaaactcagataaatcgctacatacattattcattgttttgaataccacattctccaagttggaggtatcacttagaaatgcttgtgagggtcaagatgaactatttatagatgatggaaacttgcatgaactgtttgggaaattaccagaagttgatgtagagagttcagaatggacagaggccttggcaacagatggtacaagtttaatctatcaaaaccttcagaagctagatagttttctgtcctctcagctctcaagccataaaagaccaaacaaattgaccatatattggttaccctatacatgtggagcagtaggtctctctgtgtgttctctgtggcttttacgccatagcagtttgatgggaagccctgatatcgacaattggattcgagatgctaaggagtctgtggctggattttgggatgaacatgttgagaaaccaatcatttccattagagatgagcttttcgagacattcaagcaaagagataaaggtgtaatggaaaagcaagaggtccaactaactgaagattcattgcgcaggatgttagttgccttttgtgagcaaacagagggtcaaaagttgctggaagatttaccagtgcaggcgatgttggagactctcacaaagagatacgagaaggaattgatacacccaattcaaaacctgttcagtggagaattagcccgtgctatgcttattcagattcaaaagcttaaactggaccttgaatcgggactactggaaatggatcagattctaagggcaaatgctataaactttgctgttcttgcagcgcttcctgcttttggtctttcacttctgttgcttgtgttactgcgagcatgggttcagcgtgaccatggtgctgagggaagaggtaatattgcacgatgtcaacggaggctgcttcttgttgatgtagagagaaggcttatggagtttcaacattacagggataatggaatggtctatggcgtttatttgggagcgtttggtagcgctccgagaaggcgagaaccagcagcgcgcctcttcgaccactagcgtca

SEQ ID NO: 1755 - DNA, 2388 bp, Zea Mays
atggcgacatcgccaccgcagaaccctagctccggcgagccctccgatgcgtcgagcctcgcagccgcggcgctcgaggcgcccgtgcgcgtatggagatccctcgtcgcgcgcttccctcccctcccggactcctccagcttccttgctggcgtctccgacctccagctccgctacttcggcaacagccggccccgccgccgcaggcgctccgctctacctctccctctccgcccggtggccgcgcactctgctcggattgctggtgagatgcccaaagcctttgtgatcttagatgatgttgtgcaacacaccctgactaatttgcacagtattcacaaaagcttactattttggcaggccaaggctgagggaacaaattctcagaaagtgtactttatgatatttgagagaggtccaagggcctttgttgatgcaacatatcaaacactcactagactcgggagcaatggacgccctgtccaatacattttgcattctgcatctgatatggtgtcaacaaaactcgctgccctgacaagtatgcaacactgcttggccgcttttcttgcagaggttcattctgaagttgataaatgcagggaaggattaactgaaaactcagataaatcgctacatacattattcattgttttgaataccacattctccaagttggaggtatcacttagaaatgcttgtgagggtcaagatgaactatttatagatgatggaaacttgcatgaactgtttgggaaattaccagaagttgatgtagagagttcagaatggacagaggccttggcaacagatggtacaagtttaatctatcaaaaccttcagaagctagatagttttctgtcctctcagccataaaagaccaaacaaattgaccatatattggttaccctatacatgtggagcagtaggtctctctgtgtgttctctgtggcttttacgccatagcagtttgatgggaagccctgatatcgacaattggattcgagatgctaaggagtctgtggctggattttgggatgaacatgttgagaaaccaatcatttccattagagatgagcttttcgagacattcaagcaaagagataaaggtgtaatggaaaagcaagaggtccaactaactgaagattcattgcgcaggatgttagttgccttttgtgagcaaacagagggtcaaaagttgctggaagatttaccagtgcaggcgatgttggagactctcacaaagagatacgagaaggaattgatacacccaattcaaaacctgttcagtggagaattagcccgtgctatgcttattcagattcaaaagcttaaactggaccttgaatcgggactactggaaatggatcagattctaagggcaaatgctataaactttgctgttcttgcagcgcttcctgcttttggtctttcacttctgttgcttgtgttactgcgagcatgggttcagcgtgaccatggtgctgagggaagaggtaatattgcacgatgtcaacggaggctgcttcttgttgatgtagagagaaggcttatggagtttcaacattacagggataatggaatggaggaagaggcacggtgcaagtttggcttagtactttacacgcttgatagactctgcaaagctgttgagtcacacgcaaaagaaacaggcgaatggttaagcttgagacaagatatttttgatctgtcgaagctcgacatgggaatgccagataagatgattgtcgtttcacggttgaagtggatgtataactgcttgcttccattctcatcgagccgtttgccacgcctctagagcagtgagcaactggacgtcgtgtgttgcattttggataaagattttgacacggatacctggaactctatgtcggaaggatggttctttcatgcccacaagatgttctgtagattttagcagagctggatgaagcatatcggaagggggcagattgggtggatgcagtatccatcgagccctccgttgacaattcttgcattgctaggcatgttgatttggattggctgttgcaccgaatggtttgcgtcgatgggctacatctacatgtgtgcgagcattgtaccctttggccttgttccacttgcaattccaattccaatggttgttccatatcccatactagttcataagtcataacatgacaacagaatgctcttcttttatctattccgcagagatgggtacaatcttatttaactgtttcatttgaaagaacgtgttattattcatgtggccacacgacaccctgggttcctttcacttgccgatgatggcgagcagcgcttccttgtagtggccatgggtgttcttggccacggcgtcggcgagctttgtcccgtactgcc

SEQ ID NO: 1756 - DNA, 2380 bp, Zea Mays
atggcgacatcgccaccgcagaaccctagctccggcgagccctccgatgcgtcgagcctcgcagccgcggcgctcgaggcgcccgtgcgcgtatggagatccctcgtcgcgcgcttccctcccctcccggactcctccagcttccttgctggcgtctccgacctccagctccgctacttcggcaacagccggccccgccgccgcaggcgctccgctctacctctccctctccgcccggtggccgcgcactctgctcggattgctggtgagatgcccaaagcctttgtgatcttagatgatgttgtgcaacacaccctgactaatttgcacagtattcacaaaagcttactattttggcaggccaaggctgagggaacaaattctcagaaagtgtactttatgatatttgagagaggtccaagggcctttgttgatgcaacatatcaaacactcactagactcgggagcaatggacgccctgtccaatacattttgcattctgcatctgatatggtgtcaacaaaactcgctgccctgacaagtatgcaacactgcttggccgcttttcttgcagaggttcattctgaagttgataaatgcagggaaggattaactgaaaactcagataaatcgctacatacattattcattgttttgaataccacattctccaagttggaggtatcacttagaaatgcttgtgagggtcaagatgaactatttatagatgatggaaacttgcatgaactgtttgggaaattaccagaagttgatgtagagagttcagaatggacagaggccttggcaacagatggtacaagtttaatctatcaaaaccttcagaagctagatagttttctgtcctctcagctcaagccataaaagaccaaacaaattgaccatatattggttaccctatacatgtggagcagtaggtctctctgtgtgttctctgtggcttttacgccatagcagtttgatgggaagccctgatatcgacaattggattcgagatgctaaggagtctgtggctggattttgggatgaacatgttgagaaaccaagatgagcttttcgagacattcaagcaaagagataaaggtgtaatggaaaagcaagaggtccaactaactgaagattcattgcgcaggatgttagttgccttttgtgagcaaacagagggtcaaaagttgctggaagatttaccagtgcaggcgatgttggagactctcacaaagagatacgagaaggaattgatacacccaattcaaaacctgttcagtggagaattagcccgtgctatgcttattcagattcaaaagcttaaactggaccttgaatcgggactactggaaatggatcagattctaagggcaaatgctataaactttgctgttcttgcagcgcttcctgcttttggtctttcacttctgttgcttgtgttactgcgagcatgggttcagcgtgaccatggtgctgagggaagaggtaatattgcacgatgtcaacggaggctgcttcttgttgatgtagagagaaggcttatggagtttcaacattacagggataatggaatggaggaagaggcacggtgcaagtttggcttagtactttacacgcttgatagactctgcaaagctgttgagtcacacgcaaaagaaacaggcgaatggttaagcttgagacaagatatttttgatctgtcgaagctcgacatgggaatgccagataagatgattgtcgtttcacggttgaagtggatgtataactgcttgcttccattctcatcgagccgtttgccacgcctctagagcagtgagcaactggacgtcgtgtgttgcattttggataaagattttgacacggatacctggaactctatgtcggaaggatggttctttcatgcccacaagatgttctgtagattttagcagagctggatgaagcatatcggaagggggcagattgggtggatgcagtatccatcgagccctccgttgacaattcttgcattgctaggcatgttgatttggattggctgttgcaccgaatggtttgcgtcgatgggctacatctacatgtgtgcgagcattgtaccctttggccttgttccacttgcaattccaattccaatggttgttccatatcccatactagttcataagtcataacatgacaacagaatgctcttcttttatctattccgcagagatgggtacaatcttatttaactgtttcatttgaaagaacgtgttattattcatgtggccacacgacaccctgggttcctttcacttgccgatgatggcgagcagcgcttccttgtagtggccatgggtgttcttggccacggcgtcggcgagctttgtcccgtactgcc

SEQ ID NO: 1757 - DNA, 1286 bp, Zea Mays
ctgacagctagcggagggagaaaagaatagagaggaggcttgacaccatgatagaggatgttagttgccttttgtgagcaaacagagggtcaaaagttgctggaagatttaccagtgcaggcgatgttggagactctcacaaagagatacgagaaggaattgatacacccaattcaaaacctgttcagtggagaattagcccgtgctatgcttattcagattcaaaagcttaaactggaccttgaatcgggactactggaaatggatcagattctaagggcaaatgctataaactttgctgttcttgcagcgcttcctgcttttggtctttcacttctgttgcttgtgttactgcgagcatgggttcagcgtgaccatggtgctgagggaagaggtaatattgcacgatgtcaacggaggctgcttcttgttgatgtagagagaaggcttatggagtttcaacattacagggataatggaatggaggaagaggcacggtgcaagtttggcttagtactttacacgcttgatagactctgcaaagctgttgagtcacacgcaaaagaaacaggcgaatggttaagcttgagacaagatatttttgatctgtcgaagctcgacatgggaatgccagataagatgattgtcgtttcacggttgaagtggatgtataactgcttgcttccattctcatcgagccgtttgccacgcctctagagcagtgagcaactggacgtcgtgtgttgcattttggataaagattttgacacggatacctggaactctatgtcggaaggatggttctttcatgcccacaagatgttctgtagattttagcagagctggatgaagcatatcggaagggggcagattgggtggatgcagtatccatcgagccctccgttgacaattcttgcattgctaggcatgttgatttggattggctgttgcaccgaatggtttgcgtcgatgggctacatctacatgtgtgcgagcattgtaccctttggccttgttccacttgcaattccaattccaatggttgttccatatcccatactagttcataagtcataacatgacaacagaatgctcttcttttatctattccgcagagatgggtacaatcttatttaactgtttcatttgaaagaacgtgttattattcatgtggccacacgacaccctgggttcctttcacttgccgatgatggcgagcagcgcttccttgtagtggccatgggtgttcttggccacggcgtcggcgagctttgtcccgtactgcc

SEQ ID NO: 1758 - DNA, 1254 bp, Zea Mays
ggagaaccctaaccctaaatcagggatgttagttgccttttgtgagcaaacagagggtcaaaagttgctggaagatttaccagtgcaggcgatgttggagactctcacaaagagatacgagaaggaattgatacacccaattcaaaacctgttcagtggagaattagcccgtgctatgcttattcagattcaaaagcttaaactggaccttgaatcgggactactggaaatggatcagattctaagggcaaatgctataaactttgctgttcttgcagcgcttcctgcttttggtctttcacttctgttgcttgtgttactgcgagcatgggttcagcgtgaccatggtgctgagggaagaggtaatattgcacgatgtcaacggaggctgcttcttgttgatgtagagagaaggcttatggagtttcaacattacagggataatggaatggaggaagaggcacggtgcaagtttggcttagtactttacacgcttgatagactctgcaaagctgttgagtcacacgcaaaagaaacaggcgaatggttaagcttgagacaagatatttttgatctgtcgaagctcgacatgggaatgccagataagatgattgtcgtttcacggttgaagtggatgtataactgcttgcttccattctcatcgagccgtttgccacgcctctagagcagtgagcaactggacgtcgtgtgttgcattttggataaagattttgacacggatacctggaactctatgtcggaaggatggttctttcatgcccacaagatgttctgtagattttagcagagctggatgaagcatatcggaagggggcagattgggtggatgcagtatccatcgagccctccgttgacaattcttgcattgctaggcatgttgatttggattggctgttgcaccgaatggtttgcgtcgatgggctacatctacatgtgtgcgagcattgtaccctttggccttgttccacttgcaattccaattccaatggttgttccatatcccatactagttcataagtcataacatgacaacagaatgctcttcttttatctattccgcagagatgggtacaatcttatttaactgtttcatttgaaagaacgtgttattattcatgtggccacacgacaccctgggttcctttcacttgccgatgatggcgagcagcgcttccttgtagtggccatgggtgttcttggccacggcgtcggcgagctttgtcccgtactgcc

SEQ ID NO: 1759 - DNA, 3009 bp, Zea Mays
cctccctcccctcctccactcctgaccctccaacgttccctccctggaagtgggccgcctcccgatctccccacaccgacaatgctgccgcgccgcgcgcgggcgcgcgggcgccggcgctgctaggatcctcgcgcgaccccgcgccacgccggcgagaaccccgaccactacccggcggggcgagggcgaccaatgcgcgagcgcgcccggcacgcgacccgggtgtcaccgatgccgccgcccacgggtggcgaggaccccgaggccgacgcggcgccctcctgcagtggctcagccgacgaagccgacccccacgagcaggtgctccccaacggcgacatctacacgggccagtggcgcggcgccgtgccccacggcgccggcaagtacctctgggcggacgggtgcatgtatgagggcgagtggcgccgcggcaaggccaccggccgcggcaggttctcctggccctcgggcgccacctacgagggcgagttcctcgacggcttcatgcacggcgccggcacctacgttggtgcctcgggggacacctaccgcggcgtctgggccaagaacctcgagcatggcgccggcgagaaacgctacgctaacggcgactgctacgacggcgagtggcgcgcggggctccccgatggttgcggacgctacgcctggcgcgacggcaccgagtacgccggcggctggcgcgctgggctcatccacggccgcggcacgctcgtctgggccaatggcaatcgctacgatggcggttgggagggcggccgaccccgcgggcagggcacgttccgctgggccgacggcagcctctacgttggcttctggggccgcgaggcgcccagcggcgccgtccaccagaagggcgtttactacccgtccccggcggcgatgggcaactccccccgggcgcgcgacccgagggaggtgtttgcacgtgacctgccggagtgcgtgcgctccggaaccgaggcccaatcagcgctcacgtctctgagatccctcaaatggctgatgcggtcggtcagcgggcgcggcagctcgtcgtctggctggagcaatggctcgggaggcagcctcgtgcacttctgggggtcggacggggaggtcaagtgcgaccttggggacgactggagacggcggagcgtcagagaagggagggggctgccaccaccgtcgcccgctctggttccatacctgcccaacggcgcgcccctgcggttgtccaagaagcagggggtgaccattgccaaagggcataagaactatgagctaatgctcaatctgcagctcgggatcaggcatgcagtaggaaggcaaggtcaagttttattagatctgaaatcatcagcatttgatccaaaagagaaagtgtggacaaaattccctcctgaaggctcaaaacatacccctccacacaattcttgtgatttcaaatggaaggattactgcccaaaggtgttccgaacactccgtaagctgttcaaggttgacccagctgattatatgttgtccctctgtggagatgatgctcttcgtgagctctcatcccctggtaagagtggaagcttcttttacttgacaaatgatgatcgttacatgataaaaacaatgaagaaaggtgaagtgaagatgcttttgaggatgcttcaagcttactacaatcatgtccgtgcatttgaggataccttagtgacaaagttctttggcctacattgtgtgaagtctggatcacaccagaagaaggttcgttttgtgataatgggaaatttgttctgctctgatcatactatccataggcgatttgatctgaaaggatcatctcttggccgtataactgacaagccaccagcagaaattgatgagtatacaactctgaaagaccttgatcttaactttatctttcggttacagaaacaatggtaccaagagtttcaaaggcaagtggacaaggactgtgagttcctcgagcaggagaagattatggattacagtctattggtgggtgtacattttagaggtgccattgacattgatggtgacaaacccgcaacacctcgcgtttcaagatgggacagagatcattttcgttctgatccaaataggtggtcaaaaattaagcttggagcaaacatgctgtcaagagctgaactgacaatccgaaagaacgacagtgatgtttttggagagccaaccggggagtactgtgacgttatcttatacttcgggattatagacatacttcaagactatgatattggcaaaaggctagagcatgcctacaaatcttttcagtatgattcgacgtccatttcagcggttgatccaaaacagtattccaggcgcttcaaagatttcatatacaaagctttccaagaagataaactagacagctgagaacagtgcattgcgacattggatttggcaggaattcggcagcttctttagggaaaggagtccgggtgattggggtcgctggagcacctggtggccccacagtttccaggaaacagattggccgtcatgtacatactacaaagcaacatgcacagatacggagtccagtcagtcattcacaaagagtaggaaatgtaacttgcagaatcaaattatacatagaaacatgtaatcgaatgtcccgagccgagccttcaggggttgtaaatgctctttgtttcagaggataccattcttgtcttgtatcggtagtcgttactttcttcgatagaattgggggccagttttgcctttgcactttcttttctttgaacaaagcacgacgtactgaggtgcttatttgattgatagaggcacgtcacacctgagaatattgtcagctgtacgaaatcctaatcgactccgttaactttttttttctgtaccattccagagaactccgtacttgctaccgcattagagattgttcacctctatcttgtcatccattgatctcaatgtatccatttacttatttgaatgcttcaaagagttagg

SEQ ID NO: 1760 - DNA, 2977 bp, Zea Mays
ctccactcctgaccctccaacgttccctccctggaagtgggccgcctcccgatctccccacaccgacaatgctgccgcgccgcgcgcgggcgcgcgggcgccggcgctgctaggatcctcgcgcgaccccgcgccacgccggcgagaaccccgaccactacccggcggggcgagggcgaccaatgcgcgagcgcgcccggcacgcgacccgggtgtcaccgatgccgccgcccacgggtggcgaggaccccgaggccgacgcggcgccctcctgcagtggctcagccgacgaagccgacccccacgagcaggtgctccccaacggcgacatctacacgggccagtggcgcggcgccgtgccccacggcgccggcaagtacctctgggcggacgggtgcatgtatgagggcgagtggcgccgcggcaaggccaccggccgcggcaggttctcctggccctcgggcgccacctacgagggcgagttcctcgacggcttcatgcacggcgccggcacctacgttggtgcctcgggggacacctaccgcggcgtctgggccaagaacctcgagcatggcgccggcgagaaacgctacgctaacggcgactgctacgacggcgagtggcgcgcggggctccccgatggttgcggacgctacgcctggcgcgacggcaccgagtacgccggcggctggcgcgctgggctcatccacggccgcggcacgctcgtctgggccaatggcaatcgctacgatggcggttgggagggcggccgaccccgcgggcagggcacgttccgctgggccgacggcagcctctacgttggcttctggggccgcgaggcgcccagcggcgccgtccaccagaagggcgtttactacccgtccccggcggcgatgggcaactccccccgggcgcgcgacccgagggaggtgtttgcacgtgacctgccggagtgcgtgcgctccggaaccgaggcccaatcagcgctcacgtctctgagatccctcaaatggctgatgcggtcggtcagcgggcgcggcagctcgtcgtctggctggagcaatggctcgggaggcagcctcgtgcacttctgggggtcggacggggaggtcaagtgcgaccttggggacgactggagacggcggagcgtcagagaagggagggggctgccaccaccgtcgcccgctctggttccatacctgcccaacggcgcgcccctgcggttgtccaagaagcagggggtgaccattgccaaagggcataagaactatgagctaatgctcaatctgcagctcgggatcaggcatgcagtaggaaggcaaggtcaagttttattagatctgaaatcatcagcatttgatccaaaagagaaagtgtggacaaaattccctcctgaaggctcaaaacatacccctccacacaattcttgtgatttcaaatggaaggattactgcccaaaggtgttccgaacactccgtaagctgttcaaggttgacccagctgattatatgttgtccctctgtggagatgatgctcttcgtgagctctcatcccctggtaagagtggaagcttcttttacttgacaaatgatgatcgttacatgataaaaacaatgaagaaaggtgaagtgaagatgcttttgaggatgcttcaagcttactacaatcatgtccgtgcatttgaggataccttagtgacaaagttctttggcctacattgtgtgaagtctggatcacaccagaagaaggttcgttttgtgataatgggaaatttgttctgctctgatcatactatccataggcgatttgatctgaaaggatcatctcttggccgtataactgacaagccaccagcagaaattgatgagtatacaactctgaaagaccttgatcttaactttatctttcggttacagaaacaatggtaccaagagtttcaaaggcaagtggacaaggactgtgagttcctcgagcaggagaagattatggattacagtctattggtgccattgacattgatggtgacaaacccgcaacacctcgcgtttcaagatgggacagagatcattttcgttctgatccaaataggtggtcaaaaattaagcttggagcaaacatgctgtcaagagctgaactgacaatccgaaagaacgacagtgatgtttttggagagccaaccggggagtactgtgacgttatcttatacttcgggattatagacatacttcaagactatgatattggcaaaaggctagagcatgcctacaaatcttttcagtatgattcgacgtccatttcagcggttgatccaaaacagtattccaggcgcttcaaagatttcatatacaaagctttccaagaagataaactagacagctgagaacagtgcattgcgacattggatttggcaggaattcggcagcttctttagggaaaggagtccgggtgattggggtcgctggagcacctggtggccccacagtttccaggaaacagattggccgtcatgtacatactacaaagcaacatgcacagatacggagtccagtcagtcattcacaaagagtaggaaatgtaacttgcagaatcaaattatacatagaaacatgtaatcgaatgtcccgagccgagccttcaggggttgtaaatgctctttgtttcagaggataccattcttgtcttgtatcggtagtcgttactttcttcgatagaattgggggccagttttgcctttgcactttcttttctttgaacaaagcacgacgtactgaggtgcttatttgattgatagaggcacgtcacacctgagaatattgtcagctgtacgaaatcctaatcgactccgttaactttttttttctgtaccattccagagaactccgtacttgctaccgcattagagattgttcacctctatcttgtcatccattgatctcaatgtatccatttacttatttgaatgcttcaaagagttagg

SEQ ID NO: 1761 - DNA, 2767 bp, Zea Mays
cgaccaatgcgcgagcgcgcccggcacgcgacccgggtgtcaccgatgccgccgcccacgggtggcgaggaccccgaggccgacgcggcgccctcctgcagtggctcagccgacgaagccgacccccacgagcaggtgctccccaacggcgacatctacacgggccagtggcgcggcgccgtgccccacggcgccggcaagtacctctgggcggacgggtgcatgtatgagggcgagtggcgccgcggcaaggccaccggccgcggcaggttctcctggccctcgggcgccacctacgagggcgagttcctcgacggcttcatgcacggcgccggcacctacgttggtgcctcgggggacacctaccgcggcgtctgggccaagaacctcgagcatggcgccggcgagaaacgctacgctaacggcgactgctacgacggcgagtggcgcgcggggctccccgatggttgcggacgctacgcctggcgcgacggcaccgagtacgccggcggctggcgcgctgggctcatccacggccgcggcacgctcgtctgggccaatggcaatcgctacgatggcggttgggagggcggccgaccccgcgggcagggcacgttccgctgggccgacggcagcctctacgttggcttctggggccgcgaggcgcccagcggcgccgtccaccagaagggcgtttactacccgtccccggcggcgatgggcaactccccccgggcgcgcgacccgagggaggtgtttgcacgtgacctgccggagtgcgtgcgctccggaaccgaggcccaatcagcgctcacgtctctgagatccctcaaatggctgatgcggtcggtcagcgggcgcggcagctcgtcgtctggctggagcaatggctcgggaggcagcctcgtgcacttctgggggtcggacggggaggtcaagtgcgaccttggggacgactggagacggcggagcgtcagagaagggagggggctgccaccaccgtcgcccgctctggttccatacctgcccaacggcgcgcccctgcggttgtccaagaagcagggggtgaccattgccaaagggcataagaactatgagctaatgctcaatctgcagctcgggatcaggcatgcagtaggaaggcaaggtcaagttttattagatctgaaatcatcagcatttgatccaaaagagaaagtgtggacaaaattccctcctgaaggctcaaaacatacccctccacacaattcttgtgatttcaaatggaaggattactgcccaaaggtgttccgaacactccgtaagctgttcaaggttgacccagctgattatatgttgtccctctgtggagatgatgctcttcgtgagctctcatcccctggtaagagtggaagcttcttttacttgacaaatgatgatcgttacatgataaaaacaatgaagaaaggtgaagtgaagatgcttttgaggatgcttcaagcttactacaatcatgtccgtgcatttgaggataccttagtgacaaagttctttggcctacattgtgtgaagtctggatcacaccagaagaaggcgatttgatctgaaaggatcatctcttggccgtataactgacaagccaccagcagaaattgatgagtatacaactctgaaagaccttgatcttaactttatctttcggttacagaaacaatggtaccaagagtttcaaaggcaagtggacaaggactgtgagttcctcgagcaggagaagattatggattacagtctattggtgggtgtacattttagaggtgccattgacattgatggtgacaaacccgcaacacctcgcgtttcaagatgggacagagatcattttcgttctgatccaaataggtggtcaaaaattaagcttggagcaaacatgctgtcaagagctgaactgacaatccgaaagaacgacagtgatgtttttggagagccaaccggggagtactgtgacgttatcttatacttcgggattatagacatacttcaagactatgatattggcaaaaggctagagcatgcctacaaatcttttcagtatgattcgacgtccatttcagcggttgatccaaaacagtattccaggcgcttcaaagatttcatatacaaagctttccaagaagataaactagacagctgagaacagtgcattgcgacattggatttggcaggaattcggcagcttctttagggaaaggagtccgggtgattggggtcgctggagcacctggtggccccacagtttccaggaaacagattggccgtcatgtacatactacaaagcaacatgcacagatacggagtccagtcagtcattcacaaagagtaggaaatgtaacttgcagaatcaaattatacatagaaacatgtaatcgaatgtcccgagccgagccttcaggggttgtaaatgctctttgtttcagaggataccattcttgtcttgtatcggtagtcgttactttcttcgatagaattgggggccagttttgcctttgcactttcttttctttgaacaaagcacgacgtactgaggtgcttatttgattgatagaggcacgtcacacctgagaatattgtcagctgtacgaaatcctaatcgactccgttaactttttttttctgtaccattccagagaactccgtacttgctaccgcattagagattgttcacctctatcttgtcatccattgatctcaatgtatccatttacttatttgaatgcttcaaagagttagg

SEQ ID NO: 1762 - DNA, 2802 bp, Zea Mays
cgaccaatgcgcgagcgcgcccggcacgcgacccgggtgtcaccgatgccgccgcccacgggtggcgaggaccccgaggccgacgcggcgccctcctgcagtggctcagccgacgaagccgacccccacgagcaggtgctccccaacggcgacatctacacgggccagtggcgcggcgccgtgccccacggcgccggcaagtacctctgggcggacgggtgcatgtatgagggcgagtggcgccgcggcaaggccaccggccgcggcaggttctcctggccctcgggcgccacctacgagggcgagttcctcgacggcttcatgcacggcgccggcacctacgttggtgcctcgggggacacctaccgcggcgtctgggccaagaacctcgagcatggcgccggcgagaaacgctacgctaacggcgactgctacgacggcgagtggcgcgcggggctccccgatggttgcggacgctacgcctggcgcgacggcaccgagtacgccggcggctggcgcgctgggctcatccacggccgcggcacgctcgtctgggccaatggcaatcgctacgatggcggttgggagggcggccgaccccgcgggcagggcacgttccgctgggccgacggcagcctctacgttggcttctggggccgcgaggcgcccagcggcgccgtccaccagaagggcgtttactacccgtccccggcggcgatgggcaactccccccgggcgcgcgacccgagggaggtgtttgcacgtgacctgccggagtgcgtgcgctccggaaccgaggcccaatcagcgctcacgtctctgagatccctcaaatggctgatgcggtcggtcagcgggcgcggcagctcgtcgtctggctggagcaatggctcgggaggcagcctcgtgcacttctgggggtcggacggggaggtcaagtgcgaccttggggacgactggagacggcggagcgtcagagaagggagggggctgccaccaccgtcgcccgctctggttccatacctgcccaacggcgcgcccctgcggttgtccaagaagcagggggtgaccattgccaaagggcataagaactatgagctaatgctcaatctgcagctcgggatcaggcatgcagtaggaaggcaaggtcaagttttattagatctgaaatcatcagcatttgatccaaaagagaaagtgtggacaaaattccctcctgaaggctcaaaacatacccctccacacaattcttgtgatttcaaatggaaggattactgcccaaaggtgttccgaacactccgtaagctgttcaaggttgacccagctgattatatgttgtccctctgtggagatgatgctcttcgtgagctctcatcccctggtaagagtggaagcttcttttacttgacaaatgatgatcgttacatgataaaaacaatgaagaaaggtgaagtgaagatgcttttgaggatgcttcaagcttactacaatcatgtccgtgcatttgaggataccttagtgacaaagttctttggcctacattgtgtgaagtctggatcacaccagaagaagggttcgttttgtgataatgggaaatttgttctgctctgatcatactatccataggcgatttgatctgaaaggatcatctcttggccgtataactgacaagccaccagcagaaattgatgagtatacaactctgaaagaccttgatcttaactttatctttcggttacagaaacaatggtaccaagagtttcaaaggcaagtggacaaggactgtgagttcctcgagcaggagaagattatggattacagtctattggtgccattgacattgatggtgacaaacccgcaacacctcgcgtttcaagatgggacagagatcattttcgttctgatccaaataggtggtcaaaaattaagcttggagcaaacatgctgtcaagagctgaactgacaatccgaaagaacgacagtgatgtttttggagagccaaccggggagtactgtgacgttatcttatacttcgggattatagacatacttcaagactatgatattggcaaaaggctagagcatgcctacaaatcttttcagtatgattcgacgtccatttcagcggttgatccaaaacagtattccaggcgcttcaaagatttcatatacaaagctttccaagaagataaactagacagctgagaacagtgcattgcgacattggatttggcaggaattcggcagcttctttagggaaaggagtccgggtgattggggtcgctggagcacctggtggccccacagtttccaggaaacagattggccgtcatgtacatactacaaagcaacatgcacagatacggagtccagtcagtcattcacaaagagtaggaaatgtaacttgcagaatcaaattatacatagaaacatgtaatcgaatgtcccgagccgagccttcaggggttgtaaatgctctttgtttcagaggataccattcttgtcttgtatcggtagtcgttactttcttcgatagaattgggggccagttttgcctttgcactttcttttctttgaacaaagcacgacgtactgaggtgcttatttgattgatagaggcacgtcacacctgagaatattgtcagctgtacgaaatcctaatcgactccgttaactttttttttctgtaccattccagagaactccgtacttgctaccgcattagagattgttcacctctatcttgtcatccattgatctcaatgtatccatttacttatttgaatgcttcaaagagttagg

SEQ ID NO: 1763 - DNA, 1916 bp, Zea Mays
cggggggagaggagagagaaactttgaaagggtccggttctgctggggtcgcgggtctctggatggggacaacacgtgcggcattgccgagaggaggtgcgagagcgacgcttttggagaaggacgaagacgacgacgagggggcgcgccgcgacgggccctacgccggcggtcggcgcgggccgcggcggcagggcgagaccatagccaagggccacaagaactacgagctcatgctgaacctgcagctcggcatcaggcacgcagtaggaaagcaaggcccaattacacttgatctcaagtcatcagcattcgaccccaaggagaaagtatggacaaggttcccaccggaaggctcgaaatacactcctccacacagttcgtgcgacttcagatggaaggactactgcccgcaagtattccggacgttgcgcaagctgttcaaggtcgatgccgcggactacatgctgtctctctgtggagaccaggctctccgggagctctcgtctccgggcaagagtgggagcttcttctatctcacgagcaacgaccagtacatgatcaagacgatgaagaaatctgaagtgaagatatttctgaagatgattcgagcttattacaaccatgtcagagcgttcgagagcactctggtcaccaagttcttcggtcttcactgtgtcaagttagctggagcgaaccaaaagaaggtccgttttgtcataatgggaaacctgttctgctccgactactccatccataggcggtttgacctgaaaggttcgtcactgggacggacgacggataagccacagacggagattgacgagtacactaccctgaaggatcttgatcttaacttcgtgttccggttgcaaaagcactggtaccaggagttccaaaggtcgacagggactgcgagtttctggagcaggaaaatatcatggactatagtcttctggttggtgtacattttagggacactagggataggctattgaccggaggttcattcgatagcgactgcagcagaggatcgtcgcctcacttgtctcgaggagatacggatccaaacaggttagccaagataaaacttgggtctaacatgccgacgagagccgaacggacgatacgaaagggtgactgtgaggtgcagatcatgggagagcctacgggggagttgtacgatgtcatactgtacttcgggatcatagacatcctccaggactacgacatcagcaagaagctcgagcacgcgtacaagtccttccagtacgacccgacgtccatttcggcggtggatccgaagcagtactcgaggcgcttcagggatttcgtgttcaaagcgttccaggaagacaggttcgacttgtgaagggacgcgtgggaagctcgatcgggaggctaccgttgccgctgacacgggttaaccagtgttgagatccgcactgcagcagagcttttggtgaccctacttccacttgcactcgccggattgatgaagctcctgcatgcattgcatgcggagtctccaaggggatttcagctggcactcatgcattcaagtaaaggctccaattcgagataccggtgcgtttcaataagcaggttcaacagtatctttcattacaaaaaaaacagctctgcttttcgggcagctgctatgtcgcactgcacagtgtggcgtagcgcagcgatggcaagctaagcctaagaaaaaaacatacgtgcatatagaaaccactgatattagtgtagacgctgacaacctacggagaaatttgtaattgcagttcagggatgtaaatctttttacgaggcaacaggtcacagttcttattgtctggtagtgatagcagtgtgcgcatttcaatatattctctgatggaattgtcttgggtttggatcataagttgttt

SEQ ID NO: 1764 - DNA, 1861 bp, Zea Mays
atggggacaacacgtgcggcattgccgagaggaggtgcgagagcgacgcttttggagaaggacgaagacgacgacgagggggcgcgccgcgacgggccctacgccggcggtcggcgcgggccgcggcggcagggcgagaccatagccaagggccacaagaactacgagctcatgctgaacctgcagctcggcatcaggcacgcagtaggaaagcaaggcccaattacacttgatctcaagtcatcagcattcgaccccaaggagaaagtatggacaaggttcccaccggaaggctcgaaatacactcctccacacagttcgtgcgacttcagatggaaggactactgcccgcaagtattccggacgttgcgcaagctgttcaaggtcgatgccgcggactacatgctgtctctctgtggagaccaggctctccgggagctctcgtctccgggcaagagtgggagcttcttctatctcacgagcaacgaccagtacatgatcaagacgatgaagaaatctgaagtgaagatatttctgaagatgattcgagcttattacaaccatgtcagagcgttcgagagcactctggtcaccaagttcttcggtcttcactgtgtcaagttagctggagcgaaccaaaagaaggtccgttttgtcataatgggaaacctgttctgctccgactactccatccataggcggtttgacctgaaaggttcgtcactgggacggacgacggataagccacagacggagattgacgagtacactaccctgaaggatcttgatcttaacttcgtgttccggttgcaaaagcactggtaccaggagttccaaagacaggtcgacagggactgcgagtttctggagcaggaaaatatcatggactatagtcttctggttggtgtacattttagggacactagggataggctattgaccggagaaggttcattcgatagcgactgcagcagaggatcgtcgcctcacttgtctcgaggagatacggatccaaacaggttagccaagataaaacttgggtctaacatgccgacgagagccgaacggacgatacgaaagggtgactgtgaggtgcagatcatgggagagcctacgggggagttgtacgatgtcatactgtacttcgggatcatagacatcctccaggactacgacatcagcaagaagctcgagcacgcgtacaagtccttccagtacgacccgacgtccatttcggcggtggatccgaagcagtactcgaggcgcttcagggatttcgtgttcaaagcgttccaggaagacaggttcgacttgtgaagggacgcgtgggaagctcgatcgggaggctaccgttgccgctgacacgggttaaccagtgttgagatccgcactgcagcagagcttttggtgaccctacttccacttgcactcgccggattgatgaagctcctgcatgcattgcatgcggagtctccaaggggatttcagctggcactcatgcattcaagtaaaggctccaattcgagataccggtgcgtttcaataagcaggttcaacagtatctttcattacaaaaaaaacagctctgcttttcgggcagctgctatgtcgcactgcacagtgtggcgtagcgcagcgatggcaagctaagcctaagaaaaaaacatacgtgcatatagaaaccactgatattagtgtagacgctgacaacctacggagaaatttgtaattgcagttcagggatgtaaatctttttacgaggcaacaggtcacagttcttattgtctggtagtgatagcagtgtgcgcatttcaatatattctctgatggaattgtcttgggtttggatcataagttgttt

SEQ ID NO: 1765 - DNA, 3873 bp, Zea Mays
caggcaagcgcaaaagccgcggcgtccatccaccccgacccatccaatccgttccattcctacgtcggctcggacctcggagacacagggatcgtcttcgtccccggcctctcgccttcctccacccccctctcctctctctcgctggctcgtggccaacccacccacccacctccgctccgccccgcttccatcgatccattccgcgatcggccttacacgtctaacagtacatgagtttctaactggtgcgagcccaagtaaagttctgtaattagtcacattcctgcacaatgtcgactgcgaaagtggtgcttgagcctgcatttcaaggagctggccataaaccagggacagagatatggaggatcgaggatttcaagccagtcgctttgccaaaatcagactatggcaaattctactgtggagattcttatatagttctgcagacgacatgtaaaggaggtgcttttatttttgacatccatttctggatcggaaaagattccagccaggatgaagctggaactgcggcgatcaagacagttgagcttgacagcatgctcgggggccgtgcggtgcagcacagggagccacagtgctacgagtctgataaattcctctcgtattttaaaccgtgcatcatacccatggagggcggctttgcttctgggttcaaaaagccagaagtggacaagtttgaaacacgtctatatatctgcaaagggaagagagctatcagagttaaagaggttccattttctcgttcatcgttgaaccatgatgatgtctttatcttggatactgagaacaaaatatatcaattcaacggtgcaaactccaacatccaagaaagagccaaagccttggaagtgatccagcatttaaaggaggaataccatgacggagtgtgcgctgttgcaatcgtcgatgatgggaaactgcaagcagaatcagattcaggagaattctgggtcctttttggaggttttgcgccaatagggaaaaaagcaataagtgatgatgatgttgttcttgaaactacatcaccaaagcttttcagtatcagtaacggccaactgaagttagaagacgctgtccttacaaaatcaattttggagaacaccaagtgctttttacttgactgcggggctgagctattcgtgtgggttggtcgggtaacacaggtagaggacaggaaagctgccagtgcagcagttgagaaatacattattaaagaaaatagaccaaagacaacaagaataactcaagtgatccaaggttacgagaatcatacgttcaagtctaagtttgagtcatggcctgtaagtaacacgtcagggagtgccagcacggaggaaggccgagggaaagttacagcactcttgaagcagaaaggtgttgatgtcaaaggaatctcaaaaactagtgtgccagtaaatgacgaagttcctcctttgctggatggcggtggaaagcttgaggtttggtgtattgatggcagtgccaagactgctcttccaaaggaagaacttggaaaattctacagcggagactgctatgttgttctctacacttatcattctgctgaaaaaaaagaagagttctatctagcttattggattgggaaaaatagtgtacaggaagatcaagaggcggcttttcaaatagctaatacaacttttaattctttgaaaggaagacctgtccagggtcgtatttatcaaggaaaagagccaccacaatttgtggctattttccagccaatggttattcttaagggtggtactagctctggttataagaaatttgtagaagagaagggtctgaaagatgaaacgtattgttctgatggcactgctctcattcaaatttctggaacagcggttcataacaataaaacgcttcaagttgatgcggtcgcaacatccttgagttccacagattgttttgttttgcaagctaaaaactcgatgtttatatggaatgggaatgcaagttcttttgaacaacaacagtgggctgctaaagttgctgaatttctgaagaccggtgttgctgtcaagcattgcaaggagggcactgagagctctattttctggtcttctattggtggaaagcagagttatacaaatagaaatgctgcacctgatgttgttattagagagcctcatttgtataccttctctctgaggaatgtgaccctaatttttcattttcattttttggcttcaatcgcgataacatcgtcaccatttgtcagggaagctggagatgatctgttgaccgaagacatgatgatacttgatacacactgtgaggtttttgtttggatgggtcagtgtgtggagacaaaagaaaaacagaaagcatttgacattggccagaaatacgtacaacatgccgtggcctttgaaggtatttctcctgatgtgcctctctataaagtcaatgaagggaatgaaccttgcttcttcaggacatacttctcctgggatagcgcacgatccgtgggtggcaataagggctcaggtgatggtgggccaactcaaagggcatcagccttggccgctctttcatctgcattgaatccatcgtcgcaaggaaaacagtcagatgagaagcccacaagctcagatgacagcgagcatactcaacgagcttcagcaatggctgccttgtcctctgcccttaatccatcgacaaaacctagcagcacacagacacaatctcattcaggtcaagggtctcaaagagccgctgctgttgcagcactgtccaatgttttgactgcagagggatctcatagcccccgccacagtaggtcgtccccaacagcagatgcagacaagactgaattagttcctacttctccccatcaattagaaacagggactgcagaagatgtccgaacagagcctgatgtctcacaggaacaaacagctaaagaaaatggaggccagacaacctttagctatgaacgattgatatcaaagtccactgaccctgttagtgggataaacaacaagcgcagagaggcaaggttattcacaataaagagtaaatggacatatttggtggacagtgaattcgagaccgtatttggcatgactaaggaggagttctacgagcagccaaggtggaagcaagagttgcagaaaaagaaagccgatcttttctgagacaaggctggcttcgaactaataaaagcccttacgtcgcacaggattgtccagcattctcatcatgctcgttccgcgtatgatgatcgatcaccagcagctttatccgtgagttgtataggctactcttttatctgcacatggtttgggagcattatatatatatcccccttgcccgtccattattctgaggtcgttcttgatgttgacctttcacgtgttttctttttttattgtattataaaaaatcaaactggtgtaaatggcattactagtgagatttttgtaagtaatggtgcatgggcaccaaggtgtatgcaacatatttttgttgtaagacttcagcttctattgttctggtggtgttctattgaccactggtctaatcatctttactggcttaggtaatggccaacatatcatggaccatgcaaaacactgtttcacattatagattactttatttataaaataaagtttgaaataaaagacgtagataagtaagctgctggagatagcattaccgctgagcactgcagctgtgctcaatgatgatatggttggtttgacaccctactagtcttcttgatggtgtggctgcggctctggaaggagaggaacaggctattttcaaagtatgaatctgtatggtgatgataaaaatttccaattagcctttcataaaaaagaa

SEQ ID NO: 1766 - DNA, 3821 bp, Zea Mays
cgtccatccaccccgacccatccaatccgttccattcctacgtcggctcggacctcggagacacagggatcgtcttcgtccccggcctctcgccttcctccacccccctctcctctctctcgctggctcgtggccaacccacccacccacctccgctccgccccgcttccatcgatccattccgcgatcggccttacacgtctaacagtacatgagtttctaactggtgcgagcccaagtaaagttctgtaattagtcacattcctgcacaatgtcgactgcgaaagtggtgcttgagcctgcatttcaaggagctggccataaaccagggacagagatatggaggatcgaggatttcaagccagtcgctttgccaaaatcagactatggcaaattctactgtggagattcttatatagttctgcagacgacatgtaaaggaggtgcttttatttttgacatccatttctggatcggaaaagattccagccaggatgaagctggaactgcggcgatcaagacagttgagcttgacagcatgctcgggggccgtgcggtgcagcacagggagccacagtgctacgagtctgataaattcctctcgtattttaaaccgtgcatcatacccatggagggcggctttgcttctgggttcaaaaagccagaagtggacaagtttgaaacacgtctatatatctgcaaagggaagagagctatcagagttaaagaggttccattttctcgttcatcgttgaaccatgatgatgtctttatcttggatactgagaacaaaatatatcaattcaacggtgcaaactccaacatccaagaaagagccaaagccttggaagtgatccagcatttaaaggaggaataccatgacggagtgtgcgctgttgcaatcgtcgatgatgggaaactgcaagcagaatcagattcaggagaattctgggtcctttttggaggttttgcgccaatagggaaaaaagcaataagtgatgatgatgttgttcttgaaactacatcaccaaagcttttcagtatcagtaacggccaactgaagttagaagacgctgtccttacaaaatcaattttggagaacaccaagtgctttttacttgactgcggggctgagctattcgtgtgggttggtcgggtaacacaggtagaggacaggaaagctgccagtgcagcagttgagaaatacattattaaagaaaatagaccaaagacaacaagaataactcaagtgatccaaggttacgagaatcatacgttcaagtctaagtttgagtcatggcctgtaagtaacacgtcagggagtgccagcacggaggaaggccgagggaaagttacagcactcttgaagcagaaaggtgttgatgtcaaaggaatctcaaaaactagtgtgccagtaaatgacgaagttcctcctttgctggatggcggtggaaagcttgaggtttggtgtattgatggcagtgccaagactgctcttccaaaggaagaacttggaaaattctacagcggagactgctatgttgttctctacacttatcattctgctgaaaaaaaagaagagttctatctagcttattggattgggaaaaatagtgtacaggaagatcaagaggcggcttttcaaatagctaatacaacttttaattctttgaaaggaagacctgtccagggtcgtatttatcaaggaaaagagccaccacaatttgtggctattttccagccaatggttattcttaagggtggtactagctctggttataagaaatttgtagaagagaagggtctgaaagatgaaacgtattgttctgatggcactgctctcattcaaatttctggaacagcggttcataacaataaaacgcttcaagttgatgcggtcgcaacatccttgagttccacagattgttttgttttgcaagctaaaaactcgatgtttatatggaatgggaatgcaagttcttttgaacaacaacagtgggctgctaaagttgctgaatttctgaagaccggtgttgctgtcaagcattgcaaggagggcactgagagctctattttctggtcttctattggtggaaagcagagttatacaaatagaaatgctgcacctgatgttgttattagagagcctcatttgtataccttctctctgaggaatgtgaccctaatttttcattttcattttttggcttcaatcgcgataacatcgtcaccatttgtcagggaagctggagatgatctgttgaccgaagacatgatgatacttgatacacactgtgaggtttttgtttggatgggtcagtgtgtggagacaaaagaaaaacagaaagcatttgacattggccagaaatacgtacaacatgccgtggcctttgaaggtatttctcctgatgtgcctctctataaagtcaatgaagggaatgaaccttgcttcttcaggacatacttctcctgggatagcgcacgatccgtgggtggcaataagggctcaggtgatggtgggccaactcaaagggcatcagccttggccgctctttcatctgcattgaatccatcgtcgcaaggaaaacagtcagatgagaagcccacaagctcagatgacagcgagcatactcaacgagcttcagcaatggctgccttgtcctctgcccttaatccatcgacaaaacctagcagcacacagacacaatctcattcaggtcaagggtctcaaagagccgctgctgttgcagcactgtccaatgttttgactgcagagggatctcatagcccccgccacagtaggtcgtccccaacagcagatgcagacaagactgaattagttcctacttctccccatcaattagaaacagggactgcagaagatgtccgaacagagcctgatgtctcacaggaacaaacagctaaagaaaatggaggccagacaacctttagctatgaacgattgatatcaaagtccactgaccctgttagtgggataaacaacaagcgcagagagacatatttggtggacagtgaattcgagaccgtatttggcatgactaaggaggagttctacgagcagccaaggtggaagcaagagttgcagaaaaagaaagccgatcttttctgagacaaggctggcttcgaactaataaaagcccttacgtcgcacaggattgtccagcattctcatcatgctcgttccgcgtatgatgatcgatcaccagcagctttatccgtgagttgtataggctactcttttatctgcacatggtttgggagcattatatatatatcccccttgcccgtccattattctgaggtcgttcttgatgttgacctttcacgtgttttctttttttattgtattataaaaaatcaaactggtgtaaatggcattactagtgagatttttgtaagtaatggtgcatgggcaccaaggtgtatgcaacatatttttgttgtaagacttcagcttctattgttctggtggtgttctattgaccactggtctaatcatctttactggcttaggtaatggccaacatatcatggaccatgcaaaacactgtttcacattatagattactttatttataaaataaagtttgaaataaaagacgtagataagtaagctgctggagatagcattaccgctgagcactgcagctgtgctcaatgatgatatggttggtttgacaccctactagtcttcttgatggtgtggctgcggctctggaaggagaggaacaggctattttcaaagtatgaatctgtatggtgatgataaaaatttccaattagcctttcataaaaaagaa

SEQ ID NO: 1767 - DNA, 3878 bp, Zea Mays
cgtccatccaccccgacccatccaatccgttccattcctacgtcggctcggacctcggagacacagggatcgtcttcgtccccggcctctcgccttcctccacccccctctcctctctctcgctggctcgtggccaacccacccacccacctccgctccgccccgcttccatcgatccattccgcgatcggccttacacgtctaacagtacatgagtttctaactggtgcgagcccaagtaaagttctgtaattagtcacattcctgcacaatgtcgactgcgaaagtggtgcttgagcctgcatttcaaggagctggccataaaccagggacagagatatggaggatcgaggatttcaagccagtcgctttgccaaaatcagactatggcaaattctactgtggagattcttatatagttctgcagacgacatgtaaaggaggtgcttttatttttgacatccatttctggatcggaaaagattccagccaggatgaagctggaactgcggcgatcaagacagttgagcttgacagcatgctcgggggccgtgcggtgcagcacagggagccacagtgctacgagtctgataaattcctctcgtattttaaaccgtgcatcatacccatggagggcggctttgcttctgggttcaaaaagccagaagtggacaagtttgaaacacgtctatatatctgcaaagggaagagagctatcagagttaaagaggttccattttctcgttcatcgttgaaccatgatgatgtctttatcttggatactgagaacaaaatatatcaattcaacggtgcaaactccaacatccaagaaagagccaaagccttggaagtgatccagcatttaaaggaggaataccatgacggagtgtgcgctgttgcaatcgtcgatgatgggaaactgcaagcagaatcagattcaggagaattctgggtcctttttggaggttttgcgccaatagggaaaaaagcaataagtgatgatgatgttgttcttgaaactacatcaccaaagcttttcagtatcagtaacggccaactgaagttagaagacgctgtccttacaaaatcaattttggagaacaccaagtgctttttacttgactgcggggctgagctattcgtgtgggttggtcgggtaacacaggtagaggacaggaaagctgccagtgcagcagttgagaaatacattattaaagaaaatagaccaaagacaacaagaataactcaagtgatccaaggttacgagaatcatacgttcaagtctaagtttgagtcatggcctgtaagtaacacgtcagggagtgccagcacggaggaaggccgagggaaagttacagcactcttgaagcagaaaggtgttgatgtcaaaggaatctcaaaaactagtgtgccagtaaatgacgaagttcctcctttgctggatggcggtggaaagcttgaggtttggtgtattgatggcagtgccaagactgctcttccaaaggaagaacttggaaaattctacagcggagactgctatgttgttctctacacttatcattctgctgaaaaaaaagaagagttctatctagcttattggattgggaaaaatagtgtacaggaagatcaagaggcggcttttcaaatagctaatacaacttttaattctttgaaaggaagacctgtccagggtcgtatttatcaaggaaaagagccaccacaatttgtggctattttccagccaatggttattcttaagggtggtactagctctggttataagaaatttgtagaagagaagggtctgaaagatgaaacgtattgttctgatggcactgctctcattcaaatttctggaacagcggttcataacaataaaacgcttcaagttgatgcggtcgcaacatccttgagttccacagattgttttgttttgcaagctaaaaactcgatgtttatatggaatgggaatgcaagttcttttgaacaacaacagtgggctgctaaagttgctgaatttctgaagaccggtgttgctgtcaagcattgcaaggagggcactgagagctctattttctggtcttctattggtggaaagcagagttatacaaatagaaatgctgcacctgatgttgttattagagagcctcatttgtataccttctctctgaggaatgtgaccctaatttttcattttcattttttggcttcaatcgcgataacatcgtcaccatttgtcagggaagctggagatgatctgttgaccgaagacatgatgatacttgatacacactgtgaggtttttgtttggatgggtcagtgtgtggagacaaaagaaaaacagaaagcatttgacattggccagaaatacgtacaacatgccgtggcctttgaaggtatttctcctgatgtgcctctctataaagtcaatgaagggaatgaaccttgcttcttcaggacatacttctcctgggatagcgcacgatccgtgattcatggaaactcttttgagaagaaactttcagttcttttcggaatgcgttcagagggtggcaataagggctcaggtgatggtgggccaactcaaagggcatcagccttggccgctctttcatctgcattgaatccatcgtcgcaaggaaaacagtcagatgagaagcccacaagctcagatgacagcgagcatactcaacgagcttcagcaatggctgccttgtcctctgcccttaatccatcgacaaaacctagcagcacacagacacaatctcattcaggtcaagggtctcaaagagccgctgctgttgcagcactgtccaatgttttgactgcagagggatctcatagcccccgccacagtaggtcgtccccaacagcagatgcagacaagactgaattagttcctacttctccccatcaattagaaacagggactgcagaagatgtccgaacagagcctgatgtctcacaggaacaaacagctaaagaaaatggaggccagacaacctttagctatgaacgattgatatcaaagtccactgaccctgttagtgggataaacaacaagcgcagagagacatatttggtggacagtgaattcgagaccgtatttggcatgactaaggaggagttctacgagcagccaaggtggaagcaagagttgcagaaaaagaaagccgatcttttctgagacaaggctggcttcgaactaataaaagcccttacgtcgcacaggattgtccagcattctcatcatgctcgttccgcgtatgatgatcgatcaccagcagctttatccgtgagttgtataggctactcttttatctgcacatggtttgggagcattatatatatatcccccttgcccgtccattattctgaggtcgttcttgatgttgacctttcacgtgttttctttttttattgtattataaaaaatcaaactggtgtaaatggcattactagtgagatttttgtaagtaatggtgcatgggcaccaaggtgtatgcaacatatttttgttgtaagacttcagcttctattgttctggtggtgttctattgaccactggtctaatcatctttactggcttaggtaatggccaacatatcatggaccatgcaaaacactgtttcacattatagattactttatttataaaataaagtttgaaataaaagacgtagataagtaagctgctggagatagcattaccgctgagcactgcagctgtgctcaatgatgatatggttggtttgacaccctactagtcttcttgatggtgtggctgcggctctggaaggagaggaacaggctattttcaaagtatgaatctgtatggtgatgataaaaatttccaattagcctttcataaaaaagaa

SEQ ID NO: 1768 - DNA, 3799 bp, Zea Mays
cttcgtccccggcctctcgccttcctccacccccctctcctctctctcgctggctcgtggccaacccacccacccacctccgctccgccccgcttccatcgatccattccgcgatcggccttacacgtctaacagtacatgagtttctaactggtgcgagcccaagtaaagttctgtaattagtcacattcctgcacaatgtcgactgcgaaagtggtgcttgagcctgcatttcaaggagctggccataaaccagggacagagatatggaggatcgaggatttcaagccagtcgctttgccaaaatcagactatggcaaattctactgtggagattcttatatagttctgcagacgacatgtaaaggaggtgcttttatttttgacatccatttctggatcggaaaagattccagccaggatgaagctggaactgcggcgatcaagacagttgagcttgacagcatgctcgggggccgtgcggtgcagcacagggagccacagtgctacgagtctgataaattcctctcgtattttaaaccgtgcatcatacccatggagggcggctttgcttctgggttcaaaaagccagaagtggacaagtttgaaacacgtctatatatctgcaaagggaagagagctatcagagttaaagaggttccattttctcgttcatcgttgaaccatgatgatgtctttatcttggatactgagaacaaaatatatcaattcaacggtgcaaactccaacatccaagaaagagccaaagccttggaagtgatccagcatttaaaggaggaataccatgacggagtgtgcgctgttgcaatcgtcgatgatgggaaactgcaagcagaatcagattcaggagaattctgggtcctttttggaggttttgcgccaatagggaaaaaagcaataagtgatgatgatgttgttcttgaaactacatcaccaaagcttttcagtatcagtaacggccaactgaagttagaagacgctgtccttacaaaatcaattttggagaacaccaagtgctttttacttgactgcggggctgagctattcgtgtgggttggtcgggtaacacaggtagaggacaggaaagctgccagtgcagcagttgagaaatacattattaaagaaaatagaccaaagacaacaagaataactcaagtgatccaaggttacgagaatcatacgttcaagtctaagtttgagtcatggcctgtaagtaacacgtcagggagtgccagcacggaggaaggccgagggaaagttacagcactcttgaagcagaaaggtgttgatgtcaaaggaatctcaaaaactagtgtgccagtaaatgacgaagttcctcctttgctggatggcggtggaaagcttgaggtttggtgtattgatggcagtgccaagactgctcttccaaaggaagaacttggaaaattctacagcggagactgctatgttgttctctacacttatcattctgctgaaaaaaaagaagagttctatctagcttattggattgggaaaaatagtgtacaggaagatcaagaggcggcttttcaaatagctaatacaacttttaattctttgaaaggaagacctgtccagggtcgtatttatcaaggaaaagagccaccacaatttgtggctattttccagccaatggttattcttaagggtggtactagctctggttataagaaatttgtagaagagaagggtctgaaagatgaaacgtattgttctgatggcactgctctcattcaaatttctggaacagcggttcataacaataaaacgcttcaagttgatgcggtcgcaacatccttgagttccacagattgttttgttttgcaagctaaaaactcgatgtttatatggaatgggaatgcaagttcttttgaacaacaacagtgggctgctaaagttgctgaatttctgaagataggattagatttgggtcaactagagaccggtgttgctgtcaagcattgcaaggagggcactgagagctctattttctggtcttctattggtggaaagcagagttatacaaatagaaatgctgcacctgatgttgttattagagagcctcatttgtataccttctctctgaggaatgtgaccctaatttttcattttcattttttggcttcaatcgcgataacatcgtcaccatttgtcagggaagctggagatgatctgttgaccgaagacatgatgatacttgatacacactgtgaggtttttgtttggatgggtcagtgtgtggagacaaaagaaaaacagaaagcatttgacattggccagaaatacgtacaacatgccgtggcctttgaaggtatttctcctgatgtgcctctctataaagtcaatgaagggaatgaaccttgcttcttcaggacatacttctcctgggatagcgcacgatccgtgggtggcaataagggctcaggtgatggtgggccaactcaaagggcatcagccttggccgctctttcatctgcattgaatccatcgtcgcaaggaaaacagtcagatgagaagcccacaagctcagatgacagcgagcatactcaacgagcttcagcaatggctgccttgtcctctgcccttaatccatcgacaaaacctagcagcacacagacacaatctcattcaggtcaagggtctcaaagagccgctgctgttgcagcactgtccaatgttttgactgcagagggatctcatagcccccgccacagtaggtcgtccccaacagcagacaagactgaattagttcctacttctccccatcaattagaaacagggactgcagaagatgtccgaacagagcctgatgtctcacaggaacaaacagctaaagaaaatggaggccagacaacctttagctatgaacgattgatatcaaagtccactgaccctgttagtgggataaacaacaagcgcagagaggcaaggttattcacaataaagagtaaatggacatatttggtggacagtgaattcgagaccgtatttggcatgactaaggaggagttctacgagcagccaaggtggaagcaagagttgcagaaaaagaaagccgatcttttctgagacaaggctggcttcgaactaataaaagcccttacgtcgcacaggattgtccagcattctcatcatgctcgttccgcgtatgatgatcgatcaccagcagctttatccgtgagttgtataggctactcttttatctgcacatggtttgggagcattatatatatatcccccttgcccgtccattattctgaggtcgttcttgatgttgacctttcacgtgttttctttttttattgtattataaaaaatcaaactggtgtaaatggcattactagtgagatttttgtaagtaatggtgcatgggcaccaaggtgtatgcaacatatttttgttgtaagacttcagcttctattgttctggtggtgttctattgaccactggtctaatcatctttactggcttaggtaatggccaacatatcatggaccatgcaaaacactgtttcacattatagattactttatttataaaataaagtttgaaataaaagacgtagataagtaagctgctggagatagcattaccgctgagcactgcagctgtgctcaatgatgatatggttggtttgacaccctactagtcttcttgatggtgtggctgcggctctggaaggagaggaacaggctattttcaaagtatgaatctgtatggtgatgataaaaatttccaattagcctttcataaaaaagaa

SEQ ID NO: 1769 - DNA, 1032 bp, Zea Mays
gaataggattcgcttagtaactgcaagaaaatgcagacaagactgaattagttcctacttctccccatcaattagaaacagggactgcagaagatgtccgaacagagcctgatgtctcacaggaacaaacagctaaagaaaatggaggccagacaacctttagctatgaacgattgatatcaaagtccactgaccctgttagtgggataaacaacaagcgcagagagacatatttggtggacagtgaattcgagaccgtatttggcatgactaaggaggagttctacgagcagccaaggtggaagcaagagttgcagaaaaagaaagccgatcttttctgagacaaggctggcttcgaactaataaaagcccttacgtcgcacaggattgtccagcattctcatcatgctcgttccgcgtatgatgatcgatcaccagcagctttatccgtgagttgtataggctactcttttatctgcacatggtttgggagcattatatatatatcccccttgcccgtccattattctgaggtcgttcttgatgttgacctttcacgtgttttctttttttattgtattataaaaaatcaaactggtgtaaatggcattactagtgagatttttgtaagtaatggtgcatgggcaccaaggtgtatgcaacatatttttgttgtaagacttcagcttctattgttctggtggtgttctattgaccactggtctaatcatctttactggcttaggtaatggccaacatatcatggaccatgcaaaacactgtttcacattatagattactttatttataaaataaagtttgaaataaaagacgtagataagtaagctgctggagatagcattaccgctgagcactgcagctgtgctcaatgatgatatggttggtttgacaccctactagtcttcttgatggtgtggctgcggctctggaaggagaggaacaggctattttcaaagtatgaatctgtatggtgatgataaaaatttccaattagcctttcataaaaaagaa

SEQ ID NO: 1770 - DNA, 195 bp, Zea Mays
atgacaggaatcgccctgcaggcgctgtcgtcgccggctacgacgacgacctcctccgcgctgctgggatccttgctgagatatctctcgggcacctggacgtcgcccccgtcgtcattgcaagcctccgcgagcgcctggacgttagccaccgggagagaaccagtgcttcttgctgcggacgacattgttaat

SEQ ID NO: 1771 - DNA, 3296 bp, Zea Mays
gggccggctgggccgaaaggctgaggggggcaggggtatgggcttctttccttttttttcttttattccagcaattgttttcccttttctttttatttactctatttgattcaaatctaaataggccacaaattcaaattagcacttccaagtattatgcaccaaacaaaagtgaaacttagggtttaacatgatgccacaattcatacttccttggagttttagtctaatagactataattacacaaagaaaatagccacttttcttctatagaaaagagaaagaggagattgggaagggtgtgaaaagagaagtaacacctgaatttgtgaatatgagcaaagaaattttatacccccaaattcagggtgttacagcctaatgtagagcattcacttgtcctacactagctttcttttaaattatacgaacctaacgcaaacattacgaacaataaatcatacactttaaacatgattagcctaaacacaactcatcagctacttaattacttaaattctaaatttatcccttgctttataaattatactacatctttataagtgattaaaatatttcaacaacacacatgcctactaaaattctactcggtacactaattcagctaattgactggaatagcgaaataactcgctataactgaacttggctcgataatcgcaagaactgcgaagtcgacgagagtttcgtgacttacgcaatttatcgagcacctaatgagcatcaaactagcaccttaatttattcaacgatcgaactattctgaataattcatcagcttaccgtttcaacagctaactcgaatccgcgagatcagtagcgatttttcgatcgaggcaattggttgagcgcttgggaaaaatcgcgttgctaacttcgtcttcacccgattcttaggttttcttggggatgcacgaacgacgacgaccttcgattgaagtctgggataagctggtgaggtgaggatcgagccggggatgacgtgtttgacgactcgacggcaaacgacgagatcgacgacgcgattgggagttaaagccgagcaaagaaaattcgcgcgtgcgactagaaggaattgggaagccacgacgctggaggaacttcatggtacgtaaacactagagaactcgacggcgacacgtgcacaaggagacatgcgcccgcaggaaaattcacggcgcggcggtcagggagctcgaccgggcgagcagcagggagcaaggcgagcttggaatggtgagcagagcgcgcgcaggggcaagctcggcagagcgcgagcgagcagggagatgccatggcgtggagcaacagagagaaacgccggggaggagagagatccgcgcgagagagaaacgcgcaggagaaaaatctgggagcgcaggagctggaaaaggaagcagggagatgaagccgaggaggatcctgcgcgcagggaggaggaatcggtggccgggcgaccgagcgccatgggggacacggtccagtagggggagaaggagagggccgcaagagagaagcaggagagggagttgcggcgcagtctggcgagccgctcggcagtgtagggaaccggacacagcgctggaggttgaagaaggctacgtgcgtataaaaagaacagcgggcggcggctaaaaaaaccccagagggcggttaggcggctggagaggaggaaatgatgggcgaacagggagggcggtcgagcgctgctggggaagacgatgggaactgggcgacgaccaccggataaggaccctgtgcgcataggagataaggaggacgagggaacggcggcctgatttttctttcttcagaagcagagcggcggcgggataaggctggagaagatgagctcgagcgctagaagaagcaagcagagaagaagcaagcagggacacgctgcgcaggaaaaatcttaccaacggtgcggcatacagaggataaaggataagaaagccgtaaacggtggaagctaaagagaggacaagacatctgctaaaaatctggaatttggaagctggtggaagtgacgtgagcaagggaaaatgaaatttccttctcatttttaaaccaatttacacgaataaacacagtttcatgatttaatgtttaaaagatgtagaaactgtttgaaccaagacaagatcgatgacaatatttggataatgttcgacttggtgaatattcttagggtcagatatctactacccattatctatattcaaaaacttggatttgagcgagtaacacatggatcaaattaaatggatttcggcttcgataatttactctgcatgattcgactaacattagccgaaaccatatctgctaatgcacacacgatttcgtcgtcaaaacagcgtgctcaaggataaattgaatcatatcctcgcgcacgatttcactcagacgacgcacgattcggattattttgcactgagtattttagtcgtcgagttcaaactaatttgctcgggataaaatcgtaagaatagatagaacttccgatttcatattcgcgcgagcgataaattttaaatactcaccggacgcaccgattttcggaacgacgatgttccgaacatcacgaaaatttaggaagagcccggatagataaaataaaaatgatgtcgcactcgacagacaaaacagatgcgatattaaaaccgcgataggcggaaataattagaccttagtgtccgtcttattcactgatatcacgtgcttaaatccgtactcgctgtcgagcggaatataaacacctagggtgttacagccctccccccttaaaagaatctcgtcccgagattcggagcgaaagacttctaagggtagagaagtatgtaacccttgttcatatcagcgataattataaggcagtttcaagcaaggacgagtgtctcagaatgttgtttctctagtggacatatcatgtatcgccttaagccaatttagaaatgtccaccaatagagacgctgtctgccagaagaacacataaggttccatgtgtgcagtttgctttttttatgacactgtactatctgagtctgttgagcgagcggcaaatacacgattttacccaaacagaatcagatacaccatcttgggtaaaacacacagaaagaggtttaccaacaagtggttacagtaagctcatagcacacgtgacgggtgtgaatgtcgaataacatcacagttaactcgtgttagccagagaatccaagtccctgaaaggtgatatagattcgagaacatcaccagcaaagggatctg

SEQ ID NO: 1772 - DNA, 1531 bp, Zea Mays
atggttttgcatggtgttgatgcgaaacgaatgaggtttcacactgacttgaagaacagacggtttgatcatattgtctttaattttcctcgtggtggattcagaggaaaagagaatgacttgcgtatgatcgacttgcacaaggagttggtgtggggttttttccgcaatgcacgccacattgttcggcaacttggtgaagtccatgttacccacaagtctggggaaccatacggcagctgggatcttgagcacctggcctctgagtcttcttttgctatggttgacaaagttccttttcaaagggaagactatccaggttataatcaaaagagaggagatggtggcattcctccacctctaccaatgagcagaatcccatctcctgatctccttgcacctcgggagcagccttggtatcagcagagaactattcttgatcacctaggagtcgatgactacttctttgcccgggaacaccaaatgagtctgcagagggagtatgaaatgaagaggcaagtcattccattggaacatcgccacacggacagggagtctgttgagaagctagagtggctgcacaggatgatcgcattgtatgatggcaaggacacagaagaacaaagccactgctcaccatcttggtcttctgaaggtaacttgaaatatactctaatctttatcttagaactcttacctatggctaaacttgcaaaattgtggcgggagttgctcactccaacatccaaaggtggtggtggtgcaggtgaaggatttgatgtgacgaagagtggagatgcacgtgttggtttagttggctttccttcgattgggaaatcaacattgttgaacaagctgacagggacattttcagaggttgctgcctacgagtttacaactttaatcatgtataagggtgctaaaatctaggtgacatgagcttttatgttctcagtaccagcacatgctatgacattgagaagcatcacgtcgtagccttgctgcattgagaagcagtgatctttgttcttatttggaaatggttatacatgacaggacattgagagtgatgacgaggaccttgattttgaggttgatgatggagctgaggatgaacctaaagcatgatgcggaagatgccccagccgaacctgctatcaagacagttgtggccctggctgcgccacctaaagatacagaaagacagttgtctaaaaaggagatgaaaaataaggaactagcagaacttgatgtagtattggctgagctcggactttctgggatttgagcatcgctgcacaggatggtgagagtcatacatgttgccgttaaaactgcctaatctattttgtatgcactcaattctctgatgccatgttttcttgcagctgagaataaaggtgccaaccagactggtgacacggtcgctacctcctcttggccgctggacgtctctccttcctagccttcgcctgtccctcctcccctgcccgctacccccgtagacaggcacgttgctacctcctccacg

SEQ ID NO: 1773 - DNA, 637 bp, Zea Mays
agagtattagccaacttagacgcatacgagcgcatgccagcgcaatggcttattgcgtttataatctccagcagtatcctgtttcgaataacaatgactgagtgttgtttggttcgcgaaatgtaacgtaaagggtaatggtttacactcgattactggccgtaacaagtttgaatagttcggtatcaatttttagtatgatatctgattacggttggactaaaacaaacataatttaacgttatcacttacccattacgttacaaatatgtgaaccaaacggcaccatggtgtctttgaacatcagtgatcaatgcagattattaatttattgttgcgctagcctgatatcattgagctccttgggggactgatcctaactagataaagggatgcatcttagacaattacacctcagcaacccccggtatcggtactccttgccctgctgtcaggatcttgtatgccttctggatttgtctagtgactggaccaattttcccgtcgccgatttcacgtccatcaatcattacaaccggtgtgatttcacccattgttccggttgtccatacttgggtggcaatggtagtaacaagggtgaagtaggcggtaaaagagtcgttgggggatagcggcc

SEQ ID NO: 1774 - DNA, 1808 bp, Zea Mays
ggggaattaccgtgttgaagtcatagtggccagtgggggtggaccggacgcctggaccgcagatggcgtatcaaaaataaaaattcgatgccgccaaaaagctaatatatgggagggatatgtatttccttctccgatatgttaggacggcagttcccacaacatcttccccaacctcgtacgagccggctgcgagatccaacgacctccgcacggcagttccattagagatgcctctagggaagagatccacacgactatcctagaaatccgaagcggcctcctcgctcggcaaattctccgccgacgacagggagaaggtgctcactgccgttggagtacacacggcgatatctattgcacaacctacttcccagatacaggaggagggtgataaccacactgggaatcaagaaatcataccaaggtcaaatagaatgggcaggcaacttgaatcgttaagcagaggactgggaatcaagattccaacccaaatcactgaagggaacaaaagccagagccacctattcaagctactaagtttgcattagagggatggtcgccaaggccagggatttactgtcgaggtgtacaagtccatggcagtggctgtttgtgcagattagaagctgatgagggagtctcgtagcagaacttcaatgttgagatatggaaaagctacctatgtatcaagatatgtgaagactgcccgcctcaaacaagaggaatattttggtggagcgaagtttatgaagggcatggaggtactgctggtaacaagttctgaatgtcattaggtctaccattgatagctactgtgaattgtgctggtaacactggagccaagaacctctacatcatttctgtgaagggaatcaagggcgccttaacaggcgtccttctgcctgtgttggtgaccatggagaatggaaagcctaaccttaggaagaaggtgatgccagctgtcattgtgaggtagcgcaagccatggtgctgaaaggatgacgtctacatgtactttgaagaagcaagacaaatataaggatgctgaacctagtgcaatagatctttttaaggagatgcattgcagcaaaaagaaaggttttagcaaaaatgttcagaaagctattgttgatatggaagaaatggtggtaacatcagttcaagatggacaacaaccaaaatatcctacagaagttgtttatagtgtgcaactgggctccagtgtgttcttatgcaatcttggtctttagtccgtctccaagaaaatctcaacatcaatagtttctataaaggttcaacaacttcaggatcgactggaggccaagaagcaagaaaaagatagactttgggaagaagtgtaaaccttaaatgctcaggcagtcatctcaggagaccattgatagtatgaagaggtcgaccgaagaaaataacaatctccttagtcaactattaagcttcaatagaggccaagtgcctccatctcaagtctacttaaccattataggatctgcagccttatggttgctatagtagctagttacaatagctctggatttgaagagtagctctggatttgaagttataggattattttcaattaagcttaatgtttaattccttgagttgaagttataggattttctttggatcttatgtaaaaggatttgtagatatatgttttgaagttatatgattctttgttggatgaaatatttgtgttaaacaaattcataagatattttggttgtgatgtgtaatattctatgacgatatgaatttatatgacatgttccttctgatgacga

SEQ ID NO: 1775 - DNA, 1812 bp, Zea Mays
ggggaattaccgtgttgaagtcatagtggccagtgggggtggaccggacgcctggaccgcagatggcgtatcaaaaataaaaattcgatgccgccaaaaagctaatatatgggagggatatgtatttccttctccgatatgttaggacggcagttcccacaacatcttccccaacctcgtacgagccggctgcgagatccaacgacctccgcacggcagttccattagagatgcctctagggaagagatccacacgactatcctagaaatccgaagcggcctcctcgctcggcaaattctccgccgacgacagggagaaggtgctcactgccgttggagtacacacggcgatatctattgcacaacctacttcccagatacaggaggagggtgataaccacactgggaatcaaggcaaaaatcataccaaggtcaaatagaatgggcaggcaacttgaatcgttaagcagaggactgggaatcaagattccaacccaaatcactgaagggaacaaaagccagagccacctattcaagctactaagtttgcattagagggatggtcgccaaggccagggatttactgtcgaggtgtacaagtccatggcagtggctgtttgtgcagattagaagctgatgagggagtctcgtagcagaacttcaatgttgagatatggaaaagctacctatgtatcaagatatgtgaagactgcccgcctcaaacaagaggaatattttggtggagcgaagtttatgaagggcatggaggtactgctggtaacaagttctgaatgtcattaggtctaccattgatagctactgtgaattgtgctggtaacactggagccaagaacctctacatcatttctgtgaagggaatcaagggcgccttaacaggcgtccttctgcctgtgttggtgaccatggagaatggaaagcctaaccttaggaagaaggtgatgccagctgtcattgtgaggtagcgcaagccatggtgctgaaaggatgacgtctacatgtactttgaagaagcaagacaaatataaggatgctgaacctagtgcaatagatctttttaaggagatgcattgcagcaaaaagaaaggttttagcaaaaatgttcagaaagctattgttgatatggaagaaatggtggtaacatcagttcaagatggacaacaaccaaaatatcctacagaagttgtttatagtgtgcaactgggctccagtgtgttcttatgcaatcttggtctttagtccgtctccaagaaaatctcaacatcaatagtttctataaaggttcaacaacttcaggatcgactggaggccaagaagcaagaaaaagatagactttgggaagaagtgtaaaccttaaatgctcaggcagtcatctcaggagaccattgatagtatgaagaggtcgaccgaagaaaataacaatctccttagtcaactattaagcttcaatagaggccaagtgcctccatctcaagtctacttaaccattataggatctgcagccttatggttgctatagtagctagttacaatagctctggatttgaagagtagctctggatttgaagttataggattattttcaattaagcttaatgtttaattccttgagttgaagttataggattttctttggatcttatgtaaaaggatttgtagatatatgttttgaagttatatgattctttgttggatgaaatatttgtgttaaacaaattcataagatattttggttgtgatgtgtaatattctatgacgatatgaatttatatgacatgttccttctgatgacga

SEQ ID NO: 1776 - DNA, 2346 bp, Zea Mays
cgtgttgaagtcatagtggccagtgggggtggaccggacgcctggaccgcagatggcgtatcaaaaataaaaattcgatgccgccaaaaagctaatatatgggagggatatgtatttccttctccgatatgttaggacggcagttcccacaacatcttccccaacctcgtacgagccggctgcgagatccaacgacctccgcacggcagttccattagagatgcctctagggaagagatccacacgactatcctagaaatccgaaggtaattttgtttaactgttcatctttgttcgtcactcactggatctaggcttgaaaggcagcacgcaatcttgctgggccaatcctcaatccttgacacccccgccacacctccagaggccgcaagccatagccgacgaccgcccactgcaccgccggttcggtagccatcgcgccttgtccgcttctccatgcctcacctcctcctcttctctgttgcctgcctcgtcctcaccatcacggcgccgcgcgtatgactcgcgagcgcctggcgcttgcttctctcaatcgcttccgatcctggagctggcggctggccacccacccggtgcgcccgtgcgagcttttactgctccctccccttacggcctcataggaaccctcgttatggttgtgtcctgatgctgctcaggcttgccgactcgagaccggggtacggttgattttattactgcctctggcccccttgctgctatagctatatactagtcaatagtcatttactcctgctagtatgagctagtagcattcaacactactggaattcacaattattgtgttcattagggacataattagatacaactagcgtagctttgaaagccgcctaaggggccagtactattggttaatccattcagtaacatttctagctgtggtatgatcagttaatatgttgcttgtgtggctagtgttccctacattttctgctaataaggttacttgtatgatattttctatgattagtaacatttctagctgctagcctgctaccatggtatgatcagtaacattttctgttgccttccactgtggccgcgcgaatgactcgctccgagccttcagcggcctcctcgctcggcaaattctccgccgacgacagggagaaggtgctcactgccgttggagtacacacggcgatatctattgcacaacctacttcccagatacaggaggagggtgataaccacactgggaatcaagaaatcataccaaggtcaaatagaatgggcaggcaacttgaatcgttaagcagaggactgggaatcaagattccaacccaaatcactgaagggaacaaaagccagagccacctattcaagctactaagtttgcattagagggatggtcgccaaggccagggatttactgtcgaggtgtacaagtccatggcagtggctgtttgtgcagattagaagctgatgagggagtctcgtagcagaacttcaatgttgagatatggaaaagctacctatgtatcaagatatgtgaagactgcccgcctcaaacaagaggaatattttggtggagcgaagtttatgaaggtaaaaatacttgtttcactcaaaacctaagcattttattagcagatgaccatttaacgttgtaacatctatttatctccatctccaaaatctgctctttttagctaaccatagtgtgacttttctctctcgattcactaagattctgaaatctgaatacatactagggttttgttttggttcaccattttgctatggaaatatatgtttctgaaaccagcttagatttcaatgctatatcaaaagctccaaatcgaagaccatcatcttgtagtatggatatcccttttggttaatttcctttgcttataagttgtcatatattcatgttcataatgacttattttgtgatgtcatctttgtttctttgctactatattgatagcatgtttggattgagagcccagtttattcttggttatggcatcaataagtagacaatagtatcatagaaatcatcttgagatcttaccatctgacagttcaatgatcctaatgtaccaattcaaacccatgaagagtcagtttaactatttaagccttttagtgtaattcctatctaagcgagctcacctggctgtcctccttcagtctttacccgttacaatcaacttcctgcagaatcatattgttacgttgaattgctagactctgttcctgcttgtacacttcaatgctttgcttggtgagtgatatgcaaacctgtggacttgtagagtaatagcattatgaaaacataagcctactttgaattag

SEQ ID NO: 1777 - DNA, 2376 bp, Zea Mays
cgtgttgaagtcatagtggccagtgggggtggaccggacgcctggaccgcagatggcgtatcaaaaataaaaattcgatgccgccaaaaagctaatatatgggagggatatgtatttccttctccgatatgttaggacggcagttcccacaacatcttccccaacctcgtacgagccggctgcgagatccaacgacctccgcacggcagttccattagagatgcctctagggaagagatccacacgactatcctagaaatccgaaggtaattttgtttaactgttcatctttgttcgtcactcactggatctaggcttgaaaggcagcacgcaatcttgctgggccaatcctcaatccttgacacccccgccacacctccagaggccgcaagccatagccgacgaccgcccactgcaccgccggttcggtagccatcgcgccttgtccgcttctccatgcctcacctcctcctcttctctgttgcctgcctcgtcctcaccatcacggcgccgcgcgtatgactcgcgagcgcctggcgcttgcttctctcaatcgcttccgatcctggagctggcggctggccacccacccggtgcgcccgtgcgagcttttactgctccctccccttacggcctcataggaaccctcgttatggttgtgtcctgatgctgctcaggcttgccgactcgagaccgggcggcctcctcgctcggcaaattctccgccgacgacagggagaaggtgctcactgccgttggagtacacacggcgatatctattgcacaacctacttcccagatacaggaggagggtgataaccacactgggaatcaagaaatcataccaaggtcaaatagaatgggcaggcaacttgaatcgttaagcagaggactgggaatcaagattccaacccaaatcactgaagggaacaaaagccagagccacctattcaagctactaagtttgcattagagggatggtcgccaaggccagggatttactgtcgaggtgtacaagtccatggcagtggctgtttgtgcagattagaagctgatgagggagtctcgtagcagaacttcaatgttgagatgtactgacttaactatgttcatgtagtatatcatgttactttttttattaaactagcaaaaggttgtgttaataattcatggtgtactaaatgtgataccatcttcattttgtctaattggatgattaatgccatgcacattaaagatggaaaagctacctatgtatcaagatatgtgaagactgcccgcctcaaacaagaggaatattttggtggagcgaagtttatgaagggcatggaggtactgctggtaacaagttctgaatgtcattaggtctaccattgatagctactgtgaattgtgctggtaacactggagccaagaacctctacatcatttctgtgaagggaatcaagggcgccttaacaggcgtccttctgcctgtgttggtgaccatggagaatggaaagcctaaccttaggaagaaggtgatgccagctgtcattgtgaggtagcgcaagccatggtgctgaaaggatgacgtctacatgtactttgaagaagcaagacaaatataaggatgctgaacctagtgcaatagatctttttaaggagatgcattgcagcaaaaagaaaggttttagcaaaaatgttcagaaagctattgttgatatggaagaaatggtggtaacatcagttcaagatggacaacaaccaaaatatcctacagaagttgtttatagtgtgcaactgggctccagtgtgttcttatgcaatcttggtctttagtccgtctccaagaaaatctcaacatcaatagtttctataaaggttcaacaacttcaggatcgactggaggccaagaagcaagaaaaagatagactttgggaagaagtgtaaaccttaaatgctcaggcagtcatctcaggagaccattgatagtatgaagaggtcgaccgaagaaaataacaatctccttagtcaactattaagcttcaatagaggccaagtgcctccatctcaagtctacttaaccattataggatctgcagccttatggttgctatagtagctagttacaatagctctggatttgaagagtagctctggatttgaagttataggattattttcaattaagcttaatgtttaattccttgagttgaagttataggattttctttggatcttatgtaaaaggatttgtagatatatgttttgaagttatatgattctttgttggatgaaatatttgtgttaaacaaattcataagatattttggttgtgatgtgtaatattctatgacgatatgaatttatatgacatgttccttctgatgacga

SEQ ID NO: 1778 - DNA, 3030 bp, Zea Mays
cgtgttgaagtcatagtggccagtgggggtggaccggacgcctggaccgcagatggcgtatcaaaaataaaaattcgatgccgccaaaaagctaatatatgggagggatatgtatttccttctccgatatgttaggacggcagttcccacaacatcttccccaacctcgtacgagccggctgcgagatccaacgacctccgcacggcagttccattagagatgcctctagggaagagatccacacgactatcctagaaatccgaaggtaattttgtttaactgttcatctttgttcgtcactcactggatctaggcttgaaaggcagcacgcaatcttgctgggccaatcctcaatccttgacacccccgccacacctccagaggccgcaagccatagccgacgaccgcccactgcaccgccggttcggtagccatcgcgccttgtccgcttctccatgcctcacctcctcctcttctctgttgcctgcctcgtcctcaccatcacggcgccgcgcgtatgactcgcgagcgcctggcgcttgcttctctcaatcgcttccgatcctggagctggcggctggccacccacccggtgcgcccgtgcgagcttttactgctccctccccttacggcctcataggaaccctcgttatggttgtgtcctgatgctgctcaggcttgccgactcgagaccggggtacggttgattttattactgcctctggcccccttgctgctatagctatatactagtcaatagtcatttactcctgctagtatgagctagtagcattcaacactactggaattcacaattattgtgttcattagggacataattagatacaactagcgtagctttgaaagccgcctaaggggccagtactattggttaatccattcagtaacatttctagctgtggtatgatcagttaatatgttgcttgtgtggctagtgttccctacattttctgctaataaggttacttgtatgatattttctatgattagtaacatttctagctgctagcctgctaccatggtatgatcagtaacattttctgttgccttccactgtggccgcgcgaatgactcgctccgagccttcagcggcctcctcgctcggcaaattctccgccgacgacagggagaaggtgctcactgccgttggagtacacacggcgatatctattgcacaacctacttcccagatacaggaggagggtgataaccacactgggaatcaaggcaagtaggcatcttaactttttggactgcgatatctatcattactaggataatatcatgaatgattttggcgagtcacaaatatatattgagaacctatacttaccccatttgtgtacaacttcattttgaactcaatcattcatatgttgtattatgttttatcacaactaatgtttagttatatgcaacattactcttataaaaacagtctgtgtctatacaattataattatttatatttgacactaattgtgtaagataatgtacattttttggcatgaccacaaacaacagaaatcataccaaggtcaaatagaatgggcaggcaacttgaatcgttaagcagaggactgggaatcaagattccaacccaaatcactgaagggaacaaaagccagagccacctattcaagctactaagtttgcattagagggatggtcgccaaggccagggatttactgtcgaggtgtacaagtccatggcagtggctgtttgtgcagattagaagctgatgagggagtctcgtagcagaacttcaatgttgagatatggaaaagctacctatgtatcaagatatgtgaagactgcccgcctcaaacaagaggaatattttggtggagcgaagtttatgaagggcatggaggtactgctggtaacaagttctgaatgtcattaggtctaccattgatagctactgtgaattgtgctggtaacactggagccaagaacctctacatcatttctgtgaagggaatcaagggcgccttaacaggcgtccttctgcctgtgttggtgaccatggagaatggaaagcctaaccttaggaagaaggtgatgccagctgtcattgtgaggtagcgcaagccatggtgctgaaaggatgacgtctacatgtactttgaagaagcaagacaaatataaggatgctgaacctagtgcaatagatctttttaaggagatgcattgcagcaaaaagaaaggttttagcaaaaatgttcagaaagctattgtaagtgcttattttccttgcatgttcgtactcacaacttgcaacttgcggtatactatcctgatgaataacctttaacctttatattaggttgatatggaagaaatggtggtaacatcagttcaagatggacaacaaccaaaatatcctacagaagttgtttatagtgtgcaactgggctccagtgtgttcttatgcaatcttggtctttagtccgtctccaagaaaatctcaacatcaatagtttctataaaggttcaacaacttcaggatcgactggaggccaagaagcaagaaaaagatagactttgggaagaagtgtaaaccttaaatgctcaggcagtcatctcaggagaccattgatagtatgaagaggtcgaccgaagaaaataacaatctccttagtcaactattaagcttcaatagaggccaagtgcctccatctcaagtctacttaaccattataggatctgcagccttatggttgctatagtagctagttacaatagctctggatttgaagagtagctctggatttgaagttataggattattttcaattaagcttaatgtttaattccttgagttgaagttataggattttctttggatcttatgtaaaaggatttgtagatatatgttttgaagttatatgattctttgttggatgaaatatttgtgttaaacaaattcataagatattttggttgtgatgtgtaatattctatgacgatatgaatttatatgacatgttccttctgatgacga

SEQ ID NO: 1779 - DNA, 1896 bp, Zea Mays
cgtgttgaagtcatagtggccagtgggggtggaccggacgcctggaccgcagatggcgtatcaaaaataaaaattcgatgccgccaaaaagctaatatatgggagggatatgtatttccttctccgatatgttaggacggcagttcccacaacatcttccccaacctcgtacgagccggctgcgagatccaacgacctccgcacggcagttccattagagatgcctctagggaagagatccacacgactatcctagaaatccgaagaaatcataccaaggtcaaatagaatgggcaggcaacttgaatcgttaagcagaggactgggaatcaagattccaacccaaatcactgaagggaacaaaagccagagccacctattcaagctactaagtttgcattagagggatggtcgccaaggccagggatttactgtcgaggtgtacaagtccatggcagtggctgtttgtgcagattagaagctgatgagggagtctcgtagcagaacttcaatgttgagatgtactgacttaactatgttcatgtagtatatcatgttactttttttattaaactagcaaaaggttgtgttaataattcatggtgtactaaatgtgataccatcttcattttgtctaattggatgattaatgccatgcacattaaagatggaaaagctacctatgtatcaagatatgtgaagactgcccgcctcaaacaagaggaatattttggtggagcgaagtttatgaagggcatggaggtactgctggtaacaagttctgaatgtcattaggtctaccattgatagctactgtgaattgtgctggtaacactggagccaagaacctctacatcatttctgtgaagggaatcaagggcgccttaacaggcgtccttctgcctgtgttggtgaccatggagaatggaaagcctaaccttaggaagaaggtgatgccagctgtcattgtgaggtagcgcaagccatggtgctgaaaggatgacgtctacatgtactttgaagaagcaagacaaatataaggatgctgaacctagtgcaatagatctttttaaggagatgcattgcagcaaaaagaaaggttttagcaaaaatgttcagaaagctattgtaagtgcttattttccttgcatgttcgtactcacaacttgcaacttgcggtatactatcctgatgaataacctttaacctttatattaggttgatatggaagaaatggtggtaacatcagttcaagatggacaacaaccaaaatatcctacagaagttgtttatagtgtgcaactgggctccagtgtgttcttatgcaatcttggtctttagtccgtctccaagaaaatctcaacatcaatagtttctataaaggttcaacaacttcaggatcgactggaggccaagaagcaagaaaaagatagactttgggaagaagtgtaaaccttaaatgctcaggcagtcatctcaggagaccattgatagtatgaagaggtcgaccgaagaaaataacaatctccttagtcaactattaagcttcaatagaggccaagtgcctccatctcaagtctacttaaccattataggatctgcagccttatggttgctatagtagctagttacaatagctctggatttgaagagtagctctggatttgaagttataggattattttcaattaagcttaatgtttaattccttgagttgaagttataggattttctttggatcttatgtaaaaggatttgtagatatatgttttgaagttatatgattctttgttggatgaaatatttgtgttaaacaaattcataagatattttggttgtgatgtgtaatattctatgacgatatgaatttatatgacatgttccttctgatgacga

SEQ ID NO: 1780 - DNA, 2658 bp, Zea Mays
attaaaacagtagcgtaggcgtccacagccgcgtgtggtgcacggttctgccgtgtcttccctccgcgcgatactccccagtccccaatggtgcagatcgcggctcctccccgacggcgcgatggccgcgccccctctccctcccccggcgtgatgcacgcaaccccaccccctcggtgccatggtgccctcgccttcgcccccgtcaaccacgggcgtcaatgtcgaaggcgtccacaaccgcgcccccacctgcccccgcccacgctctcccacgatctctgccgccacgtctccgcgtttggcggcccgtcctcatcctcatccgcgcttggcggcccgtcgtcatcctcaggtcagatctgcgtttggcggcccgtcctcatcctcatccgcgcgcccccgcccgcgatctccgctgccgcgtcttcaccaccctcgcccgtgatctccgtcgccgtccgcacttgggtcagggaacggagtcgcccaccggcagctcctcaccaccgacgggaagcaactcgtggagatgctcaagcggtcaccctatttcttctccacccgcgtccacctctaggtccgcgtgggcgagcaatccaacgaggcaccgttctccccatcaaggacacgtgtggtggagaagaagggctgctggccttggctttgtgggcaacacactggctgaagaagtatatatatatatattcaccagaaagtgaggaggaagagaaagaggaggaaggcgaataagaatagaagatgggcagtgcaaacaagattaatgagaggtacttgaaactacagaagagcaagaagagcaccaaaactaaggatgataaacgaaaggtgcgcccaacaaagcgctcttgtggatgcacggcaatctaaatctaaatctatcaaggtgcaatttatcaggtgttgagtgtaatgtaccattttctgctttaaagtgttactctggtttgggccttttggcatctgtgattaccatatatattattttatttctcatattgcaaggcacacaacaaaggaagggaatgcacgagtcaacaaatgtgtagtgtagtttactaaatttagtaaacctggcctgcctcatctctggcctttaataattcttatgcatttgttaacattttttgaataatttctcatatcagcaagaacatttttttgtttctatttcactcttaacaccatgagcctttatctgcaagaaactttttcatttctgtttcactctaacgctgcacctttcgccttttcaggctgcttggaaagatcttgccatcagctccaccatccctcacttcccttccactgctgtcatgtagtctttagcaatcatgccctatgagtgatcctgctgatcatccagtaaaaaaaagacatcacaaatggatctgatcacaaatcacaaatgtgacaagcttgctaaggtgaaactgctgaagatgttgtatgactactatgccgcgggcacatgacatcaattgactcaaggagaaaagagaggcgtcatccaaaattctgagtttgttcgctctattagagtccagaggcggtactgggcgaggagctatgctggatggataaggtttaggagagcacaaccaaatgcagcccattacgctccttccctttcatctgtctgcgcgccttcactttcatctggcactgggagttcctgtacatagacttgtaaaagctgccgactcagtttcggtatgcctatctaaagggttaggcgcacccatcagatcagttgttgttggttcagaggccttcatcgacaaggctagaattcttaggaagaccctaggcggtgggatgagacaggttggatttctttgtgctgctgcttatgttgctgttcgtgacaccgtgggaaagcttgcggatgatcacaggaaggctaaagccttggcagagggcctgacgaaaattaaacagttcacggtggattcatcttcggtcgagaccaatatggtgttcttcgatatcgtggatccacacatttcaccgagcaagctatgccaagtcttggaacaacgcaatgttcttgcaatgccagcaagttcaaaaagtgtcaggttcgtcatccattaccagattttagacagtgatgttcaatatgcattgacatgtgtcgagatgccaaaaggcccaaaccagagtaacactttaaagcagacacaataatcaaaagtcatggctacaatgaatggcccaacacacgtgtatttgcaacgtgcaagggtgacaagaatatgagcactctaatgcaccacccttttggtaactgggctgatacagtgagtcgctatttcgcaagatcgtcgtggccctattgggaacggagatgctcttaatgaagtaggaggaccgaccaatccaactagcaacagcaggcagggagtggatgcgcctgctagaagagtgctagctccgcgcatacgctcgctcgacaaacgtgtgttgttaactattgtatatagtgttataattactgtcctttattcttgatgtttgttttgtagttgaaactcacattgttttttcatttccatctcgattttgtatgccgtgaccacgaaagactaaatgttttcttgcggtttctaaaaatatagctctctattgttgtga

SEQ ID NO: 1781 - DNA, 2554 bp, Zea Mays
aaaacagtagcgtaggcgtccacagccgcgtgtggtgcacggttctgccgtgtcttccctccgcgcgatactccccagtccccaatggtgcagatcgcggctcctccccgacggcgcgatggccgcgccccctctccctcccccggcgtgatgcacgcaaccccaccccctcggtgccatggtgccctcgccttcgcccccgtcaaccacgggcgtcaatgtcgaaggcgtccacaaccgcgcccccacctgcccccgcccacgctctcccacgatctctgccgccacgtctccgcgtttggcggcccgtcctcatcctcatccgcgcttggcggcccgtcgtcatcctcaggtcagatctgcgtttggcggcccgtcctcatcctcatccgcgcgcccccgcccgcgatctccgctgccgcgtcttcaccaccctcgcccgtgatctccgtcgccgtccgcacttgggtcaggtcagatctgcgtttggtggccatccccgtcctcatcctcttccttgcgcccacgcccactcttcatcctatttccgacttgggggaggacgacaaggtcatcgtcgagcgttgtgccagggaacggagtcgcccaccggcagctcctcaccaccgacgggaagcaactcgtggagatgctcaagcggtcaccctatttcttctccacccgcgtccacctctaggtccgcgtgggcgagcaatccaacgaggcaccgttctccccatcaagatgatcactgaagtgcaagattactgggaattaggacacgtgtggtggagaagaagggctgctggccttggctttgtgggcaacacactggctgaagaagtatatatatatatattcaccagaaagtgaggaggaagagaaagaggaggaaggcgaataagaatagaagatgggcagtgcaaacaagattaatgagaggtacttgaaactacagaagagcaagaagagcaccaaaactaaggatgataaacgaaaggtgcgcccaacaaagcgctcttgtggatgcacggcaatctaaatctaaatctatcaagagacatcacaaatggatctgatcacaaatcacaaatgtgacaagcttgctaaggtgaaactgctgaagatgttgtatgactactatgccgcgggcacatgacatcaattgactcaaggagaaaagagaggcgtcatccaaaattctttgattgcagcttcaagtggatcaagccatagtatggttgttcctgcatatagagtgcaaaaactattgtatttacatttttcaagttgacttccattacactcaggagtttgttcgctctattagagtccagaggcggtactgggcgaggagctatgctggatggataaggtttaggagagcacaaccaaatgcagcccattacgctccttccctttcatctgtctgcgcgccttcactttcatctggcactgggagttcctgtacatagacttgtaaaagctgccgactcagtttcggtacgttctcaagtcgctgggttctgcggtcaattcgcaacaggcatgagtatgaaatgacctgcttcaggtagtaacatatgcgggcggtgattctacttatttctctgaaacattatatgcgcaggtatgcctatctaaagggttaggcgcacccatcagatcagttgttgttggttcagaggccttcatcgacaaggctagaattcttaggaagaccctaggcggtgggatgagacaggttggatttctttgtgctgctgcttatgttgctgttcgtgacaccgtgggaaagcttgcggatgatcacaggaaggctaaagccttggcagagggcctgacgaaaattaaacagttcacggtggattcatcttcggtcgagaccaatatggtgttcttcgatatcgtggatccacacatttcaccgagcaagctatgccaagtcttggaacaacgcaatgttcttgcaatgccagcaagttcaaaaagtgtcaggttcgtcatccattaccagattttagacagtgatgttcaatatgcattgacatgtgtcgagatgccaaaaggcccaaaccagagtaacactttaaagcagacacaataatcaaaagtcatggctacaatgaatggcccaacacacgtgtatttgcaacgtgcaagggtgacaagaatatgagcactctaatgcaccacccttttggtaactgggctgatacagtgagtcgctatttcgcaagatcgtcgtggccctattgggaacggagatgctcttaatgaagtaggaggaccgaccaatccaactagcaacagcaggcagggagtggatgcgcctgctagaagagtgctagctccgcgcatacgctcgctcgacaaacgtgtgttgttaactattgtatatagtgttataattactgtcctttattcttgatgtttgttttgtagttgaaactcacattgttttttcatttccatctcgattttgtatgccgtgaccacgaaagactaaatgttttcttgcggtttctaaaaatatagctctctattgttgtga

SEQ ID NO: 1782 - DNA, 2194 bp, Zea Mays
ccacagccgcgtgtggtgcacggttctgccgtgtcttccctccgcgcgatactccccagtccccaatggtgcagatcgcggctcctccccgacggcgcgatggccgcgccccctctccctcccccggcgtgatgcacgcaaccccaccccctcggtgccatggtgccctcgccttcgcccccgtcaaccacgggcgtcaatgtcgaaggcgtccacaaccgcgcccccacctgcccccgcccacgctctcccacgatctctgccgccacgtctccgcgtttggcggcccgtcctcatcctcatccgcgcttggcggcccgtcgtcatcctcaggtcagatctgcgtttggcggcccgtcctcatcctcatccgcgcgcccccgcccgcgatctccgctgccgcgtcttcaccaccctcgcccgtgatctccgtcgccgtccgcacttgggtcagggaacggagtcgcccaccggcagctcctcaccaccgacgggaagcaactcgtggagatgctcaagcggtcaccctatttcttctccacccgcgtccacctctaggtccgcgtgggcgagcaatccaacgaggcaccgttctccccatcaaggacacgtgtggtggagaagaagggctgctggccttggctttgtgggcaacacactggctgaagaagtatatatatatatattcaccagaaagtgaggaggaagagaaagaggaggaaggcgaataagaatagaagatgggcagtgcaaacaagattaatgagaggtacttgaaactacagaagagcaagaagagcaccaaaactaaggatgataaacgaaaggtgcgcccaacaaagcgctcttgtggatgcacggcaatctaaatctaaatctatcaaggtgcaatttatcaggtgttgagtgtaatgtaccattttctgctttaaagtgttactctggtttgggccttttggcatctgtgattaccatatatattattttatttctcatattgcaaggcacacaacaaaggaagggaatgcacgagtcaacaaatgtgtagtgtagtttactaaatttagtaaacctggcctgcctcatctctggcctttaataattcttatgcatttgttaacattttttgaataatttctcatatcagcaagaacatttttttgtttctatttcactcttaacaccatgagcctttatctgcaagaaactttttcatttctgtttcactctaacgctgcacctttcgccttttcaggctgcttggaaagatcttgccatcagctccaccatccctcacttcccttccactgctgtcatgtagtctttagcaatcatgccctatgagtgatcctgctgatcatccagtaaaaaaaagacatcacaaatggatctgatcacaaatcacaaatgtgacaagcttgctaaggtgaaactgctgaagatgttgtatgactactatgccgcgggcacatgacatcaattgactcaaggagaaaagagaggcgtcatccaaaattctttgattgcagcttcaagtggatcaagccatagtatggttgttcctgcatatagagtgcaaaaactattgtatttacatttttcaagttgacttccattacactcaggagtttgttcgctctattagagtccagaggcggtactgggcgaggagctatgctggatggataaggtttaggagagcacaaccaaatgcagcccattacgctccttccctttcatctgtctgcgcgccttcactttcatctggtgttcttcgatatcgtggatccacacatttcaccgagcaagctatgccaagtcttggaacaacgcaatgttcttgcaatgccagcaagttcaaaaagtcgctatttcgcaagatcgtcgtggccctattgggaacggagatgctcttaatgaagtaggaggaccgaccaatccaactagcaacagcaggcagggagtggatgcgcctgctagaagagtgctagctccgcgcatacgctcgctcgacaaacgtgtgttgttaactattgtatatagtgttataattactgtcctttattcttgatgtttgttttgtagttgaaactcacattgttttttcatttccatctcgattttgtatgccgtgaccacgaaagactaaatgttttcttgcggtttctaaaaatatagctctctattgttgtga

SEQ ID NO: 1783 - DNA, 2280 bp, Zea Mays
cgcgtgtggtgcacggttctgccgtgtcttccctccgcgcgatactccccagtccccaatggtgcagatcgcggctcctccccgacggcgcgatggccgcgccccctctccctcccccggcgtgatgcacgcaaccccaccccctcggtgccatggtgccctcgccttcgcccccgtcaaccacgggcgtcaatgtcgaaggcgtccacaaccgcgcccccacctgcccccgcccacgctctcccacgatctctgccgccacgtctccgcgtttggcggcccgtcctcatcctcatccgcgcttggcggcccgtcgtcatcctcaggtcagatctgcgtttggcggcccgtcctcatcctcatccgcgcgcccccgcccgcgatctccgctgccgcgtcttcaccaccctcgcccgtgatctccgtcgccgtccgcacttgggtcagggaacggagtcgcccaccggcagctcctcaccaccgacgggaagcaactcgtggagatgctcaagcggtcaccctatttcttctccacccgcgtccacctctaggtccgcgtgggcgagcaatccaacgaggcaccgttctccccatcaaggtaacctagattttctcctattcccacaaaaaattgcatcggttacctacatcgcacatggaaataggagcaacttctttgggtttggtcggctgagagctactggtgtgctcaccttgtgtatgtcgaaatgctctatagtgaaaatattgcttggtgatgtgtaaatgccttatatattgcttggtgatgtgaaaattctccccatcaagatgatcactgaagtgcaagattactgggaattaggacacgtgtggtggagaagaagggctgctggccttggctttgtgggcaacacactggctgaagaagtatatatatatatattcaccagaaagtgaggaggaagagaaagaggaggaaggcgaataagaatagaagatgggcagtgcaaacaagattaatgagaggtacttgaaactacagaagagcaagaagagcaccaaaactaaggatgataaacgaaaggtgcgcccaacaaagcgctcttgtggatgcacggcaatctaaatctaaatctatcaaggctgcttggaaagatcttgccatcagctccaccatccctcacttcccttccactgctgtcatgtagtctttagcaatcatgccctatgagtgatcctgctgatcatccagtaaaaaaagttaaaatagacatcacaaatggatctgatcacaaatcacaaatgtgacaagcttgctaaggtgaaactgctgaagatgttgtatgactactatgccgcgggcacatgacatcaattgactcaaggagaaaagagaggcgtcatccaaaattctgagtttgttcgctctattagagtccagaggcggtactgggcgaggagctatgctggatggataaggtttaggagagcacaaccaaatgcagcccattacgctccttccctttcatctgtctgcgcgccttcactttcatctggcactgggagttcctgtacatagacttgtaaaagctgccgactcagtttcggtatgcctatctaaagggttaggcgcacccatcagatcagttgttgttggttcagaggccttcatcgacaaggctagaattcttaggaagaccctaggcggtgggatgagacaggttggatttctttgtgctgctgcttatgttgctgttcgtgacaccgtgggaaagcttgcggatgatcacaggaaggctaaagccttggcagagggcctgacgaaaattaaacagttcacggtggattcatcttcggtcgagaccaatatggtgttcttcgatatcgtggatccacacatttcaccgagcaagctatgccaagtcttggaacaacgcaatgttcttgcaatgccagcaagttcaaaaagtcgctatttcgcaagatcgtcgtggccctattgggaacggagatgctcttaatgaagtaggaggaccgaccaatccaactagcaacagcaggcagggagtggatgcgcctgctagaagagtgctagctccgcgcatacgctcgctcgacaaacgtgtgttgttaactattgtatatagtgttataattactgtcctttattcttgatgtttgttttgtagttgaaactcacattgttttttcatttccatctcgattttgtatgccgtgaccacgaaagactaaatgttttcttgcggtttctaaaaatatagctctctattgttgtga

SEQ ID NO: 1784 - DNA, 2464 bp, Zea Mays
gttctgccgtgtcttccctccgcgcgatactccccagtccccaatggtgcagatcgcggctcctccccgacggcgcgatggccgcgccccctctccctcccccggcgtgatgcacgcaaccccaccccctcggtgccatggtgccctcgccttcgcccccgtcaaccacgggcgtcaatgtcgaaggcgtccacaaccgcgcccccacctgcccccgcccacgctctcccacgatctctgccgccacgtctccgcgtttggcggcccgtcctcatcctcatccgcgcttggcggcccgtcgtcatcctcaggtcagatctgcgtttggcggcccgtcctcatcctcatccgcgcgcccccgcccgcgatctccgctgccgcgtcttcaccaccctcgcccgtgatctccgtcgccgtccgcacttgggtcagggaacggagtcgcccaccggcagctcctcaccaccgacgggaagcaactcgtggagatgctcaagcggtcaccctatttcttctccacccgcgtccacctctaggtccgcgtgggcgagcaatccaacgaggcaccgttctccccatcaaggtaacctagattttctcctattcccacaaaaaattgcatcggttacctacatcgcacatggaaataggagcaacttctttgggtttggtcggctgagagctactggtgtgctcaccttgtgtatgtcgaaatgctctatagtgaaaatattgcttggtgatgtgtaaatgccttatatattgcttggtgatgtgaaaattctccccatcaagatgatcactgaagtgcaagattactgggaattaggacacgtgtggtggagaagaagggctgctggccttggctttgtgggcaacacactggctgaaggtacgagggtcattttgtgatttagtagaaacataaattatatcaggcataactcttggatctagatcatctaacactccatgaaagcccagaagtatatatatatatattcaccagaaagtgaggaggaagagaaagaggaggaaggcgaataagaatagaagatgggcagtgcaaacaagattaatgagaggtacttgaaactacagaagagcaagaagagcaccaaaactaaggatgataaacgaaaggtgcgcccaacaaagcgctcttgtggatgcacggcaatctaaatctaaatctatcaagagacatcacaaatggatctgatcacaaatcacaaatgtgacaagcttgctaaggtgaaactgctgaagatgttgtatgactactatgccgcgggcacatgacatcaattgactcaaggagaaaagagaggcgtcatccaaaattctgagtttgttcgctctattagagtccagaggcggtactgggcgaggagctatgctggatggataaggtttaggagagcacaaccaaatgcagcccattacgctccttccctttcatctgtctgcgcgccttcactttcatctggcactgggagttcctgtacatagacttgtaaaagctgccgactcagtttcggtatgcctatctaaagggttaggcgcacccatcagatcagttgttgttggttcagaggccttcatcgacaaggctagaattcttaggaagaccctaggcggtgggatgagacaggttggatttctttgtgctgctgcttatgttgctgttcgtgacaccgtgggaaagcttgcggatgatcacaggaaggctaaagccttggcagagggcctgacgaaaattaaacagttcacggtggattcatcttcggtcgagaccaatatggtgttcttcgatatcgtggatccacacatttcaccgagcaagctatgccaagtcttggaacaacgcaatgttcttgcaatgccagcaagttcaaaaagtgtcaggttcgtcatccattaccagattttagacagtgatgttcaatatgcattgacatgtgtcgagatgccaaaaggcccaaaccagagtaacactttaaagcagacacaataatcaaaagtcatggctacaatgaatggcccaacacacgtgtatttgcaacgtgcaagggtgacaagaatatgagcactctaatgcaccacccttttggtaactgggctgatacagtgagtcgctatttcgcaagatcgtcgtggccctattgggaacggagatgctcttaatgaagtaggaggaccgaccaatccaactagcaacagcaggcagggagtggatgcgcctgctagaagagtgctagctccgcgcatacgctcgctcgacaaacgtgtgttgttaactattgtatatagtgttataattactgtcctttattcttgatgtttgttttgtagttgaaactcacattgttttttcatttccatctcgattttgtatgccgtgaccacgaaagactaaatgttttcttgcggtttctaaaaatatagctctctattgttgtga

SEQ ID NO: 1785 - DNA, 3017 bp, Zea Mays
ccgtgtcttccctccgcgcgatactccccagtccccaatggtgcagatcgcggctcctccccgacggcgcgatggccgcgccccctctccctcccccggcgtgatgcacgcaaccccaccccctcggtgccatggtgccctcgccttcgcccccgtcaaccacgggcgtcaatgtcgaaggcgtccacaaccgcgcccccacctgcccccgcccacgctctcccacgatctctgccgccacgtctccgcgtttggcggcccgtcctcatcctcatccgcgcttggcggcccgtcgtcatcctcaggtcagatctgcgtttggcggcccgtcctcatcctcatccgcgcgcccccgcccgcgatctccgctgccgcgtcttcaccaccctcgcccgtgatctccgtcgccgtccgcacttgggtcaggtcagatctgcgtttggtggccatccccgtcctcatcctcttccttgcgcccacgcccactcttcatcctatttccgacttgggggaggacgacaaggtcatcgtcgagcgttgtgccagggaacggagtcgcccaccggcagctcctcaccaccgacgggaagcaactcgtggagatgctcaagcggtcaccctatttcttctccacccgcgtccacctctaggtccgcgtgggcgagcaatccaacgaggcaccgttctccccatcaaggagcaacttctttgggtttggtcggctgagagctactggtgtgctcaccttgtgtatgtcgaaatgctctatagtgaaaatattgcttggtgatgtgtaaatgccttatatattgcttggtgatgtgaaaattctccccatcaagatgatcactgaagtgcaagattactgggaattaggtataccgcggtgcactcactgaagtacaatttcccgtgcaagattactgggaattgtgttttatatcctcagttggcctacttgttggttgtgcttgtgcttctgttgggtgcaggacacgtgtggtggagaagaagggctgctggccttggctttgtgggcaacacactggctgaaggtacgagggtcattttgtgatttagtagaaacataaattatatcaggcataactcttggatctagatcatctaacactccatgaaagcccagaagtatatatatatatattcaccagaaagtgaggaggaagagaaagaggaggaaggcgaataagaatagaagatgggcagtgcaaacaagattaatgagaggtacttgaaactacagaagagcaagaagagcaccaaaactaaggatgataaacgaaaggtgcgcccaacaaagcgctcttgtggatgcacggcaatctaaatctaaatctatcaaggtgcaatttatcaggtgttgagtgtaatgtaccattttctgctttaaagtgttactctggtttgggccttttggcatctgtgattaccatatatattattttatttctcatattgcaaggcacacaacaaaggaagggaatgcacgagtcaacaaatgtgtagtgtagtttactaaatttagtaaacctggcctgcctcatctctggcctttaataattcttatgcatttgttaacattttttgaataatttctcatatcagcaagaacatttttttgtttctatttcactcttaacaccatgagcctttatctgcaagaaactttttcatttctgtttcactctaacgctgcacctttcgccttttcaggctgcttggaaagatcttgccatcagctccaccatccctcacttcccttccactgctgtcatgtagtctttagcaatcatgccctatgagtgatcctgctgatcatccagtaaaaaaagttaaaatagacatcacaaatggatctgatcacaaatcacaaatgtgacaagcttgctaaggtgaaactgctgaagatgttgtatgactactatgccgcgggcacatgacatcaattgactcaaggagaaaagagaggcgtcatccaaaattctgagtttgttcgctctattagagtccagaggcggtactgggcgaggagctatgctggatggataaggtttaggagagcacaaccaaatgcagcccattacgctccttccctttcatctgtctgcgcgccttcactttcatctggcactgggagttcctgtacatagacttgtaaaagctgccgactcagtttcggtacgttctcaagtcgctgggttctgcggtcaattcgcaacaggcatgagtatgaaatgacctgcttcaggtagtaacatatgcgggcggtgattctacttatttctctgaaacattatatgcgcaggtatgcctatctaaagggttaggcgcacccatcagatcagttgttgttggttcagaggccttcatcgacaaggctagaattcttaggaagaccctaggcggtgggatgagacaggttggatttctttgtgctgctgcttatgttgctgttcgtgacaccgtgggaaagcttgcggatgatcacaggaaggctaaagccttggcagagggcctgacgaaaattaaacagttcacggtggattcatcttcggtcgagaccaatatggtgttcttcgatatcgtggatccacacatttcaccgagcaagctatgccaagtcttggaacaacgcaatgttcttgcaatgccagcaagttcaaaaagtcgctatttcgcaagatcgtcgtggccctattgggaacggagatgctcttaatgaagtaggaggaccgaccaatccaactagcaacagcaggcagggagtggatgcgcctgctagaagagtgctagctccgcgcatacgctcgctcgacaaacgtgtgttgttaactattgtatatagtgttataattactgtcctttattcttgatgtttgttttgtagttgaaactcacattgttttttcatttccatctcgattttgtatgccgtgaccacgaaagactaaatgttttcttgcggtttctaaaaatatagctctctattgttgtga

SEQ ID NO: 1786 - DNA, 2793 bp, Zea Mays
gtgtcttccctccgcgcgatactccccagtccccaatggtgcagatcgcggctcctccccgacggcgcgatggccgcgccccctctccctcccccggcgtgatgcacgcaaccccaccccctcggtgccatggtgccctcgccttcgcccccgtcaaccacgggcgtcaatgtcgaaggcgtccacaaccgcgcccccacctgcccccgcccacgctctcccacgatctctgccgccacgtctccgcgtttggcggcccgtcctcatcctcatccgcgcttggcggcccgtcgtcatcctcaggtcagatctgcgtttggcggcccgtcctcatcctcatccgcgcgcccccgcccgcgatctccgctgccgcgtcttcaccaccctcgcccgtgatctccgtcgccgtccgcacttgggtcagggaacggagtcgcccaccggcagctcctcaccaccgacgggaagcaactcgtggagatgctcaagcggtcaccctatttcttctccacccgcgtccacctctaggtccgcgtgggcgagcaatccaacgaggcaccgttctccccatcaaggagcaacttctttgggtttggtcggctgagagctactggtgtgctcaccttgtgtatgtcgaaatgctctatagtgaaaatattgcttggtgatgtgtaaatgccttatatattgcttggtgatgtgaaaattctccccatcaagatgatcactgaagtgcaagattactgggaattaggacacgtgtggtggagaagaagggctgctggccttggctttgtgggcaacacactggctgaagaagtatatatatatatattcaccagaaagtgaggaggaagagaaagaggaggaaggcgaataagaatagaagatgggcagtgcaaacaagattaatgagaggtacttgaaactacagaagagcaagaagagcaccaaaactaaggatgataaacgaaaggtgcgcccaacaaagcgctcttgtggatgcacggcaatctaaatctaaatctatcaaggtgcaatttatcaggtgttgagtgtaatgtaccattttctgctttaaagtgttactctggtttgggccttttggcatctgtgattaccatatatattattttatttctcatattgcaaggcacacaacaaaggaagggaatgcacgagtcaacaaatgtgtagtgtagtttactaaatttagtaaacctggcctgcctcatctctggcctttaataattcttatgcatttgttaacattttttgaataatttctcatatcagcaagaacatttttttgtttctatttcactcttaacaccatgagcctttatctgcaagaaactttttcatttctgtttcactctaacgctgcacctttcgccttttcaggctgcttggaaagatcttgccatcagctccaccatccctcacttcccttccactgctgtcatgtagtctttagcaatcatgccctatgagtgatcctgctgatcatccagtaaaaaaagttaaaatagacatcacaaatggatctgatcacaaatcacaaatgtgacaagcttgctaaggtgaaactgctgaagatgttgtatgactactatgccgcgggcacatgacatcaattgactcaaggagaaaagagaggcgtcatccaaaattctgagtttgttcgctctattagagtccagaggcggtactgggcgaggagctatgctggatggataaggtttaggagagcacaaccaaatgcagcccattacgctccttccctttcatctgtctgcgcgccttcactttcatctggcactgggagttcctgtacatagacttgtaaaagctgccgactcagtttcggtatgcctatctaaagggttaggcgcacccatcagatcagttgttgttggttcagaggccttcatcgacaaggctagaattcttaggaagaccctaggcggtgggatgagacaggttggatttctttgtgctgctgcttatgttgctgttcgtgacaccgtgggaaagcttgcggatgatcacaggaaggctaaagccttggcagagggcctgacgaaaattaaacagttcacggtggattcatcttcggtcgagaccaatatggtgttcttcgatatcgtggatccacacatttcaccgagcaagctatgccaagtcttggaacaacgcaatgttcttgcaatgccagcaagttcaaaaagtgtcaggttcgtcatccattaccagattttagacagtgatgttcaatatgcattgacatgtgtcgagatgccaaaaggcccaaaccagagtaacactttaaagcagacacaataatcaaaagtcatggctacaatgaatggcccaacacacgtgtatttgcaacgtgcaagggtgacaagaatatgagcactctaatgcaccacccttttggtaactgggctgatacagtgagtcgctatttcgcaagatcgtcgtggccctattgggaacggagatgctcttaatgaagtaggaggaccgaccaatccaactagcaacagcaggcagggagtggatgcgcctgctagaagagtgctagctccgcgcatacgctcgctcgacaaacgtgtgttgttaactattgtatatagtgttataattactgtcctttattcttgatgtttgttttgtagttgaaactcacattgttttttcatttccatctcgattttgtatgccgtgaccacgaaagactaaatgttttcttgcggtttctaaaaatatagctctctattgttgtga

SEQ ID NO: 1787 - DNA, 1116 bp, Zea Mays
atggtgcagatcgcggctcctccccgacggcgcgatggccgcgccccctctccctcccccggcgtgatgcacgcaaccccaccccctcggtgccatggtgccctcgccttcgcccccgtcaaccacgggcgtcaatgtcgaaggcgtccacaaccgcgcccccacctgcccccgcccacgctctcccacgatctctgccgccacgtctccgcgtttggcggcccgtcctcatcctcatccgcgcttggcggcccgtcgtcatcctcaggtcagatctgcgtttggcggcccgtcctcatcctcatccgcgcgcccccgcccgcgatctccgctgccgcgtcttcaccaccctcgcccgtgatctccgtcgccgtccgcacttgggtcagggaacggagtcgcccaccggcagctcctcaccaccgacgggaagcaactcgtggagatgctcaagcggtcaccctatttcttctccacccgcgtccacctctaggtccgcgtgggcgagcaatccaacgaggcaccgttctccccatcaagatgatcactgaagtgcaagattactgggaattaggacacgtgtggtggagaagaagggctgctggccttggctttgtgggcaacacactggctgaaggtacgagggtcattttgtgatttagtagaaacataaattatatcaggcataactcttggatctagatcatctaacactccatgaaagcccagaagtatatatatatatattcaccagaaagtgaggaggaagagaaagaggaggaaggcgaataagaatagaagatgggcagtgcaaacaagattaatgagaggtacttgaaactacagaagagcaagaagagcaccaaaactaaggtttactgctcttgattatttatttgtactattacctttttgatgtgttttcctaatagttgttgaaactatcctttcacttgctttagcaaaatgtaattattgtttatatgggtgcccatgctatgattactggtgtttcttgacctttgtttattcaggaatatctgtaattggaaagttacttatctactttgttttgcttagcatttaaatggaccaaataatttagacataatcccc

SEQ ID NO: 1788 - DNA, 1316 bp, Zea Mays
atggtgcagatcgcggctcctccccgacggcgcgatggccgcgccccctctccctcccccggcgtgatgcacgcaaccccaccccctcggtgccatggtgccctcgccttcgcccccgtcaaccacgggcgtcaatgtcgaaggcgtccacaaccgcgcccccacctgcccccgcccacgctctcccacgatctctgccgccacgtctccgcgtttggcggcccgtcctcatcctcatccgcgcttggcggcccgtcgtcatcctcaggtcagatctgcgtttggcggcccgtcctcatcctcatccgcgcgcccccgcccgcgatctccgctgccgcgtcttcaccaccctcgcccgtgatctccgtcgccgtccgcacttgggtcagggaacggagtcgcccaccggcagctcctcaccaccgacgggaagcaactcgtggagatgctcaagcggtcaccctatttcttctccacccgcgtccacctctaggtccgcgtgggcgagcaatccaacgaggcaccgttctccccatcaaggacacgtgtggtggagaagaagggctgctggccttggctttgtgggcaacacactggctgaaggtacgagggtcattttgtgatttagtagaaacataaattatatcaggcataactcttggatctagatcatctaacactccatgaaagcccagaagtatatatatatatattcaccagaaagtgaggaggaagagaaagaggaggaaggcgaataagaatagaagatgggcagtgcaaacaagattaatgagaggtacttgaaactacagaagagcaagaagagcaccaaaactaaggtttactgctcttgattatttatttgtactattacctttttgatgtgttttcctaatagttgttgaaactatcctttcacttgctttagcaaaatgtaattattgtttatatgggtgcccatgctatgattactggtgtttcttgacctttgtttattcaggaatatctgtaattggaaagttacttatctactttgttttgcttagcatttaaatggaccaaataatttagacataatccccatttaaaaaattgtattgcttgattaccatatttatgtttgcttagcatttcaagactaacatcctgatgcaattttcagttcagttgattactactaatttgttattattgtcatgaatatgcaccttgaggatgataaacgaaaggtgcgcccaacaaagcgctcttgtggatgcacggcaatctaaatctaaatctatcaaggctgcttggaaagatcttgccatcagctc

SEQ ID NO: 1789 - DNA, 2672 bp, Zea Mays
atggtgcagatcgcggctcctccccgacggcgcgatggccgcgccccctctccctcccccggcgtgatgcacgcaaccccaccccctcggtgccatggtgccctcgccttcgcccccgtcaaccacgggcgtcaatgtcgaaggcgtccacaaccgcgcccccacctgcccccgcccacgctctcccacgatctctgccgccacgtctccgcgtttggcggcccgtcctcatcctcatccgcgcttggcggcccgtcgtcatcctcaggtcagatctgcgtttggcggcccgtcctcatcctcatccgcgcgcccccgcccgcgatctccgctgccgcgtcttcaccaccctcgcccgtgatctccgtcgccgtccgcacttgggtcagggaacggagtcgcccaccggcagctcctcaccaccgacgggaagcaactcgtggagatgctcaagcggtcaccctatttcttctccacccgcgtccacctctaggtccgcgtgggcgagcaatccaacgaggcaccgttctccccatcaaggtaacctagattttctcctattcccacaaaaaattgcatcggttacctacatcgcacatggaaataggagcaacttctttgggtttggtcggctgagagctactggtgtgctcaccttgtgtatgtcgaaatgctctatagtgaaaatattgcttggtgatgtgtaaatgccttatatattgcttggtgatgtgaaaattctccccatcaagatgatcactgaagtgcaagattactgggaattaggacacgtgtggtggagaagaagggctgctggccttggctttgtgggcaacacactggctgaaggtacgagggtcattttgtgatttagtagaaacataaattatatcaggcataactcttggatctagatcatctaacactccatgaaagcccagaagtatatatatatatattcaccagaaagtgaggaggaagagaaagaggaggaaggcgaataagaatagaagtgcaaacaagattaatgagaggtacttgaaactacagaagagcaagaagagcaccaaaactaaggatgataaacgaaaggtgcgcccaacaaagcgctcttgtggatgcacggcaatctaaatctaaatctatcaaggtgcaatttatcaggtgttgagtgtaatgtaccattttctgctttaaagtgttactctggtttgggccttttggcatctgtgattaccatatatattattttatttctcatattgcaaggcacacaacaaaggaagggaatgcacgagtcaacaaatgtgtagtgtagtttactaaatttagtaaacctggcctgcctcatctctggcctttaataattcttatgcatttgttaacattttttgaataatttctcatatcagcaagaacatttttttgtttctatttcactcttaacaccatgagcctttatctgcaagaaactttttcatttctgtttcactctaacgctgcacctttcgccttttcaggctgcttggaaagatcttgccatcagctccaccatccctcacttcccttccactgctgtcatgtagtctttagcaatcatgccctatgagtgatcctgctgatcatccagtaaaaaaagttaaaatagacatcacaaatggatctgatcacaaatcacaaatgtgacaagcttgctaaggtgaaactgctgaagatgttgtatgactactatgccgcgggcacatgacatcaattgactcaaggagaaaagagaggcgtcatccaaaattctgagtttgttcgctctattagagtccagaggcggtactgggcgaggagctatgctggatggataaggtttaggagagcacaaccaaatgcagcccattacgctccttccctttcatctgtctgcgcgccttcactttcatctggcactgggagttcctgtacatagacttgtaaaagctgccgactcagtttcggtatgcctatctaaagggttaggcgcacccatcagatcagttgttgttggttcagaggccttcatcgacaaggctagaattcttaggaagaccctaggcggtgggatgagacaggttggatttctttgtgctgctgcttatgttgctgttcgtgacaccgtgggaaagcttgcggatgatcacaggaaggctaaagccttgagggcctgacgaaaattaaacagttcacggtggattcatcttcggtcgagaccaatatggtgttcttcgatatcgtggatccacacatttcaccgagcaagctatgccaagtcttggaacaacgcaatgttcttgcaatgccagcaagttcaaaaagtcgctatttcgcaagatcgtcgtggccctattgggaacggagatgctcttaatgaagtaggaggaccgaccaatccaactagcaacagcaggcagggagtggatgcgcctgctagaagagtgctagctccgcgcatacgctcgctcgacaaacgtgtgttgttaactattgtatatagtgttataattactgtcctttattcttgatgtttgttttgtagttgaaactcacattgttttttcatttccatctcgattttgtatgccgtgaccacgaaagactaaatgttttcttgcggtttctaaaaatatagctctctattgttgtga

SEQ ID NO: 1790 - DNA, 1376 bp, Zea Mays
gtacaaggactatcattttaactcttggtgtagtcataatcacttcgattggtttgtttccttacaacatttattcataccaaattcctcaaaataatgctatcccaaagactctggtttcttgaaccattctgcagtttttgtctcactacttgtatctacgttttttatctttattatttgacctgtttcaaactatcagtccatctcaatctatattagttcttgaaggaatagtaaatggttctattgatggaaattggaattgagaatacatgccttgacatatataagaacctgtttgttgtttgatgaactaggaaataactaaaaattatttggacagagacatcacaaatggatctgatcacaaatcacaaatgtgacaagcttgctaaggtgaaactgctgaagatgttgtatgactactatgccgcgggcacatgacatcaattgactcaaggagaaaagagaggcgtcatccaaaattctgagtttgttcgctctattagagtccagaggcggtactgggcgaggagctatgctggatggataaggtttaggagagcacaaccaaatgcagcccattacgctccttccctttcatctgtctgcgcgccttcactttcatctggcactgggagttcctgtacatagacttgtaaaagctgccgactcagtttcggtatgcctatctaaagggttaggcgcacccatcagatcagttgttgttggttcagaggccttcatcgacaaggctagaattcttaggaagaccctaggcggtgggatgagacaggttggatttctttgtgctgctgcttatgttgctgttcgtgacaccgtgggaaagcttgcggatgatcacaggaaggctaaagccttggcagagggcctgacgaaaattaaacagttcacggtggattcatcttcggtcgagaccaatatggtgttcttcgatatcgtggatccacacatttcaccgagcaagctatgccaagtcttggaacaacgcaatgttcttgcaatgccagcaagttcaaaaagtcgctatttcgcaagatcgtcgtggccctattgggaacggagatgctcttaatgaagtaggaggaccgaccaatccaactagcaacagcaggcagggagtggatgcgcctgctagaagagtgctagctccgcgcatacgctcgctcgacaaacgtgtgttgttaactattgtatatagtgttataattactgtcctttattcttgatgtttgttttgtagttgaaactcacattgttttttcatttccatctcgattttgtatgccgtgaccacgaaagactaaatgttttcttgcggtttctaaaaatatagctctctattgttgtga

SEQ ID NO: 1791 - DNA, 1425 bp, Zea Mays
gtcgatagaaaaatagatcaaaacctagttttaattagaatagatttgtccacgctaactatacaaaaaattgtttattttggtgtgtacctaaacctatgtataaggggttaaaaaattgaggtggggccatggcccaccttgcccaccccttggatctgccactgcatgcggtggttcgaccagatccatctcacacccttatcctctttacgcctcaccactacagagaaaaagagaaacctgcgagcgacggggactatggccgccacccgcaccgccctggccctgctagggcacgagggcatggaatctgggcccaggccggcggcgccgcgccgcagcaggctacgcgtcgtcgccgtcgcgctgcggaccaggcccaccagcctcgcggccccgggtctcccgcccgcggcgccggagcccgtgctgccgtcgccgcccgtggccgcgggcgccgcggcggtgctgctcgaggcgggcgtgccgcctgccgacctccggcgcgcggcggggatgtgcccggagctgctgtccgtgtccgcggaagccgtcgaggccgcgctccggttcctcacggaggaggcgggcgtcgccgaggccgacctcccgcgcgtgctccggcggcgcccgcgcctgctcgtgtctcccgtggcggcgcggctgcggcccacgctctacttcctgcgcgcgctcggcgtgcccgacctgcaccgccgcgccgacctgctgtccttctccgtggagggcaagctgctgccgcggctcgagttcctcgagtcgctgggcctgccggcgcgcgccgcgcgctccatggcgcgccgcttccccgcgctcttcggctacggcgtggaggggaacatgcggcccaaggcggactacctcctgggcgccatggcccgccgcgccgacgagctgtacgacttccccgagtacttctcctacgcgctggccacgcgcatcgtgccgcgttacgaggcctgcgccgcgcgcggggtcagcaggctgccgcttcccgccatgctccgccccggggacgccaagttccgctccactctcaccagctgcgtcgggtccatgctgccccggaggcggtcggcgctgtggcacgccacgtgggtggatgacgacgcggcggcggcggcggcggcgaaggagaccacggtgtgacgtgcgcattggtagcgagcgagaggctcttgcctcttggtggtgtaacatatgtccataaggatttgcattggctgcttgtaaagtatgatagccatgatgaattatctagttggttcctcccagtgaacaatggcactgttggctatacttgcttatgcttatatatatacaggtccctacggccctacctatgcttttcgggtcctggcgcaaaagacacactgatgtcatataaaagaaaaatataaa

SEQ ID NO: 1792 - DNA, 2394 bp, Zea Mays
atggaagatatatactccggtccagcgagtaaaagagaagaaaatccggtctgtaccgtaccagacggcccagaaggccagaaagggaaagacggcccatctagtactgctagacaaggcgacaagctgcgacgccggcggctagaactccgggaccgggactcattcggtgccgcgcgtctactgctgatggaggctatggatttcaccgtcgccagcgccgacacggggtgccaggaacctccgaatacgctggtggactgggcgctggagatcctctccacagccgatccggacgagaaggcccgcctcggggacctcgccgcgtcgcggtggctgcgcggcgacatcccgcttccctacgacccgtcccgccccgcgcgcccgccgcccgaccgccccgcccggagcgccgaggtgcggctgctcccgccgtcgcggatgccgaagctgggcaagggcggcagcgcgcagagccgtttggccatgctccactcgctggcgcacaccgagagctgggctgtcgacctttcctgggacatcgtcgcccggttcggcgcggccatgcggatgccccgcgacttcttcgacgacttcgcgcgcgtcgcgcaagacgaggggaggcactacacggtgctctcagcgcggctgagggagctcgggtcgcattacggcgccctcccggcgcacgacgggctatgggactcggcgatgcgcacctcgcatagccttctcgcgcgcctcgccgtcgagcactgtgtccacgagattgtccatgtttccaccatgaagatctccttaaaaactggccaccgtgactttataagtaaactgataaaaaagtgatattcgaaggttgaagaacaggcaggaaaacttactggactaccacatttttatgtccattcaaacgtttcctaaagtagcaagagccattgcttgctgccatggttttgatgcaagagaatgagctacccctgccacagtccatcggatctcttaatgattggccatcaactcagcattgtataaaaagtttcaagatcaaaggtttggggtggctgctggccacagagctatggaactcgtgagatttaatgatgaggttttaatagcataaacacaagtttatttgtattgtcagacaattaattacgcaagaggatgcaatttgataattgctatggtgattggacatagggcatgatatgaaaacagatgtccttcaggggaataagtaatcctttaatgcagtttcttctctaaacttacaactacatctttccagatctttaactgtttttcctgcacttagaaatgttttttaagctcatattgctcatcagatgatgcgtgaggctcactgtgatcgattaagtggtctgcagatttgtaatgctgcagttatctgggttacatgaaggatatcatttagctgcagtgcccatgagatgatgaatctttttaaccacacgctaggggattagatgtccttccaacaaccatatcaagattccgagcaggtggggatgagcaaacagcaagactactagaagatattatttatcctgaagaggtgacacattgctcagctggtgttagatggttcagatacctgtgccttaggtcccacggtaatcacccaacctcatgttcagttcctggactggaaccccgttcctctgggctgccgggggatggcactgctgatggtaagacagctagggaggctgaaggtgaacctacacccaaactggcgaaagacgtcaggggtgacgacaagatggtccagcaggtggaagatgaactgccatccaggattgcacaggatgctaatggtcgatctaaggtgaccgaacacgtcgaggacggattagcaaagtgcaaacttgatgacagtattgagaaatacgaagagttggtcattaggactttccacagggtggtaagagagtattttcggggacccctgaagccgcccttcaacacggaggcgaggaaagctgccggctttgagcctgcctggtatgaacccctggcagtgaaggaggcatgcatagagggggagacaattgagtgatgaatttgcactgttgttgtagtgtctgtgctatgtagcaggctagaaggcatatttgaaaatttgctgcgactagcgttccagtaccattatttgtttagcagatggtgcggcgctgagccttttttctaatcatgtttgtttgcttgccatggagacgcatgaacctatctgtgtgaaagcctttgttcagcttgacgtgggcttggagtgtgaaggtggagcctgagaccaccaaatacgatgccaattgaggctggatttacaattacaaaactcaaattggttcacccaggcctaggcccatccaaaat

SEQ ID NO: 1793 - DNA, 984 bp, Zea Mays
gataattgctatggtgattggacatagggcatgatatgaaaacagatgtccttcaggggaataagctaggggattagatgtccttccaacaaccatatcaagattccgagcaggtggggatgagcaaacagcaagactactagaagatattatttatcctgaagaggtgacacattgctcagctggtgttagatggttcagatacctgtgccttaggtcccacggtaatcacccaacctcatgttcagttcctggactggaaccccgttcctctgggctgccgggggatggcactgctgatggtaagacagctagggaggctgaaggtgaacctacacccaaactggcgaaagacgtcaggggtgacgacaagatggtccagcaggtggaagatgaactgccatccaggattgcacaggatgctaatggtcgatctaaggtgaccgaacacgtcgaggacggattagcaaagtgcaaacttgatgacagtattgagaaatacgaagagttggtcattaggactttccacagggtggtaagagagtattttcggggacccctgaagccgcccttcaacacggaggcgaggaaagctgccggctttgagcctgcctggtatgaacccctggcagtgaaggaggcatgcatagagggggagacaattgagtgatgaatttgcactgttgttgtagtgtctgtgctatgtagcaggctagaaggcatatttgaaaatttgctgcgactagcgttccagtaccattatttgtttagcagatggtgcggcgctgagccttttttctaatcatgtttgtttgcttgccatggagacgcatgaacctatctgtgtgaaagcctttgttcagcttgacgtgggcttggagtgtgaaggtggagcctgagaccaccaaatacgatgccaattgaggctggatttacaattacaaaactcaaattggttcacccaggcctaggcccatccaaaat

SEQ ID NO: 1794 - DNA, 794 bp, Zea Mays
gagggagcggggataagcgagggaggagggggaaaccgaagatgctcctgctgcgcggcgccagggcggcgtcggcgtgggcggcatccaccgcggtgtccgcaggcgccagcagcagcaggtccatatccattcggctggcccccgtcgccgcattgtcctcgggcggaaggaagaggaagggccagcggcggggcgaggccaagcccccgagcccgccgccgccgccgcccctacctcggcagggcgagaccccgagcagcaagaagaagtccggcgcgaggccgtcgggcgagggaaagaagagccgcttggtggagctggaagaagcgcgcggcccgcggaggccggagggcggcgaggcgaggaaggggaatacgcagcagcagcagcagcaggaggagaaggcgaaggcgaaaaggctggtgaagtggaagtgcgcgagcgggtgcggtgcgtgttgcaagctagacaaggggcccgacttccctattcccgacgagatcttcgccgaccatcccgatgacctccaggagtatgatcggctctgatggatggtgcattaactacgacaaggccacccgcacctgcaacatctaccaagaccgaccttccttctgcagggtggaaccaaagatttttgatgaattatttggcgtgccacgcagcagatttgaccgggaagcttgcagtgcttgtgtggataccatcaagatggtgtatggtgatgactctgcagaactcagtaatttcaagcgtgtgataagggaggaaagtaacaagctgaagggcga

SEQ ID NO: 1795 - DNA, 1648 bp, Zea Mays
cccatctttcgttaggataagaggaaccctagtccctagcaacgcctacagcgtcacggaacaccggcgaaccaaacctcggagaaaccctagcaaggccgcttgcccctctcaggcgcgacacagcatcggcgactagcgatgacaggatatcgcagccgcagtccgagccgaagctacagcccacggaggcggtacagccggagccctcctaggcgcaagcgctacgacgatccacgcgaccgctaccgctgggccggggccggcggaggcggggaccgacgtggttacggtcggccgttggcgcagtccggtctcctcatccgtaatatctccctcacagccaggccagaagatattcgagctacatttgagcaattcggccctatcaaggatgtttacctgccaaggaatttccacacgagggaacttcgtggttttggatttgtcaaattccgctaccctgaggatgctgcagttgccaagcgtgagatgcatcatcaagtcattggtgggcgagaaatttcaatagtttatgctgaggagaatcgaaaaacgccacaagaaatgcgcatgagaacaagaactagtggtaggtacatggatgaaagatacacaagactgtcaagatctccaaggtctcgttcccactcttattcaccaccgccttctccagttaggcgtgacttcagtcaacaaagaatatagagtatctaaaagaccaaaagacaaccataatgtttggagattaaaagccaaagtgaaagtaccatggcttccagggttgagcatgtgaaaggcattattgttaaagataaagtggtgctgtcagtcaagagtttaatgataatcttggctaagatacctgacggaaagagtatgttgaagttgagccagcgccttaatgcattgcacaattgcatgtttggatcaaagtgggtagcttttattgatatggggcaggggcagggagcgcccggatagttattcccctcagtactcgcactctccacgccctcgggacagcaggcaccacaggtcagatggtcgctctccaactccaagcctagatgaccacaaacctaaggcgacaccagtcaatggtggacatggtccagcagttgcatccagatagtatgatgccattatggatgccttgaattgtgttcggaggctggagactgcagactatcttttcaccaatcttctctaagagatgagtagggttgtagtaaacagatacttggtagttgtattacaggtgatggtttcggttatgaggtgcgctgttgcttttgtgacgctgctttaatgctttcccaaccgagggtagtagggtaccgtcgtggaattttgcgtgtttgttttttggctacaatattactaatactagtaacttgctcgcttcgagcgcgagtctttatctatgtgtctacacatccaaaagatcgttgttgtagattatatagaatcggcacattcaataaaaattaggaagggagatataagttaattagcaatatctaagtagcttgtaaaatcagacgttacatagcttactaattacgtggtaatttgtataaacaaaatttaagatgtgtcttatgaggagactaagctgaaggaactctgcttcattgaatttcag

SEQ ID NO: 1796 - DNA, 1377 bp, Zea Mays
cccatctttcgttaggataagaggaaccctagtccctagcaacgcctacagcgtcacggaacaccggcgaaccaaacctcggagaaaccctagcaaggccgcttgcccctctcaggcgcgacacagcatcggcgactagcgatgacaggatatcgcagccgcagtccgagccgaagctacagcccacggaggcggtacagccggagccctcctaggcgcaagcgctacgacgatccacgcgaccgctaccgctgggccggggccggcggaggcggggaccgacgtggttacggtcggccgttggcgcagtccggtctcctcatccgtaatatctccctcacagccaggccagaagatattcgagctacatttgagcaattcggccctatcaaggatgtttacctgccaaggaatttccacacgagggaacttcgtggttttggatttgtcaaattccgctaccctgaggatgctgcagttgccaagcgtgagatgcatcatcaagtcattggtgggcgagaaatttcaatagtttatgctgaggagaatcgaaaaacgccacaagaaatgcgcatgagaacaagaactagtggtaggtacatggatgaaagatacacaagactgtcaagatctccaaggtctcgttcccactcttattcaccaccgccttctccagttaggcgtgacttcaggggcagggagcgcccggatagttattcccctcagtactcgcactctccacgccctcgggacagcaggcaccacaggtcagatggtcgctctccaactccaagcctagatgaccacaaacctaaggcgacaccagtcaatggtggacatggtccagcagttgcatccagatagtatgatgccattatggatgccttgaattgtgttcggaggctggagactgcagactatcttttcaccaatcttctctaagagatgagtagggttgtagtaaacagatacttggtagttgtattacaggtgatggtttcggttatgaggtgcgctgttgcttttgtgacgctgctttaatgctttcccaaccgagggtagtagggtaccgtcgtggaattttgcgtgtttgttttttggctacaatattactaatactagtaacttgctcgcttcgagcgcgagtctttatctatgtgtctacacatccaaaagatcgttgttgtagattatatagaatcggcacattcaataaaaattaggaagggagatataagttaattagcaatatctaagtagcttgtaaaatcagacgttacatagcttactaattacgtggtaatttgtataaacaaaatttaagatgtgtcttatgaggagactaagctgaaggaactctgcttcattgaatttcag

SEQ ID NO: 1797 - DNA, 675 bp, Zea Mays
aagaggaaccctagtccctagcaacgcctacagcgtcacggaacaccggcgaaccaaacctcggagaaaccctagcaaggccgcttgcccctctcaggcgcgacacagcatcggcgactagcgatgacaggatatcgcagccgcagtccgagccgaagctacagcccacggaggcggtacagccggagccctcctaggcgcaagcgctacgacgatccacgcgaccgctaccgctgggccggggccggcggaggcggggaccgacgtggttacggtcggccgttggcgcagtccggtctcctcatccgtaatatctccctcacagccaggccagaagatattcgagctacatttgagcaattcggccctatcaaggatgtttacctgccaaggaatttccacacgagggaacttcgtggttttggatttgtcaaattccgctaccctgaggatgctgcagttgccaagcgtgagatgcatcatcaagtcattggtgggcgagaaatttcaatagtttatgctgaggagaatcgaaaaacgccacaagaaatgcgcatgagaacaagaactagtggtaggtacatggatgaaagatacacaagactgtcaagatctccaaggtctcgttcccactcttattcaccaccgccttctccagttaggcgtgacttcagt

SEQ ID NO: 1798 - DNA, 1335 bp, Zea Mays
aagaggaaccctagtccctagcaacgcctacagcgtcacggaacaccggcgaaccaaacctcggagaaaccctagcaaggccgcttgcccctctcaggcgcgacacagcatcggcgactagcgatgacaggatatcgcagccgcagtccgagccgaagctacagcccacggaggcggtacagccggagccctcctaggcgcaagcgctacgacgatccacgcgaccgctaccgctgggccggggccggcggaggcggggaccgacgtggttacggtcggccgttggcgcagtccggtctcctcatccgtaatatctccctcacagccaggccagaagatattcgagctacatttgagcaattcggccctatcaaggatgtttacctgccaaggaatttccacacgagggaacttcgtggttttggatttgtcaaattccgctaccctgaggatgctgcagttgccaagcgtgagatgcatcatcaagtcattggtgggcgagaaatttcaatagtttatgctgaggagaatcgaaaaacgccacaagaaatgcgcatgagaacaagaactagtggtaggtacatggatgaaagatacacaagactgtcaagatctccaaggtctcgttcccactttaggcgtgacttcaggggcagggagcgcccggatagttattcccctcagtactcgcactctccacgccctcgggacagcaggcaccacaggtcagatggtcgctctccaactccaagcctagatgaccacaaacctaaggcgacaccagtcaatggtggacatggtccagcagttgcatccagatagtatgatgccattatggatgccttgaattgtgttcggaggctggagactgcagactatcttttcaccaatcttctctaagagatgagtagggttgtagtaaacagatacttggtagttgtattacaggtgatggtttcggttatgaggtgcgctgttgcttttgtgacgctgctttaatgctttcccaaccgagggtagtagggtaccgtcgtggaattttgcgtgtttgttttttggctacaatattactaatactagtaacttgctcgcttcgagcgcgagtctttatctatgtgtctacacatccaaaagatcgttgttgtagattatatagaatcggcacattcaataaaaattaggaagggagatataagttaattagcaatatctaagtagcttgtaaaatcagacgttacatagcttactaattacgtggtaatttgtataaacaaaatttaagatgtgtcttatgaggagactaagctgaaggaactctgcttcattgaatttcag

SEQ ID NO: 1799 - DNA, 1540 bp, Zea Mays
aagaggaaccctagtccctagcaacgcctacagcgtcacggaacaccggcgaaccaaacctcggagaaaccctagcaaggccgcttgcccctctcaggcgcgacacagcatcggcgactagcgatgacaggatatcgcagccgcagtccgagccgaagctacagcccacggaggcggtacagccggagccctcctaggcgcaagcgctacgacgatccacgcgaccgctaccgctgggccggggccggcggaggcggggaccgacgtggttacggtcggccgttggcgcagtccggtctcctcatccgtaatatctccctcacagccaggccagaagatattcgagctacatttgagcaattcggccctatcaaggatgtttacctgccaaggaatttccacacgagggaacttcgtggttttggatttgtcaaattccgctaccctgaggatgctgcagttgccaagcgtgagatgcatcatcaagtcattggtgggcgagaaatttcaatagtttatgctgaggagaatcgaaaaacgccacaagaaatgcgcatgagaacaagaactagtggtaggtacatggatgaaagatacacaagactgtcaagatctccaaggtctcgttcccactcttattcaccaccgccttctccagttaggcgtgacttcagggttgagcatgtgaaaggcattattgttaaagataaagtggtgctgtcagtcaagagtttaatgataatcttggctaagatacctgacggaaagagtatgttgaagttgagccagcgccttaatgcattgcacaattgcatgtttggatcaaagtgggtagcttttattgatatggggcaggggcagggagcgcccggatagttattcccctcagtactcgcactctccacgccctcgggacagcaggcaccacaggtcagatggtcgctctccaactccaagcctagatgaccacaaacctaaggcgacaccagtcaatggtggacatggtccagcagttgcatccagatagtatgatgccattatggatgccttgaattgtgttcggaggctggagactgcagactatcttttcaccaatcttctctaagagatgagtagggttgtagtaaacagatacttggtagttgtattacaggtgatggtttcggttatgaggtgcgctgttgcttttgtgacgctgctttaatgctttcccaaccgagggtagtagggtaccgtcgtggaattttgcgtgtttgttttttggctacaatattactaatactagtaacttgctcgcttcgagcgcgagtctttatctatgtgtctacacatccaaaagatcgttgttgtagattatatagaatcggcacattcaataaaaattaggaagggagatataagttaattagcaatatctaagtagcttgtaaaatcagacgttacatagcttactaattacgtggtaatttgtataaacaaaatttaagatgtgtcttatgaggagactaagctgaaggaactctgcttcattgaatttcag

SEQ ID NO: 1800 - DNA, 1606 bp, Zea Mays
aagaggaaccctagtccctagcaacgcctacagcgtcacggaacaccggcgaaccaaacctcggagaaaccctagcaaggccgcttgcccctctcaggcgcgacacagcatcggcgactagcgatgacaggatatcgcagccgcagtccgagccgaagctacagcccacggaggcggtacagccggagccctcctaggcgcaagcgctacgacgatccacgcgaccgctaccgctgggccggggccggcggaggcggggaccgacgtggttacggtcggccgttggcgcagtccggtctcctcatccgtaatatctccctcacagccaggccagaagatattcgagctacatttgagcaattcggccctatcaaggatgtttacctgccaaggaatttccacacgagggaacttcgtggttttggatttgtcaaattccgctaccctgaggatgctgcagttgccaagcgtgagatgcatcatcaagtcattggtgggcgagaaatttcaatagtttatgctgaggagaatcgaaaaacgccacaagaaatgcgcatgagaacaagaactagtggtaggtacatggatgaaagatacacaagactgtcaagatctccaaggtctcgttcccactttaggcgtgacttcagtcaacaaagaatatagagtatctaaaagaccaaaagacaaccataatgtttggagattaaaagccaaagtgaaagtaccatggcttccagggttgagcatgtgaaaggcattattgttaaagataaagtggtgctgtcagtcaagagtttaatgataatcttggctaagatacctgacggaaagagtatgttgaagttgagccagcgccttaatgcattgcacaattgcatgtttggatcaaagtgggtagcttttattgatatggggcaggggcagggagcgcccggatagttattcccctcagtactcgcactctccacgccctcgggacagcaggcaccacaggtcagatggtcgctctccaactccaagcctagatgaccacaaacctaaggcgacaccagtcaatggtggacatggtccagcagttgcatccagatagtatgatgccattatggatgccttgaattgtgttcggaggctggagactgcagactatcttttcaccaatcttctctaagagatgagtagggttgtagtaaacagatacttggtagttgtattacaggtgatggtttcggttatgaggtgcgctgttgcttttgtgacgctgctttaatgctttcccaaccgagggtagtagggtaccgtcgtggaattttgcgtgtttgttttttggctacaatattactaatactagtaacttgctcgcttcgagcgcgagtctttatctatgtgtctacacatccaaaagatcgttgttgtagattatatagaatcggcacattcaataaaaattaggaagggagatataagttaattagcaatatctaagtagcttgtaaaatcagacgttacatagcttactaattacgtggtaatttgtataaacaaaatttaagatgtgtcttatgaggagactaagctgaaggaactctgcttcattgaatttcag

SEQ ID NO: 1801 - DNA, 2646 bp, Zea Mays
aagaggaaccctagtccctagcaacgcctacagcgtcacggaacaccggcgaaccaaacctcggagaaaccctagcaaggccgcttgcccctctcaggcgcgacacagcatcggcgactagcgatgacaggatatcgcagccgcagtccgagccgaagctacagcccacggaggcggtacagccggagccctcctaggcgcaagcgctacgacgatccacgcgaccgctaccgctgggccggggccggcggaggcggggaccgacgtggttacggtcggccgttggcgcagtccggtctcctcatccgtaatatctccctcacagccaggccagaagatattcgagctacatttgagcaattcggccctatcaaggatgtttacctgccaaggaatttccacacgagggaacttcgtggttttggatttgtcaaattccgctaccctgaggatgctgcagttgccaagcgtgagatgcatcatcaagtcattggtgggcgagaaatttcaatagtttatgctgaggagaatcgaaaaacgccacaagaaatgcgcatgagaacaagaactagtggtaggtacatggatgaaagatacacaagactgtcaagatctccaaggtctcgttcccactcttattcaccaccgccttctccagttaggcgtgacttcaggtttgaactcaattttttatttcaaatagactagtatcttgaattgttggttgttcttcaatcctatatgttctttgaatgcctctgctattttcaatttttaggagcagttgcatttctttccagttcatatggatataattttatcatgatcaaaccattagaaggatgtgccaaagtggttgcattgttccaagtatactgtttaatttttcatgaacaatattttcataacatggtaatcatggtttttaaagtggtaaggcgagacaaggcgttggaccaccgcctggacgcctaggcgtcaccttaagaacagtgatggtaattttagaacttgttgcttttattaaaatcggcagttggagttgcatacttgtgattgcgtcaatgttcaaaatattatatatgctagaagcaagggtggatatttaatgtattcacaatgtatttattacttgtttattataccccttttatgatttaaaggtaatacaccataagaaaaagggcaaacccagtgtgggtggctcccacatgagtggggtttggggaatggataaaccgaggcaagccttcccccgcaaatgaggagaggctgcttagtgagtcagtgagacaactctcaccatcacacctggcctgcccttctagatatataatgctccatccatccctaaataaatcaacttctagagttatcttaaatcaaacttttgtaagattgaccagcttaataggaaagaatatcaacacctatggcaccaattaagtagactatgaaagtatattacatggtatatctaaaaaatgatctagttttgtcatatttctctataaaatttggtcaaacttacatgacttagggcaattctagaatttgatttatttgggaactgaggcagtaggtaggtgtcaaatgggtttgtttatctcattgctgtcatcaatataaatgaggatcaagcctctattcttgtcaaataaattggaacttcagttcctcgttacgtcttgttgagttctccaaatatatatcatagtttgattgctaaaatgttaatctccctgtatggttatttttcaatattatatccttagacttgctcacaaagaagtactttcaagactgaaaatgattgtggtgctcgtccagattggtaatttcatttggttttttttatatttacaattggatgtgaatgacaacaatgtggttttgttagattatttgataactgttgatatcatgtgttcttgaaacaaggccttgaattttgctctgaattgtgttgctttggttatgtctactatccagtcaacaaagaatatagagtatctaaaagaccaaaagacaaccataatgtttggagattaaaagccaaagtgaaagtaccatggcttccagggttgagcatgtgaaaggcattattgttaaagataaagtggtgctgtcagtcaagagtttaatgataatcttggctaagatacctgacggaaagagtatgttgaagttgagccagcgccttaatgcattgcacaattgcatgtttggatcaaagtgggtagcttttattgatatggggcaggggcagggagcgcccggatagttattcccctcagtactcgcactctccacgccctcgggacagcaggcaccacaggtcagatggtcgctctccaactccaagcctagatgaccacaaacctaaggcgacaccagtcaatggtggacatggtccagcagttgcatccagatagtatgatgccattatggatgccttgaattgtgttcggaggctggagactgcagactatcttttcaccaatcttctctaagagatgagtagggttgtagtaaacagatacttggtagttgtattacaggtgatggtttcggttatgagtccaatggccaaaatatcgtccgaggaaaaaatggtgaaatcagggtttatatgatctcgaggat

SEQ ID NO: 1802 - DNA, 907 bp, Zea Mays
aagaggaaccctagtccctagcaacgcctacagcgtcacggaacaccggcgaaccaaacctcggagaaaccctagcaaggccgcttgcccctctcaggcgcgacacagcatcggcgactagcgatgacaggatatcgcagccgcagtccgagccgaagctacagcccacggaggcggtacagccggagccctcctaggcgcaagcgctacgacgatccacgcgaccgctaccgctgggccggggccggcggaggcggggaccgacgtggttacggtcggccgttggcgcagtccggtctcctcatccgtaatatctccctcacagccaggccagaagatattcgagctacatttgagcaattcggccctatcaaggatgtttacctgccaaggaatttccacacgagggaacttcgtggttttggatttgtcaaattccgctaccctgaggatgctgcagttgccaagcgtgagatgcatcatcaagtcattggtgggcgagaaatttcaatagtttatgctgaggagaatcgaaaaacgccacaagaaatgcgcatgagaacaagaactagtggtaggtacatggatgaaagatacacaagactgtcaagatctccaaggtctcgttcccactcttattcaccaccgccttctccagttaggcgtgacttcaggggcagggagcgcccggatagttattcccctcagtactcgcactctccacgccctcgggacagcaggcaccacaggtcagatggtcgctctccaactccaagcctagatgaccacaaacctaaggcgacaccagtcaatggtggacatggtccagcagttgcatccagtccaatggccaaaatatcgtccgaggaaaaaatggtgaaatcagggtttatatgatctcgaggat

SEQ ID NO: 1803 - DNA, 2178 bp, Zea Mays
agtaaacacaactcacatacaaacacttgcagcggaaataaactctttattacaaaatgattacaagtttatcaagattttattatacctcatcggagtgattacaaaagaaagtgtttcaaaagaattacactttaaaatgttatagaatatttgtaaatttgaaatacatgctagcttaagtgacaatcctcattaaagaaactatagaagggatatacttatataagaaggccgagcccaccgacacttagcaccatccacaacagaacaaaaattacaacctgaaaaacaacagggaataaaaccctgagtatgcaattactcagcaagacttacctgactaaagaaaagactctcaagggtatgctggtttgtcgggaatcaaggtaaagcttatcaaatttcaaagactcatttttgcagaaaagcttactagtagtggatccttatgccaaaattttacatcacaagttaagtacttttcctgaatctagatttgcctaatctagagcattcacttgtcctatactaactttcttttaaaatcaaaattttgtttcacttgttatctacgatgaagggcagtgatccagtcttcatatccgagaagtaacggcgattcaaatcgattaatacccagctggggatctccaaccacacgacatatgtagcacttaacccttgcatatgtcaaccattcccacggatcctccactacatgaaccggtccgcgctacccgggagcacattaccctaccatccagcctcttgccaggagggtaactgctactcccaccatctcccacgcccagtgcacggttgtcttttcacgtatggaatagccgggttcaggcttacccatgacgaggtatgtggccagttaaaaggtcctagatcatcaggccaacaatcggtatggtccttaatcgacacagacggacgacctttcctgctcaacgtctggtcccattttaaactatttcaaaaatttggcgcctgacagaggggccatgcctggataatgaatttatcaacgtcttgatgccttcattgtcccaagcccattttattttttttgtaaaaacatgagtcatagatcaaaaatatgtttcttaatctatcagcaagactaagcatctctagcttttataaaacgggtgacaaggtgtggtaatcaacctttcaaggatggtaatgcatcaagtgtttaatcactcaactcctatcacctaatgcagcatataagtgataaaattttgtaaacacaaggaaggtggcaaatgcaccggggcttgcctgggataacactaagtcagtgttgttagatgacgatcacttggtgagcatctcccatcctggtacatgatcaaatcatccacttctctggtttattcatcagcatcactttgagattaatccaactattgtcttccacatcacgtgatcaattaacgtaccacaactaaatcgcctcgaatccgagagatcgacaacaacctccggttgagacgttccaccaagcacccggcgggcgttacctttagaacttcgagctcttcgccctccaacaccggaagtttctccatggttggcggcttgagaacaagctgcaggggcatggggatggagacctaggtaccatggatgaagagacgtcgaccatcaacagaggggggttaagtgcttcaacatgggaggaaaggaaaagggatcatcaggttgctgcaggaaatggacaagcagaggcgggaggcgagttccagggaggggcagcaccagaggtgttttcgaccaagggaaaaagaccaggcgctatttggggggatcctgcagggagaaaactcaaccatggagatccagggcggccatgggagctaggcatcggtctgggcgaacatgccaggaacctagcaggggcatcgagtaaaggggctggcatccagggcaccatggaaaaactcagctagggcttgagggaggagggcagagggcggccatggcagaggcgagctccacggatggaggttgaagacgacctggcggctagcgcacgtaggaaggagctccacagcgctagagaccagagagaggcggtcgagctagctgagggagatgagtgcgcagcaaatatcccagggagtcggcgtcactagaagataaaggagcgtatgtgag

SEQ ID NO: 1804 - DNA, 611 bp, Zea Mays
ccggggtgtcaaggccagcgttgtggacggtgatagtaataataaccagtatttgggcacacatgttacctagcattgcttcaacaccaacgctaacacgtcaaacacaattaattagacgtgtaccgcaccaagcttacattactgtcgcatctcctagcaacagattacaacccacccgactgaaaaaaaaaacacagcacagcgagatggaaaggcggcgccgaggcggttaaaacggtgcgcacggcgccttcacacagaacagcacagcacagcccagactgcatggtttttaaagcggtaaggcggtccaaggcgttggaggaccgcctggacgcctaggcgaggtaggcgggcaaggcgcctaggcgttagaccaccgcccggacgcctaggcgacgcctaggcgacgccttaaaaacagagccagactgacgaggaaggaaaatcagaggaactggtgcaagcaagctgtgcgaatcgcggattgttaagagtggtggggattggcagagcagcacaggtgccatcaccagggagttttgtcgcctggcccagcaaggatgatctgcaaccatttcattaaggtgagaagaaaaaaatgttgc

SEQ ID NO: 1805 - DNA, 317 bp, Zea Mays
gttgtgtctggatcgaaggggattaaatccctctctagtcaaaattgaatagaatggggatttaatccccttctatccagacgcaaccgaacaaggcctcaaggttctaatggctgtgtctggaattggtttatggctacgttaccagcagtactgttcaaattaagagaccagcagctaatatactggccgtgccgattcagactactaactaggaatcaatacttgaaaagactgcaataccaacatggcatatttgtagaaaagaatgccatagagcggcgaaggatgccggaatcatacattgaattcagttt

SEQ ID NO: 1806 - DNA, 199 bp, Zea Mays
gccgcctccgcggcagaacagctcgaatcgagtcgcgggacccacagcagaaggggaagaactgctggccgcggaatcgataacccgcgccgcaatgggggtcactccggcgagacacctgcggcgagattggggatctcgcgagggcgagagtgatgcgttgcgggccagcggaggaccggaggtagttgcttttctg

SEQ ID NO: 1807 - DNA, 2549 bp, Zea Mays
gagaaggagagcgcaacggaaagcaacccaaggtctctccttttccgccacacaggactcacgcgctcttcaatcgctcgctccgtttctacctcctctcgccttccttccttccttcgatcccgctttgtttgtcgtcatcgcccgcccccgaagctccgacctttcccccactttcccttggcgtctacggccttgtccggtgtagaaaacaacgggtttcgtttgtgttgttttgctgcggtttttgtccgctcctgggagttcaatccctgctccatctcttaagagcactcctcccctcccactcagtgtgctttgctgttcactttggattccgcggctttgtttcgggttcttgattaggaaggttcggttcctggtttgggaaggtcccccttccgaggcgaggaatttggtgcgggttgatgcgtcttgccaggaatccgcgatgcaatgataggttgttgaagccgaggtgaatctttgacctgcagaatttcctagctgaagtcccaccgcttctcgatcagccgggcgccatgggcctctgcctgggcaagtcggcagcggtccaggagccggcggtggcggaagacaacagcgtagccgatggcgcggcggcgggctgcggcgatgggccgcccgtgaaggcgcctcggacgcccaagcagcccaagttctccttctacctgccgagcccgctccagccctccagctacaagggctcgccggccaactccagcgccgcgtccacgccggcgcgcggcgggttcaagcgcccattcccgccgccgtcgcctgccaagcacatccgtgcgctgctggcgcggcgccacggctcggtcaagcctaacgaggcgtccatccccgaaggcggcgagctggacctggggctggacaagagcttcggctactccaggcacttcgcggccaagtacgaccttggccgggaggtggggcgcggccactttggcttcacctgcgctgccaagtgcaagaagggcgagctcaagggggaggacgtcgccgtcaaggtccttcccaaggccaagatgactactgctattgccattgaagatgtcagacgagaagtcagaatattgagttctttggcaggccacattaacctagtgcaattttatgatgcttttgaggatgaagaaaatgtatatgttgttatggaattatgcaaaggaggtgaactgctggacagaattttggctagaggtggcaaatattctgagggcgatgctaaggttattattcaccaaattctaagtgttgcttcattttgtcatcttcagggtgttgttcaccgggatctgaaaccagagaattttcttttcatgtcaaaggatgagaattctgccttgaaagtcatagactttggtttgtctgactttgttaaaccagaggctgatatgtggagcattggagtaattgcatatattttgctttgtggaagccgccctttctgggcacgaactgagtcaggaatttttcgagctgtcctaaaagcagagcctagttttgatgaaattccatggcctaccctttctgctgaggcgaaagactttgtaagaaggctactcaataaggattaccgtaagcggatgactgctgcacaagccctctgccatccatggatccgtggcacacaggaagttaagattaatctagacatgataatctacaggcttatgagggcttacataagttcatcttctctacggaaatctgcattgagggctcttgcaaaggcactgacgacagatcaactcttctacctaagagagcagtttacattattaggtccaaacaagagtggccatatatcattgcaaaatatgaagacggccttgattaaaaattcctcgggtgcaatgaatgattctaggattcttgactttgttaactcaatatgcaatatccaatatggcatgattgattttgaagagttctctgctgcggccattagtgtatatcaaatggagggcctggagacctgggaagaacatgctcaacaagcatatgaattgtttgacaaggagggcaaccgaccaattgtgattgaagaacttgcatcggaacttggacttggcccttcgatctcacttcatgttgttctcaaagattggatcagacattcagatggaaacctcagtttcctcgggttcataaaactactgcatggagtttcttcacgcgcaatcaccaaagtataagataaccatttgcatcgagcaatccctgatctctggctagtgcatgccatggctggttgtagaagttgcatgaaaccaatacaaagattaacagatcatcttagcgcaataggtactctcagtaggtgtatatttgccctgcttttcgcaacatggatcgacattgtcctcaagatgttgagaggaatgtacagatttgatttgggaagaatggaaaccctgaaggatttgaggctgttattttgtttgttagttccagtaatgcaggcattgccttcatttgtgttgtgcacctatgccgcttaatgctccatttacata

SEQ ID NO: 1808 - DNA, 2573 bp, Zea Mays
gagaaggagagcgcaacggaaagcaacccaaggtctctccttttccgccacacaggactcacgcgctcttcaatcgctcgctccgtttctacctcctctcgccttccttccttccttcgatcccgctttgtttgtcgtcatcgcccgcccccgaagctccgacctttcccccactttcccttggcgtctacggccttgtccggtgtagaaaacaacgggtttcgtttgtgttgttttgctgcggtttttgtccgctcctgggagttcaatccctgctccatctcttaagagcactcctcccctcccactcagtgtgctttgctgttcactttggattccgcggctttgtttcgggttcttgattaggaaggttcggttcctggtttgggaaggtcccccttccgaggcgaggaatttggtgcgggttgatgcgtcttgccaggaatccgcgatgcaatgataggttgttgaagccgaggtgaatctttgacctgcagaatttcctagctgaagtcccaccgcttctcgatcagccgggcgccatgggcctctgcctgggcaagtcggcagcggtccaggagccggcggtggcggaagacaacagcgtagccgatggcgcggcggcgggctgcggcgatgggccgcccgtgaaggcgcctcggacgcccaagcagcccaagttctccttctacctgccgagcccgctccagccctccagctacaagggctcgccggccaactccagcgccgcgtccacgccggcgcgcggcgggttcaagcgcccattcccgccgccgtcgcctgccaagcacatccgtgcgctgctggcgcggcgccacggctcggtcaagcctaacgaggcgtccatccccgaaggcggcgagctggacctggggctggacaagagcttcggctactccaggcacttcgcggccaagtacgaccttggccgggaggtggggcgcggccactttggcttcacctgcgctgccaagtgcaagaagggcgagctcaagggggaggacgtcgccgtcaaggtccttcccaaggccaagatgactactgctattgccattgaagatgtcagacgagaagtcagaatattgagttctttggcaggccacattaacctagtgcaattttatgatgcttttgaggatgaagaaaatgtatatgttgttatggaattatgcaaaggaggtgaactgctggacagaattttggctagaggtggcaaatattctgagggcgatgctaaggttattattcaccaaattctaagtgttgcttcattttgtcatcttcagggtgttgttcaccgggatctgaaaccagagaattttcttttcatgtcaaaggatgagaattctgccttgaaagtcatagactttggtttgtctgactttgttaaaccagttctccatcgatcttatggcacagaggctgatatgtggagcattggagtaattgcatatattttgctttgtggaagccgccctttctgggcacgaactgagtcaggaatttttcgagctgtcctaaaagcagagcctagttttgatgaaattccatggcctaccctttctgctgaggcgaaagactttgtaagaaggctactcaataaggattaccgtaagcggatgactgctgcacaagccctctgccatccatggatccgtggcacacaggaagttaagattaatctagacatgataatctacaggcttatgagggcttacataagttcatcttctctacggaaatctgcattgagggctcttgcaaaggcactgacgacagatcaactcttctacctaagagagcagtttacattattaggtccaaacaagagtggccatatatcattgcaaaatatgaagacggccttgattaaaaattcctcgggtgcaatgaatgattctaggattcttgactttgttaactcaatatgcaatatccaatatggcatgattgattttgaagagttctctgctgcggccattagtgtatatcaaatggagggcctggagacctgggaagaacatgctcaacaagcatatgaattgtttgacaaggagggcaaccgaccaattgtgattgaagaacttgcatcggaacttggacttggcccttcgatctcacttcatgttgttctcaaagattggatcagacattcagatggaaacctcagtttcctcgggttcataaaactactgcatggagtttcttcacgcgcaatcaccaaagtataagataaccatttgcatcgagcaatccctgatctctggctagtgcatgccatggctggttgtagaagttgcatgaaaccaatacaaagattaacagatcatcttagcgcaataggtactctcagtaggtgtatatttgccctgcttttcgcaacatggatcgacattgtcctcaagatgttgagaggaatgtacagatttgatttgggaagaatggaaaccctgaaggatttgaggctgttattttgtttgttagttccagtaatgcaggcattgccttcatttgtgttgtgcacctatgccgcttaatgctccatttacata

SEQ ID NO: 1809 - DNA, 1417 bp, Zea Mays
gattggataagagttggccaataagattatgcaaaggaggtgaactgctggacagaattttggctagaggtggcaaatattctgagggcgatgctaaggttattattcaccaaattctaagtgttgcttcattttgtcatcttcagggtgttgttcaccgggatctgaaaccagagaattttcttttcatgtcaaaggatgagaattctgccttgaaagtcatagactttggtttgtctgactttgttaaaccagatgacagacttaatgacattgttggaagtgcatattatgttgctcctgaagttctccatcgatcttatggcacagaggctgatatgtggagcattggagtaattgcatatattttgctttgtggaagccgccctttctgggcacgaactgagtcaggaatttttcgagctgtcctaaaagcagagcctagttttgatgaaattccatggcctaccctttctgctgaggcgaaagactttgtaagaaggctactcaataaggattaccgtaagcggatgactgctgcacaagccctctgccatccatggatccgtggcacacaggaagttaagattaatctagacatgataatctacaggcttatgagggcttacataagttcatcttctctacggaaatctgcattgagggctcttgcaaaggcactgacgacagatcaactcttctacctaagagagcagtttacattattaggtccaaacaagagtggccatatatcattgcaaaatatgaagacggccttgattaaaaattcctcgggtgcaatgaatgattctaggattcttgactttgttaactcaatatgcaatatccaatatggcatgattgattttgaagagttctctgctgcggccattagtgtatatcaaatggagggcctggagacctgggaagaacatgctcaacaagcatatgaattgtttgacaaggagggcaaccgaccaattgtgattgaagaacttgcatcgattggatcagacattcagatggaaacctcagtttcctcgggttcataaaactactgcatggagtttcttcacgcgcaatcaccaaagtataagataaccatttgcatcgagcaatccctgatctctggctagtgcatgccatggctggttgtagaagttgcatgaaaccaatacaaagattaacagatcatcttagcgcaataggtactctcagtaggtgtatatttgccctgcttttcgcaacatggatcgacattgtcctcaagatgttgagaggaatgtacagatttgatttgggaagaatggaaaccctgaaggatttgaggctgttattttgtttgttagttccagtaatgcaggcattgccttcatttgtgttgtgcacctatgccgcttaatgctccatttacata

SEQ ID NO: 1810 - DNA, 1800 bp, Zea Mays
gaacggcctaccatctccattggcatccacatccgtgacagactgacagcccttgacactggtcctggtcccagccctccctcgcactcctatggcgatccctccccggatcacggcggccggtggcggcggtcgcaagacgagggtgccgccgctcccaccggcgagaactctcctgacagcctttgccgcggcggtggcgctggctatcctttgcttcctctcctcgtcccccaccgccacgctgtcgggttcatggagatccggggccagaagcggtgacaagtacctctactggggcagccgcgtggactgccccggcaaacactgcggctcctgcgcggggctcgggcaccaggagtccagcctccgctgtgctctcgaggaggcccttttcctcggcagaatatttgtgatgccctcaagaatgtgcctaagttcactgcataacaccaagggaattatccaaaatggtgcaactacaaaacagagatgggaagaaagttcatgtgcaatggaatctctatatgatatagatcagatctcaagaacagtaccagttattctggacaactcaaaaaactggcacgatatagtatcaagaagcatgaaactagaagtgggaggtgtggcacatgtgcaaggaattagcagaggtttatggagtgcaaggatcgcaagaatcgtagctcagtgatgttatcctacaactttttgccaagtatgccagcggaaaaactgaggaatgcagcaaataagatgaaagaaatacttggtgattatgatgctattcatgtgagacgtggtgatctattgaaaaatcggaaagatagatttggtgttgaacggagccttcatcctcatctagacagagacacccgacctgagtacattagaaaaagaattgcacaatggattccaccaggtcgaacattattcattgcatcaaatgaaagaactccaggcttcttttcccctctgtcagacaggtttctacctctatgtgtgctattatatcaagaaccactttgtgcttaccgaaagtgtttgctcattcatttggcaacaattcagagaggctaatgatgcaaggagcaaagacatttatcaagacaatgcgagaatttgggagtgatttaaccctttgtgatgatcccaaaaagaacaccaaagtctggcaaaagccagtatatacagatgattgacgttagttggtcgtcaaatataatgcagacttgcagagctcactcttttagcaacctgatggcctgacatggacagctgattaaacctgaagctggcatggtagtgtttgctgttattgcagaagccgtctaaaatcagccagcagtggtggacactacacctacggttcatttcagcgcatctattcatactaccacgtgtacttataatctggaaaaagccaaaaagtcatgacctttttttttcataattttacaattaggaagtagttcacaacttacaagagaagatttgtttgcagatttagaatgcatatacatgtcacatccttctgtacagcatgtgtaagaatgaaccagcactgtgaggcttatgtgtggagaatatcagtaattgttattatcttttaattcgtatgggtgtgtaagaaacaacctgcacagtgaggcttatgtgtggagaatatcatgaattggttgttatcttttaattttataggtgttgctcttgcagtccttctgatcaactcccaaaagaactgtaacatggtctgtaaaagcaacttgagctttgaaaattaaatttgaggtcttt

SEQ ID NO: 1811 - DNA, 1819 bp, Zea Mays
gtcctggtcccagccctccctcgcactcctatggcgatccctccccggatcacggcggccggtggcggcggtcgcaagacgagggtgccgccgctcccaccggcgagaactctcctgacagcctttgccgcggcggtggcgctggctatcctttgcttcctctcctcgtcccccaccgccacgctgtcgggttcatggagatccggggccagaagcggtgacaagtacctctactggggcagccgcgtggactgccccggcaaacactgcggctcctgcgcggggctcgggcaccaggagtccagcctccgctgtgctctcgaggaggcccttttcctcggcagaatatttgtgatgccctcaagaatgtgcctaagttcactgcataacaccaagggaattatccaaaatggtgcaactacaaaacagagtattttgtagatgggaagaaagttcatgtgcaatggaatctctatatgatatagatcagatctcaagaacagtaccagttattctggacaactcaaaaaactggcacgatatagtatcaagaagcatgaaactagaagtgggaggtgtggcacatgtgcaaggaattagcagaggtgaactcaaacaaaattccatatactcaacagctctcataataaatcgcactgcaagtccccttgcttggtttatggagtgcaaggatcgcaagaatcgtagctcagtgatgttatcctacaactttttgccaagtatgccagcggaaaaactgaggaatgcagcaaataagatgaaagaaatacttggtgattatgatgctattcatgtgagacgtggtgatctattgaaaaatcggaaagatagatttggtgttgaacggagccttcatcctcatctagacagagacacccgacctgagtacattagaaaaagaattgcacaatggattccaccaggtcgaacattattcattgcatcaaatgaaagaactccaggcttcttttcccctctgtcagacaggtttctacctctatgtgtgctattatatcaagaaccactttgtgcttaccgaaagtgtttgctcattcatttggcaacaattcagagaggctaatgatgcaaggagcaaagacatttatcaagacaatgcgagaatttgggagtgatttaaccctttgtgatgatcccaaaaagaacaccaaagtctggcaaaagccagtatatacagatgattgacgttagttggtcgtcaaatataatgcagacttgcagagctcactcttttagcaacctgatggcctgacatggacagctgattaaacctgaagctggcatggtagtgtttgctgttattgcagaagccgtctaaaatcagccagcagtggtggacactacacctacggttcatttcagcgcatctattcatactaccacgtgtacttataatctggaaaaagccaaaaagtcatgacctttttttttcataattttacaattaggaagtagttcacaacttacaagagaagatttgtttgcagatttagaatgcatatacatgtcacatccttctgtacagcatgtgtaagaatgaaccagcactgtgaggcttatgtgtggagaatatcagtaattgttattatcttttaattcgtatgggtgtgtaagaaacaacctgcacagtgaggcttatgtgtggagaatatcatgaattggttgttatcttttaattttataggtgttgctcttgcagtccttctgatcaactcccaaaagaactgtaacatggtctgtaaaagcaacttgagctttgaaaattaaatttgaggtcttt

SEQ ID NO: 1812 - DNA, 1703 bp, Zea Mays
cgcactcctatggcgatccctccccggatcacggcggccggtggcggcggtcgcaagacgagggtgccgccgctcccaccggcgagaactctcctgacagcctttgccgcggcggtggcgctggctatcctttgcttcctctcctcgtcccccaccgccacgctgtcgggttcatggagatccggggccagaagcggtgacaagtacctctactggggcagccgcgtggactgccccggcaaacactgcggctcctgcgcggggctcgggcaccaggagtccagcctccgctgtgctctcgaggaggcccttttcctcggcagaatatttgtgatgccctcaagaatgtgcctaagttcactgcataacaccaagggaattatccaaaatggtgcaactacaaaacagagatgggaagaaagttcatgtgcaatggaatctctatatgatatagatcagatctcaagaacagtaccagttattctggacaactcaaaaaactggcacgatatagtatcaagaagcatgaaactagaagtgggaggtgtggcacatgtgcaaggaattagcagaggtgaactcaaacaaaattccatatactcaacagctctcataataaatcgcactgcaagtccccttgcttggtttatggagtgcaaggatcgcaagaatcgtagctcagtgatgttatcctacaactttttgccaagtatgccagcggaaaaactgaggaatgcagcaaataagatgaaagaaatacttggtgattatgatgctattcatgtgagacgtggtgatctattgaaaaatcggaaagatagatttggtgttgaacggagccttcatcctcatctagacagagacacccgacctgagtacattagaaaaagaattgcacaatggattccaccaggtcgaacattattcattgcatcaaatgaaagaactccaggcttcttttcccctctgtcagacagagaggctaatgatgcaaggagcaaagacatttatcaagacaatgcgagaatttgggagtgatttaaccctttgtgatgatcccaaaaagaacaccaaagtctggcaaaagccagtatatacagatgattgacgttagttggtcgtcaaatataatgcagacttgcagagctcactcttttagcaacctgatggcctgacatggacagctgattaaacctgaagctggcatggtagtgtttgctgttattgcagaagccgtctaaaatcagccagcagtggtggacactacacctacggttcatttcagcgcatctattcatactaccacgtgtacttataatctggaaaaagccaaaaagtcatgacctttttttttcataattttacaattaggaagtagttcacaacttacaagagaagatttgtttgcagatttagaatgcatatacatgtcacatccttctgtacagcatgtgtaagaatgaaccagcactgtgaggcttatgtgtggagaatatcagtaattgttattatcttttaattcgtatgggtgtgtaagaaacaacctgcacagtgaggcttatgtgtggagaatatcatgaattggttgttatcttttaattttataggtgttgctcttgcagtccttctgatcaactcccaaaagaactgtaacatggtctgtaaaagcaacttgagctttgaaaattaaatttgaggtcttt

SEQ ID NO: 1813 - DNA, 687 bp, Zea Mays
taaatattatgtatttcattaacggggcctataatgcataacttgattgcgtcataagagattgtctccagcaaatgcagatataaacttatacatattacacatgataaaccccattcaagtgccaccttgagcagaaggtggtggcagatcatagcactccttggccaagcggagtagcggacacattgtaaacaatgtaacacctccgaattcaggtccttctccagaaccacatctctaacagcaatttggatttgcaccacgatatgtggcaatctttcctcggaccctcataatctgatggcccagaggatcggatgtgctagcattcaagtattcgtggttcaacgacaggatgcatggtacacagccagtgccatcatcgatcaggaagcggaggaacttctccctgcggtcgcacgagacaacaattccaacaagctccgcacgagacaacaattccaacaagctccgcacgagcaaccgtacggccacagcggagaaatgccggtggcaaagtgtgctgtatggttaaagagagaagatctgcagcaagattcttgacgtgcacaagatgaagaagatggtccatgctgcgaatttcaggaaacatatgttacaggagcttcatagctgtttacaaatagaatgaacataaaataaaaattcaacggagacatatca

SEQ ID NO: 1814 - DNA, 2445 bp, Zea Mays
tggagtcagggcccattgaagcacgagacccaagtcaaaggaaggtaaagcagcgacagcgagcgatgcttcgttggactctccgccggccaccggcgagtccaccatcccattcccatccacccgctccttccaactcccaggcgttgctggctgctgctaccgaaactgctccgcctcccggccaatgcgcagttgcgctcgcgcagacgcgcacggacagcgccacatcggccttgattagcgaagtgttcccttgccctacctctccctcccctgttccgacgcggcggccggtgagcacctgcccggtcgctagcttctgccatggctcacgaagttggcgacaacggcggcgaactcccgccgcccgcgaagaagaagtcgcccgccgaggaggaggccgagaagaggaggaagaagcttacacctgggagcttgatgaagggcatcatacggtctgggagtggtgatgccacccctgcagagggcgatcaggttatacttcattgcactactcggacgatggatggtattattgtcaattctacaagaagggagcacggaggtaaaggaatcccactcagatttgttttagggaagagcaagatgatcctaggctttgctgaaggcttcccaacaatgctgaagggtgaaattgctatgttcaaaatgcagcctaaaattcactacgctgaggttgattgtccagttgcagctccagatggcttcccgaaagatgatgaacttcaatttgagattgaaatgttggatttctttaaagccaaggttgtggcagaggatttgggggtggtaaagaagatagttgaagaaggcaagggatgggaaacacctagagagccatatgaaataacagcacggataactgtaagaacagcagatggaaaagaaattattccaagtaaagaagaggcatatttctttactattggtaaatctgaggtacctaaagggcttgaaatgggcattggaacaatggctcgcaaggaaaaggcaattgtttttgttagcaatacttatttgacgaagtcctcactaatgccagagcttgaaggccttgaagaagttcatttttacattgaattggttcagtttatccaggtgagagacatgcttggtgatggtcgtctaataaaacgacgtgtagttgatggaaaaggtgaatttccaatggactgtcctcttcatgacagcttattaagagtgcattataagggtattctccttgatgaaccaaagtcagtgttttatgatacacgtgccgataatgatggtgaaccgttggaattctgttccggagaaggcttggttccagagggatttgaaatgtgtgttcggctaatgcttcctggtgaaaaatctgttgtcacctgcccaccagattttgcatatgataagttcccaaggccagcaaatgttcctgaaggagctcatgttcagtgggaaattgaactacttgggtttgaaatgcccaaggattggactggcttaactttcgaagaaatcatggatgaggcagacaaaataaagaacacgggtaacagactgtttaaagaaggaaagttcgaacttgcaaaggcgaaatatgataaggtgcttagggaatataaccacgtgcatcctcatgatgatgaagagggaaaaatctttgctaattcaagaaattccctacatctaaatgtagctttttgctaccagaagatgggtgaatacagaaaatccattgaaacatgcaataaggtgctggacacaaatcctgtgcatgcgaaagctctttaccgccaaggaatgtcctacatgttactcggggaatttgatgatgcgaggaatgattttgagaagatgattaccgttgacaagtcatcagaaccggacgctacagctgccctccttaaacttaagcagaaggaacaggaagctgaaaagaaggcgaggaagcagttcaaagggctctttgacaagaagccgggagagatatctgaagttggtgtagaatcagagggtggaaaggatgcgggtgatgcaaggggctctggtgaggcaacaagtgctgatagaggtgcaaatacaatggatagtccgaccagagaatcagagtacgcattcgaggaagagaggcctgggcttcttggccgcttgtggccttctgcgaggaggatcttctcgtctgttggcataaacaggtgtacaatactataaggtgtttaattcctactagggtgactttggaaatcatggtggtgaagatgaactgccccgaggtttgtggtgtttattagagtttcctgacgacgaaaaaaatggcgaggaatgtttggatgtatggaaaacgaaccgtgtgcatgataatgtaaaaaatgagaaataaattgcagggaattttattcgtagtttggatggtgcgttttagtgacggtgatgcca

SEQ ID NO: 1815 - DNA, 2363 bp, Zea Mays
cccaagtcaaaggaaggtaaagcagcgacagcgagcgatgcttcgttggactctccgccggccaccggcgagtccaccatcccattcccatccacccgctccttccaactcccaggcgttgctggctgctgctaccgaaactgctccgcctcccggccaatgcgcagttgcgctcgcgcagacgcgcacggacagcgccacatcggccttgattagcgaagtgttcccttgccctacctctccctcccctgttccgacgcggcggccggtgagcacctgcccggtcgctagcttctgccatggctcacgaagttggcgacaacggcggcgaactcccgccgcccgcgaagaagaagtcgcccgccgaggaggaggccgagaagaggaggaagaagcttacacctgggagcttgatgaagggcatcatacggtctgggagtggtgatgccacccctgcagagggcgatcaggttatacttcattgcactactcggacgatggatggtattattgtcaattctacaagaagggagcacggaggtaaaggaatcccactcagatttgttttagggaagagcaagatgatcctaggctttgctgaaggcttcccaacaatgctgaagggtgaaattgctatgttgcagctccagatggcttcccgaaagatgatgaacttcaatttgagattgaaatgttggatttctttaaagccaaggttgtggcagaggatttgggggtggtaaagaagatagttgaagaaggcaagggatgggaaacacctagagagccatatgaaataacagcacggataactgtaagaacagcagatggaaaagaaattattccaagtaaagaagaggcatatttctttactattggtaaatctgaggtacctaaagggcttgaaatgggcattggaacaatggctcgcaaggaaaaggcaattgtttttgttagcaatacttatttgacgaagtcctcactaatgccagagcttgaaggccttgaagaagttcatttttacattgaattggttcagtttatccaggtgagagacatgcttggtgatggtcgtctaataaaacgacgtgtagttgatggaaaaggtgaatttccaatggactgtcctcttcatgacagcttattaagagtgcattataagggtattctccttgatgaaccaaagtcagtgttttatgatacacgtgccgataatgatggtgaaccgttggaattctgttccggagaaggcttggttccagagggatttgaaatgtgtgttcggctaatgcttcctggtgaaaaatctgttgtcacctgcccaccagattttgcatatgataagttcccaaggccagcaaatgttcctgaaggagctcatgttcagtgggaaattgaactacttgggtttgaaatgcccaaggattggactggcttaactttcgaagaaatcatggatgaggcagacaaaataaagaacacgactgtttaaagaaggaaagttcgaacttgcaaaggcgaaatatgataaggtgcttagggaatataaccacgtgcatcctcatgatgatgaagagggaaaaatctttgctaattcaagaaattccctacatctaaatgtagctttttgctaccagaagatgggtgaatacagaaaatccattgaaacatgcaataaggtgctggacacaaatcctgtgcatgcgaaagctctttaccgccaaggaatgtcctacatgttactcggggaatttgatgatgcgaggaatgattttgagaagatgattaccgttgacaagtcatcagaaccggacgctacagctgccctccttaaacttaagcagaaggaacaggaagctgaaaagaaggcgaggaagcagttcaaagggctctttgacaagaagccgggagagatatctgaagttggtgtagaatcagagggtggaaaggatgcgggtgatgcaaggggctctggtgaggcaacaagtgctgatagaggtgcaaatacaatggatagtccgaccagagaatcagagtacgcattcgaggaagagaggcctgggcttcttggccgcttgtggccttctgcgaggaggatcttctcgtctgttggcataaacaggtgtacaatactataaggtgtttaattcctactagggtgactttggaaatcatggtggtgaagatgaactgccccgaggtttgtggtgtttattagagtttcctgacgacgaaaaaaatggcgaggaatgtttggatgtatggaaaacgaaccgtgtgcatgataatgtaaaaaatgagaaataaattgcagggaattttattcgtagtttggatggtgcgttttagtgacggtgatgcca

SEQ ID NO: 1816 - DNA, 996 bp, Zea Mays
gtcaaaggaaggtaaagcagcgacagcgagcgatgcttcgttggactctccgccggccaccggcgagtccaccatcccattcccatccacccgctccttccaactcccaggcgttgctggctgctgctaccgaaactgctccgcctcccggccaatgcgcagttgcgctcgcgcagacgcgcacggacagcgccacatcggccttgattagcgaagtgttcccttgccctacctctccctcccctgttccgacgcggcggccggtgagcacctgcccggtcgctagcttctgccatggctcacgaagttggcgacaacggcggcgaactcccgccgcccgcgaagaagaagtcgcccgccgaggaggaggccgagaagaggaggaagaagcttacacctgggagcttgatgaagggcatcatacggtctgggagtggtgatgccacccctgcagagggcgatcaggttatacttcattgcactactcggacgatggatggtattattgtcaattctacaagaagggagcacggaggtaaaggaatcccactcagatttgttttagggaagagcaagatgatcctaggctttgctgaaggcttcccaacaatgctgaagggtgaaattgctatgttgcagctccagatggcttcccgaaagatgatgaacttcaatttgagattgaaatgttggatttctttaaagccaaggttgtggcagaggatttgggggtggtaaagaagatagttgaagaaggcaagggatgggaaacacctagagagccatatgaaataacagcacggataactgtaagaacagcagatggaaaagaaattattccaagtaaagaagaggcatatttctttactattggtaaatctgaggtttataaaaataactacatattgacatctaaatactaaacaaatgtactatcaagatatatttcttggaggattatggaagctaaaagaaaattttggcttagggaaaaac

SEQ ID NO: 1817 - DNA, 1177 bp, Zea Mays
gtcaaaggaaggtaaagcagcgacagcgagcgatgcttcgttggactctccgccggccaccggcgagtccaccatcccattcccatccacccgctccttccaactcccaggcgttgctggctgctgctaccgaaactgctccgcctcccggccaatgcgcagttgcgctcgcgcagacgcgcacggacagcgccacatcggccttgattagcgaagtgttcccttgccctacctctccctcccctgttccgacgcggcggccggtgagcacctgcccggtcgctagcttctgccatggctcacgaagttggcgacaacggcggcgaactcccgccgcccgcgaagaagaagtcgcccgccgaggaggaggccgagaagaggaggaagaagcttacacctgggagcttgatgaagggcatcatacggtctgggagtggtgatgccacccctgcagagggcgatcaggttatacttcattgcactactcggacgatggatggtattattgtcaattctacaagaagggagcacggaggtaaaggaatcccactcagatttgttttagggaagagcaagatgatcctaggctttgctgaaggcttcccaacaatgctgaagggtgaaattgctatgttgcagctccagatggcttcccgaaagatgatgaacttcaatttgagattgaaatgttggatttctttaaagccaaggttgtggcagaggatttgggggtggtaaagaagatagttgaagaaggcaagggatgggaaacacctagagagccatatgaaataacagcacggataactgtaagaacagcagatggaaaagaaattattccaagtaaagaagaggcatatttctttactattggtaaatctgaggtacctaaagggcttgaaatgggcattggaacaatggctcgcaaggaaaaggcaattgtttttgttagcaatacttatttgacgaagtcctcactaatgccagagcttgaaggccttgaagaagttcatttttacattgaattggttcagtttatccagaatgctggaattatgtgggttttcattgaaattatgatcttgacttctcgatgatagaagctgccaaggacacctttggtcatagctttttcatggaaaatctggccctggtggtatggggcatgtggaagcag

SEQ ID NO: 1818 - DNA, 1495 bp, Zea Mays
gtcaaaggaaggtaaagcagcgacagcgagcgatgcttcgttggactctccgccggccaccggcgagtccaccatcccattcccatccacccgctccttccaactcccaggcgttgctggctgctgctaccgaaactgctccgcctcccggccaatgcgcagttgcgctcgcgcagacgcgcacggacagcgccacatcggccttgattagcgaagtgttcccttgccctacctctccctcccctgttccgacgcggcggccggtgagcacctgcccggtcgctagcttctgccatggctcacgaagttggcgacaacggcggcgaactcccgccgcccgcgaagaagaagtcgcccgccgaggaggaggccgagaagaggaggaagaagcttacacctgggagcttgatgaagggcatcatacggtctgggagtggtgatgccacccctgcagagggcgatcaggttatacttcattgcactactcggacgatggatggtattattgtcaattctacaagaagggagcacggaggtaaaggaatcccactcagatttgttttagggaagagcaagatgatcctaggctttgctgaaggcttcccaacaatgctgaagggtgaaattgctatgttgcagctccagatggcttcccgaaagatgatgaacttcaatttgagattgaaatgttggatttctttaaagccaaggttgtggcagaggatttgggggtggtaaagaagatagttgaagaaggcaagggatgggaaacacctagagagccatatgaaataacagcacggataactgtaagaacagcagatggaaaagaaattattccaagtaaagaagaggcatatttctttactattggtaaatctgaggtacctaaagggcttgaaatgggcattggaacaatggctcgcaaggaaaaggcaattgtttttgttagcaatacttatttgacgaagtcctcactaatgccagagcttgaaggccttgaagaagttcatttttacattgaattggttcagtttatccaggtgaatttccaatggactgtcctcttcatgacagcttattaagagtgcattataagggtattctccttgatgaaccaaagtcagtgttttatgatacacgtgccgataatgatggtgaaccgttggaattctgttccggagaaggcttggttccagagggatttgaaatgtgtgttcggctaatgcttcctggtgaaaaatctgttgtcacctgcccaccagattttgcatatgataagttcccaaggccagcaaatgttcctgaaggagctcatgttcagtgggaaattgaactacttgggtttgaaatgcccaaggattggactggcttaactttcgaagaaatcatggatgaggcagacaaaataaagaacacgggtaacagactgtttaaagaaggaaagttcgaacttgcaaaggcgaaatatgataaggtatggcttccactggat

SEQ ID NO: 1819 - DNA, 2366 bp, Zea Mays
gtcaaaggaaggtaaagcagcgacagcgagcgatgcttcgttggactctccgccggccaccggcgagtccaccatcccattcccatccacccgctccttccaactcccaggcgttgctggctgctgctaccgaaactgctccgcctcccggccaatgcgcagttgcgctcgcgcagacgcgcacggacagcgccacatcggccttgattagcgaagtgttcccttgccctacctctccctcccctgttccgacgcggcggccggtgagcacctgcccggtcgctagcttctgccatggctcacgaagttggcgacaacggcggcgaactcccgccgcccgcgaagaagaagtcgcccgccgaggaggaggccgagaagaggaggaagaagcttacacctgggagcttgatgaagggcatcatacggtctgggagtggtgatgccacccctgcagagggcgatcaggttatacttcattgcactactcggacgatggatggtattattgtcaattctacaagaagggagcacggaggtaaaggaatcccactcagatttgttttagggaagagcaagatgatcctaggctttgctgaaggcttcccaacaatgctgaagggtgaaattgctatgttgcagctccagatggcttcccgaaagatgatgaacttcaatttgagattgaaatgttggatttctttaaagccaaggttgtggcagaggatttgggggtggtaaagaagatagttgaagaaggcaagggatgggaaacacctagagagccatatgaaataacagcacggataactgtaagaacagcagatggaaaagaaattattccaagtaaagaagaggcatatttctttactattggtaaatctgaggtacctaaagggcttgaaatgggcattggaacaatggctcgcaaggaaaaggcaattgtttttgttagcaatacttatttgacgaagtcctcactaatgccagagcttgaaggccttgaagaagttcatttttacattgaattggttcagtttatccaggtgagagacatgcttggtgatggtcgtctaataaaacgacgtgtagttgatggaaaaggtgaatttccaatggactgtcctcttcatgacagcttattaagagtgcattataagggtattctccttgatgaaccaaagtcagtgttttatgatacacgtgccgataatgatggtgaaccgttggaattctgttccggagaaggcttggttccagagggatttgaaatgtgtgttcggctaatgcttcctggtgaaaaatctgttgtcacctgcccaccagattttgcatatgataagttcccaaggccagcaaatgttcctgaaggagctcatgttcagtgggaaattgaactacttgggtttgaaatgcccaaggattggactggcttaactttcgaagaaatcatggatgaggcagacaaaataaagaacacgggtaacagactgtttaaagaaggaaagttcgaacttgcaaaggcgaaatatgataaggtgcttagggaatataaccacgtgcatcctcatgatgatgaagagggaaaaatctttgctaattcaagaaattccctacatctaaatgtagctttttgctaccagaagatgggtgaatacagaaaatccattgaaacatgcaataaggtgctggacacaaatcctgtgcatgcgaaagctctttaccgccaaggaatgtcctacatgttactcggggaatttgatgatgcgaggaatgattttgagaagatgattaccgttgacaagtcatcagaaccggacgctacagctgccctccttaaacttaagcagaaggaacaggaagctgaaaagaaggcgaggaagcagttcaaagggctctttgacaagaagccgggagagatatctgaagttggtgtagaatcagagggtggaaaggatgcgggtgatgcaaggggctctggtgaggcaacaagtgctgatagaggtgcaaatacaatggatagtccgaccagagaatcagagtacgcattcgaggaagagaggcctgggcttcttggccgcttgtggccttctgcgaggaggatcttctcgtctgttggcataaacaggtgtacaatactataaggtgtttaattcctactagggtgactttggaaatcatggtggtgaagatgaactgccccgaggtttgtggtgtttattagagtttcctgacgacgaaaaaaatggcgaggaatgtttggatgtatggaaaacgaaccgtgtgcatgataatgtaaaaaatgagaaataaattgcagggaattttattcgtagtttggatggtgcgttttagtgacggtgatgcca

SEQ ID NO: 1820 - DNA, 2297 bp, Zea Mays
gtcaaaggaaggtaaagcagcgacagcgagcgatgcttcgttggactctccgccggccaccggcgagtccaccatcccattcccatccacccgctccttccaactcccaggcgttgctggctgctgctaccgaaactgctccgcctcccggccaatgcgcagttgcgctcgcgcagacgcgcacggacagcgccacatcggccttgattagcgaagtgttcccttgccctacctctccctcccctgttccgacgcggcggccggtgagcacctgcccggtcgctagcttctgccatggctcacgaagttggcgacaacggcggcgaactcccgccgcccgcgaagaagaagtcgcccgccgaggaggaggccgagaagaggaggaagaagcttacacctgggagcttgatgaagggcatcatacggtctgggagtggtgatgccacccctgcagagggcgatcaggttatacttcattgcactactcggacgatggatggtattattgtcaattctacaagaagggagcacggaggtaaaggaatcccactcagatttgttttagggaagagcaagatgatcctaggctttgctgaaggcttcccaacaatgctgaagggtgaaattgctatgttgcagctccagatggcttcccgaaagatgatgaacttcaatttgagattgaaatgttggatttctttaaagccaaggttgtggcagaggatttgggggtggtaaagaagatagttgaagaaggcaagggatgggaaacacctagagagccatatgaaataacagcacggataactgtaagaacagcagatggaaaagaaattattccaagtaaagaagaggcatatttctttactattggtaaatctgaggtacctaaagggcttgaaatgggcattggaacaatggctcgcaaggaaaaggcaattgtttttgttagcaatacttatttgacgaagtcctcactaatgccagagcttgaaggccttgaagaagttcatttttacattgaattggttcagtttatccaggtgagagacatgcttggtgatggtcgtctaataaaacgacgtgtagttgatggaaaaggtgaatttccaatggactgtcctcttcatgacagcttattaagagtgcattataagggtattctccttgatgaaccaaagtcagtgttttatgatacacgtgccgataatgatggtgaaccgttggaattctgttccggagaaggcttggttccagagggatttgaaatgtgtgttcggctaatgcttcctggtgaaaaatctgttgtcacctgcccaccagattttgcatatgataagttcccaaggccagcaaatgttcctgaaggagctcatgttcagtgggaaattgaactacttgggtttgaaatgcccaaggattggactggcttaactttcgaagaaatcatggatgaggcagacaaaataaagaacacgggtaacagactgtttaaagaaggaaagttcgaacttgcaaaggcgaaatatgataagaattccctacatctaaatgtagctttttgctaccagaagatgggtgaatacagaaaatccattgaaacatgcaataaggtgctggacacaaatcctgtgcatgcgaaagctctttaccgccaaggaatgtcctacatgttactcggggaatttgatgatgcgaggaatgattttgagaagatgattaccgttgacaagtcatcagaaccggacgctacagctgccctccttaaacttaagcagaaggaacaggaagctgaaaagaaggcgaggaagcagttcaaagggctctttgacaagaagccgggagagatatctgaagttggtgtagaatcagagggtggaaaggatgcgggtgatgcaaggggctctggtgaggcaacaagtgctgatagaggtgcaaatacaatggatagtccgaccagagaatcagagtacgcattcgaggaagagaggcctgggcttcttggccgcttgtggccttctgcgaggaggatcttctcgtctgttggcataaacaggtgtacaatactataaggtgtttaattcctactagggtgactttggaaatcatggtggtgaagatgaactgccccgaggtttgtggtgtttattagagtttcctgacgacgaaaaaaatggcgaggaatgtttggatgtatggaaaacgaaccgtgtgcatgataatgtaaaaaatgagaaataaattgcagggaattttattcgtagtttggatggtgcgttttagtgacggtgatgcca

SEQ ID NO: 1821 - DNA, 1395 bp, Zea Mays
ctttaatgccattttagattgcgctgattctcttagctaaatatgtagatgaaagagatttggggattttaagtgagagacatgcttggtgatggtcgtctaataaaacgacgtgtagttgatggaaaaggtgaatttccaatggactgtcctcttcatgacagcttattaagagtgcattataagggtattctccttgatgaaccaaagtcagtgttttatgatacacgtgccgataatgatggtgaaccgttggaattctgttccggagaaggcttggttccagagggatttgaaatgtgtgttcggctaatgcttcctggtgaaaaatctgttgtcacctgcccaccagattttgcatatgataagttcccaaggccagcaaatgttcctgaaggagctcatgttcagtgggaaattgaactacttgggtttgaaatgcccaaggattggactggcttaactttcgaagaaatcatggatgaggcagacaaaataaagaacacgggtaacagactgtttaaagaaggaaagttcgaacttgcaaaggcgaaatatgataaggtgcttagggaatataaccacgtgcatcctcatgatgatgaagagggaaaaatctttgctaattcaagaaattccctacatctaaatgtagctttttgctaccagaagatgggtgaatacagaaaatccattgaaacatgcaataaggtgctggacacaaatcctgtgcatgcgaaagctctttaccgccaaggaatgtcctacatgttactcggggaatttgatgatgcgaggaatgattttgagaagatgattaccgttgacaagtcatcagaaccggacgctacagctgccctccttaaacttaagcagaaggaacaggaagctgaaaagaaggcgaggaagcagttcaaagggctctttgacaagaagccgggagagatatctgaagttggtgtagaatcagagggtggaaaggatgcgggtgatgcaaggggctctggtgaggcaacaagtgctgatagaggtgcaaatacaatggatagtccgaccagagaatcagagtacgcattcgaggaagagaggcctgggcttcttggccgcttgtggccttctgcgaggaggatcttctcgtctgttggcataaacaggtgtacaatactataaggtgtttaattcctactagggtgactttggaaatcatggtggtgaagatgaactgccccgaggtttgtggtgtttattagagtttcctgacgacgaaaaaaatggcgaggaatgtttggatgtatggaaaacgaaccgtgtgcatgataatgtaaaaaatgagaaataaattgcagggaattttattcgtagtttggatggtgcgttttagtgacggtgatgcca

SEQ ID NO: 1822 - DNA, 1272 bp, Zea Mays
atggaaggtgaatttccaatggactgtcctcttcatgacagcttattaagagtgcattataagggtattctccttgatgaaccaaagtcagtgttttatgatacacgtgccgataatgatggtgaaccgttggaattctgttccggagaaggcttggttccagagggatttgaaatgtgtgttcggctaatgcttcctggtgaaaaatctgttgtcacctgcccaccagattttgcatatgataagttcccaaggccagcaaatgttcctgaaggagctcatgttcagtgggaaattgaactacttgggtttgaaatgcccaaggattggactggcttaactttcgaagaaatcatggatgaggcagacaaaataaagaacacgggtaacagactgtttaaagaaggaaagttcgaacttgcaaaggcgaaatatgataaggtgcttagggaatataaccacgtgcatcctcatgatgatgaagagggaaaaatctttgctaattcaagaaattccctacatctaaatgtagctttttgctaccagaagatgggtgaatacagaaaatccattgaaacatgcaataaggtgctggacacaaatcctgtgcatgcgaaagctctttaccgccaaggaatgtcctacatgttactcggggaatttgatgatgcgaggaatgattttgagaagatgattaccgttgacaagtcatcagaaccggacgctacagctgccctccttaaacttaagcagaaggaacaggaagctgaaaagaaggcgaggaagcagttcaaagggctctttgacaagaagccgggagagatatctgaagttggtgtagaatcagagggtggaaaggatgcgggtgatgcaaggggctctggtgaggcaacaagtgctgatagaggtgcaaatacaatggatagtccgaccagagaatcagagtacgcattcgaggaagagaggcctgggcttcttggccgcttgtggccttctgcgaggaggatcttctcgtctgttggcataaacaggtgtacaatactataaggtgtttaattcctactagggtgactttggaaatcatggtggtgaagatgaactgccccgaggtttgtggtgtttattagagtttcctgacgacgaaaaaaatggcgaggaatgtttggatgtatggaaaacgaaccgtgtgcatgataatgtaaaaaatgagaaataaattgcagggaattttattcgtagtttggatggtgcgttttagtgacggtgatgcca

SEQ ID NO: 1823 - DNA, 874 bp, Zea Mays
gagtcagaaaagccgctcttcttccgttccgcccgcccgcccgcttctctctcccgccccaacccgcgagaccgccggcagctcagggcaggaggaggagcggcttcaattcgtccccgcgccgcgcgctcaggacccgcccccgctgcctctcccgagctccattttggcgccaacagtggttcacataggtttgcgcttgagaatcgagctgtcaatgaagctactttccgttgccctgatgagctaggatggaaaccacagaggacgcctatcatatcatccgatggaaacatcttacacgcaagacagaccacactgccactgaaggaaataagcaagtctctccagcaaatgggatatgatgtgatgccttcagatgacgctggtcgatttgtgtgcaactatgtctattaccactcgcttaagtttgcagagaagcatggcatcacgtctctcttcgttcatttccccctcttcctggcaattgatgaggaagttcagatgcaatttgttgcctcccttcttgaagtcctcgcttccttgaacttctagtagtaacctgatggtagatctatctcttccagcggtgtattgttcccaatttatttggaagggttcccaatttacatgtggagtgaataagaatgaggaatcattcatggagttatgtgtgcttcaaaatgtgtaaaaaaacagctcttctcaaagaacatgtccaggcagtacagatgtacaaatatccaaagtggtttatatgacaggtgctattgttctcagagatgtgtttcactctgttctttgacatttacagaaacatttttctgatcatcagatcatatgtaataaagtaacttacaaacatggtgcaacg

SEQ ID NO: 1824 - DNA, 1685 bp, Zea Mays
gagtcagaaaagccgctcttcttccgttccgcccgcccgcccgcttctctctcccgccccaacccgcgagaccgccggcagctcagggcaggaggaggagcggcttcaattcgtccccgcgccgcgcgctcaggacccgcccccgctgcctctcccgagggttccaggttctcatcaggcagaggcagaggtcaccttctgctgctcaacgcaacactgcacatacatacatacagatgggttccgacttccgaggggccttctcccgtcaccaccaccgtccacgtcactgggttcaagaagttccacggagtcgccgacaaccccaccgagaagatcgtgcgcaacctcgcgtcgttcatggacaccagagggctgcccaagggcctggtgctcgggagctgcaccgtcctcgaggccgccgggcagggcgcgcttggcccactgtaccaactgctggagtccaccgtcgtctccggccggggacgtgggatgccggctcaggagcgagtgattctgctccattttggcgccaacagtggttcacataggtttgcgcttgagaatcgagctgtcaatgaagctactttccgttgccctgatgagctaggatggaaaccacaggtttgctataattttacggttgctctcatgtacaagcatgttaattctttgtgtcattatatcttcttggtttctttacactccagaggacgcctatcatatcatccgatggaaacatcttacacgcaagacaggtacattttaacaattgtttccaaaaaataattatgagcatttcatttggaaaactagcgtttcacattatgctgtttacttggtgtcctacatagtctctgttttaataaatctactgtccgtcgattgcattcttttcatttccaagagtgcaagcaaagtattgatttccctttgttaaacctagagctatcacttcaatgcaccactctcgttatccactgtacgtacatgttcatcttcggatcattgatctctccagcttctacatcaatgattgtttgcacaactctgtttcctgctacctgttagttatcttatcatgtgcatcagctgaactacgtttcttttcatgatcaagcagaccacactgccactgaaggaaataagcaagtctctccagcaaatgggatatgatgtgatgccttcagatgacgctggtcgatttgtgtgcaactatgtctattaccactcgcttaagtttgcagagaagcatggcatcacgtctctcttcgttcatttccccctcttcctggcaattgatgaggaagttcagatgcaatttgttgcctcccttcttgaagtcctcgcttccttgaacttctagtagtaacctgatggtagatctatctcttccagcggtgtattgttcccaatttatttggaagggttcccaatttacatgtggagtgaataagaatgaggaatcattcatggagttatgtgtgcttcaaaatgtgtaaaaaaacagctcttctcaaagaacatgtccaggcagtacagatgtacaaatatccaaagtggtttatatgacaggtgctattgttctcagagatgtgtttcactctgttctttgacatttacagaaacatttttctgatcatcagatcatatgtaataaagtaacttacaaacatggtgcaacg

SEQ ID NO: 1825 - DNA, 1186 bp, Zea Mays
gagtcagaaaagccgctcttcttccgttccgcccgcccgcccgcttctctctcccgccccaacccgcgagaccgccggcagctcagggcaggaggaggagcggcttcaattcgtccccgcgccgcgcgctcaggacccgcccccgctgcctctcccgagggttccaggttctcatcaggcagaggcagaggtcaccttctgctgctcaacgcaacactgcacatacatacatacagatgggttccgacttccgaggggccttctcccgtcaccaccaccgtccacgtcactgggttcaagaagttccacggagtcgccgacaaccccaccgagaagatcgtgcgcaacctcgcgtcgttcatggacaccagagggctgcccaagggcctggtgctcgggagctgcaccgtcctcgaggccgccgggcagggcgcgcttggcccactgtaccaactgctggagtccaccgtcgtctccggccggggacgtgggatgccggctcaggagcgagtgattctgctccattttggcgccaacagtggttcacataggtttgcgcttgagaatcgagctgtcaatgaagctactttccgttgccctgatgagctaggatggaaaccacagaccacactgccactgaaggaaataagcaagtctctccagcaaatgggatatgatgtgatgccttcagatgacgctggtcgatttgtgtgcaactatgtctattaccactcgcttaagtttgcagagaagcatggcatcacgtctctcttcgttcatttccccctcttcctggcaattgatgaggaagttcagatgcaatttgttgcctcccttcttgaagtcctcgcttccttgaacttctagtagtaacctgatggtagatctatctcttccagcggtgtattgttcccaatttatttggaagggttcccaatttacatgtggagtgaataagaatgaggaatcattcatggagttatgtgtgcttcaaaatgtgtaaaaaaacagctcttctcaaagaacatgtccaggcagtacagatgtacaaatatccaaagtggtttatatgacaggtgctattgttctcagagatgtgtttcactctgttctttgacatttacagaaacatttttctgatcatcagatcatatgtaataaagtaacttacaaacatggtgcaacg

SEQ ID NO: 1826 - DNA, 2164 bp, Zea Mays
cagccgtccccagccgcgcgtgagtttcatccggccggccaccagccgtcctccaaccgcgcgccctgctagcttcttcctttgtttttttctaagccgacggtgccgcactgctactccagaggagcaaggccgaccgcactgctacgagtccgacggagaagcgccggctggcgcggccacggctgtgcgcttgcgcgagcaggcctacgatactgccgtccgatcccagaagacaaaatggcaaacaaaagaagaaaagaactcacaacaccagtggtgctgcaactgaaggtcataatttgcgtccaaggacacaaagaaatttatctgagaatgcaaatgagcagattgatacaaatattggttgtgattcaattggagattttctgtgtgacaatgattgtaattattctgttgttgcatatactttttcaccttgctatagtacaactaatgtgtttaaattaatggaatcccatagtccacaaaagaagagaaaaggaaggggtattacaaaattggaggacatatttgcaaggggatctgagatggcaaaaattaagatagaactgaatgaatttggtcaacctattggaaacaattcaagtaagttttctagtgctattgggtgtcatgtgagaaagaagttgtcagttagcagtgttgaccggagactagtggatggtgagaagaagtatgaagtctggaccgacctaaagaaaatcttcgatgtagatgatgctgcctttaactggtttttaaccactgctggaaggaaatggaaggattttaagtcaaccctaaaggcgcagtattttaatgagaatttaacagaagaggacataaagaacaagcatagtggaagggttagtgatgaggatttgaagtttctttctaaatattgggtgtctcctgaatgtgaaggaaagacaaaaaagccaaatttagtcgttcaaaggttggggtacttcatacatctggtagcaagagctttgctcgctctggccatgaaatgtctaaggaactaggtcaccctcctcgaagagatgaactctatatcaaaaacacataccagaaagaatggagttccaacaagacttgttgaaccagttattaacaaacttaaagaatatgttgaggcccatccagagttgaaggaaagaacaattcaagaaggtgatgcttttgctgctatttgtggagagaaagagccaagaggacgtgtccgagttttgggtctaggaccaactccccaggtattggtaccccgggcttgagaagttacacacctacaagactccaaatggaagtcctagcccgcaaaaaggctgaacgtgagaaagctgctctagaacaacgcatagcagaaatggaggagaaaatgcgggagcgaaggatggctcatgaaatgagagatgtggaaatcatctcgcatgatggttctaatacacgacaccatccggtaaagtagctgaacatcttagagatgcatgtgatcttatatgccatattgagagatcatcctgtggctaagggaacaattatttcaactaatccaagcttagtgctaggaggagttgctctaggaaagcaatattgtgaggttgttgtgaatgttgtgctgaaaagggatgcccttctaccttgcccatatggttatttggaggagatgggtgatgctgatcggatgtcgatcgcatggccgtacaagagagtaataagctatctctttgttgttttttcatatatggtgattgcatattttctaactaatggtttctatgattatatagctaaaggtgagcaagacatcaaaatcatcccagagtgctacaggagggaggtcctaggggtagtaagtcacttgtttactccatgatgacaatagcaagcagatcgcggtggtgcctatggatgctacaacaagaaagatcaaaagttcttttggatagatgcagctagatattttgttttgtattttctccaaaagagaaatttgcaagtgaacttaaaattgtgaaaccaacatgtggttgtactagctagtatctctgagctttcacaagccaaacttagtgttgttgttgcttattttgatctttattacaacaaaagcaaacttgtgaactttttatgtatgaatgcagtacaattgttattg

SEQ ID NO: 1827 - DNA, 2945 bp, Zea Mays
gaagattgtagtacaactcctttcttccatagaattggtcgtggattgtctggaaaatgcatagttactttagaccacaagacatggctacaagcccatagatatgttttgttcaactattacgatatagggccttacttggagtaagttatctatataagtatatatcttctcatcacatgatcactaccttttgcatgttgaagtgataaaatgacctttgtagcaagcatgctcactatctatcctcaattggtcttcaaaataaacgagatatcaaccgcatacagcatcaatcctttcatgagtggcttaggttgcatgtggaagaaacgtgtgaagaagcatcaggcgagattaaaattttagccaaggcaccaatgatggttgcacacaagtataatagctagctataccataaatggattcaatttccacacacactcctatgatgatggtagagctattcaaaatagtggggttgttgtagttgcagagtcaacaagctttgacaggggtaataatgataatgtcataataggaaataagacctattttggtattatcaatgaaattgttgaactaaactataaccacaaaggtatggtcgtgcttttcaaatgtgattgggttgacaaccgtgtgcagcacaagtgggtgaaaactgaccagttaggtatcacatctgtcaattttaagcacttgttcaatacaagtgacaaattaccagatgagcctttcattctagcatcacaagcggtccaagtatactatgttcctgatccaattgatattgagtgggctgctgttgttcaatctaaagcaagagatgtgtatgacctggataatttggagaacgagcacatagataatgataatcagttttttgccccactagttgatctaaatggcaatgtgactattgatattgttaatgggattgtccctgctgttagaagagacatagatggttacctagttgatcctaaaacatctaaaacaaaatctgcaaaaagacaaaatggcaaacaaaagaagaaaagaactcacaacaccagtggtgctgcaactgaaggtcataatttgcgtccaaggacacaaagaaatttatctgagaatgcaaatgagcagattgatacaaatattggttgtgattcaattggagattttctgtgtgacaatgattgtaattattctgttgttgcatatactttttcaccttgctatagtacaactaatgtgtttaaattaatggaatcccatagtccacaaaagaagagaaaaggaaggggtattacaaaattggaggacatatttgcaaggggatctgagatggcaaaaattaagatagaactgaatgaatttggtcaacctattggaaacaattcaagtaagttttctagtgctattgggtgtcatgtgagaaagaagttgtcagttagcagtgttgaccggagactagtggatggtgagaagaagtatgaagtctggaccgacctaaagaaaatcttcgatgtagatgatgctgcctttaactggtttttaaccactgctggaaggaaatggaaggattttaagtcaaccctaaaggcgcagtattttaatgagaatttaacagaagaggacataaagaacaagcatagtggaagggttagtgatgaggatttgaagtttctttctaaatattgggtgtctcctgaatgtgaaggaaagacaaaaaagccaaatttagtcgttcaaaggttggggtacttcatacatctggtagcaagagctttgctcgctctggccatgaaatgtctaaggaactaggtcaccctcctcgaagagatgaactctatatcaaaaacacataccagaaagaatggagttccaacaagacttgttgaaccagttattaacaaacttaaagaatatgttgaggcccatccagagttgaaggaaagaacaattcaagaaggtgatgcttttgctgctatttgtggagagaaagagccaagaggacgtgtccgagttttgggtctaggaccaactccccaggtattggtaccccgggcttgagaagttacacacctacaagactccaaatggaagtcctagcccgcaaaaaggctgaacgtgagaaagctgctctagaacaacgcatagcagaaatggaggagaaaatgcgggagcgaaggatggctcatgaaatgagagatgtggaaatcatctcgcatgatggttctaatacacgacaccatccggtaaagtagctgaacatcttagagatgcatgtgatcttatatgccatattgagagatcatcctgtggctaagggaacaattatttcaactaatccaagcttagtgctaggaggagttgctctaggaaagcaatattgtgaggttgttgtgaatgttgtgctgaaaagggatgcccttctaccttgcccatatggttatttggaggagatgggtgatgctgatcggatgtcgatcgcatggccgtacaagagagtaataagctatctctttgttgttttttcatatatggtgattgcatattttctaactaatggtttctatgattatatagctaaaggtgagcaagacatcaaaatcatcccagagtgctacaggagggaggtcctaggggtagtaagtcacttgtttactccatgatgacaatagcaagcagatcgcggtggtgcctatggatgctacaacaagaaagatcaaaagttcttttggatagatgcagctagatattttgttttgtattttctccaaaagagaaatttgcaagtgaacttaaaattgtgaaaccaacatgtggttgtactagctagtatctctgagctttcacaagccaaacttagtgttgttgttgcttattttgatctttattacaacaaaagcaaacttgtgaactttttatgtatgaatgcagtacaattgttattg

SEQ ID NO: 1828 - DNA, 1161 bp, Zea Mays
atggcaaacaggacaagggtgtatagttatgaactacaaaagaatgaaccattcacatcctcatgtgagaattgtcttgggaaatattttatagttcaggcccctttagatgtcaatcagttcctcttaaccaggtatgaacacagaagtggccaagtcggggacgatagtttgctctgcaacccagggacatcgtccaaaatcgttggtcagggtcaagcaggaccgactactgattctgcccagatcaccgctcctgcgctccacattgagaaacatgggagatgagagaagggggtagttgatgcaggtttctgttgctgggacatggggggagcatgcgagcagctgatgttgaaggcagcagaaacggacaaggactggaccacacaactttgggagcagcaacagctaacgcaaaattaagccttctccaatgaaactggtagcacaagagaaaagggcatcatggggaatcaattttactagttccaggagcgagatattggctaccagtggttgatttggggttgccagtgttggattgcttgaggatagagaaagggaaggagcaaggcagaagaaaatggcaactcccataggttatgttaggtgggtagtaggctgaataggctagcatatgtggcccaatttattgtcttcttttgcttctatattactacctccgttctcgaatatttgtcgtccgctagttcatttttgaactaaaccacgacaaataaaaaaacagagggagtactttgtattgatcttctacaactacttatgtgtgatatatcatggcacatcaactcaaattgttagggtctcctgttacaaactacccccttcgatccaagtttttagacaacatcaaccctctaccctgaccaatgacctggttgacccagagttcttgtggctcacaatcttgtaatatgtaaactcaattttctttacttttcatgaaaaataatatttcctattatacaaatttaaaatttttatcagttttttcttggagtaattaaaaaaaatcagtgcagcctagcagtagcagctctgaaatatcataagttaatgtcaaggatatgattgtacgctctgagacctttgacatgcttgaagttttacagaccaatatacgattatcaattgtga

SEQ ID NO: 1829 - DNA, 2763 bp, Zea Mays
ttgcctatttgaatctttaatcttatccatcttttggaatccatttctgcataaaagtagatatcatggaataaaacttcctgtcaggactcaggagcacttaacaagaaagcagctaataacttgataagtgatattactttgaatgagatcaaaagagttaaacaaggagttccaaaatctacatcaactcacaagcgtaagaggtgtccctgatcaagtcacataaaggtggtgaacatactgctattgcaactcaaaactcaggttgatctcacacaagaaatggactacggatgccaatactagttcatagtaaggatgcaggcatccaagcctgccaaaaactgcttgcaagttgcaacatttacgatgactaatataaattgggaggggcaaggatagatattccatttttaatcaaatcaatatttatttacaataacaaggcaagcatcaaaatgcatccccgacccttcgaatatggtctgaaacctttaagtttcagtgacagttgacatattcaaaacaatccataaatcgtctcccagtgaccaaaaaaaggtagaaaagataacatcagtccagttcattaaattgaatcatctaactgccataagcacagatcaaccaacagtacctaagtcataatgtcattcaagaatgagattggcattcaagctaacatttccaaaactaaatatccacctggacaactatttgtcatgtaatcaccaaataaagtaagctttccttttagaaaataagttaagcatggatttccagacaaagagcaattctaagaattcaagctcagtagtgtcaaggaaagacatagtataaccctatgatgcatggatacgtgtggcagggtctgtatcccgtatcagatatgtacctaatacagatacggctccgatgtgtgatagatacttatcagagaaataacagtaaaaatagatacagaaatatgtgatacgtcggccaacacgtatctggctggttgctccagcccaataactgcccttttaaccctacgttctactgcatgcatgcgacaaccccgatcaatctcgtgccgccagcccaccacccacatgggcaaacatctccagccgctgaagagacactggtgaggaaactccaccacgaccaccgcggagacaagcctccactggcaaccccacagaccatgatgagttcccactcccctgatagcgacaaaactcccccactgcaccatgaccatacccgcaagctgcgatgacttcaccacgccacagccacctgtgagtttattcttatttggtctttccattcccaacctagtcttcatattatcgaactagtcatcctgttctcgacctaggtcttctccgttccccttcggctctacctgtctccccgatagtctcctcagttcttgatttttccagccaccatgagtagatggtagcaacaagttcccactcccctgatagcgacaaaactcccccactgcaccatgaccatacccgcaagccgtgatgacttcaccacgccacagccacctgtgagtttattcttatttggtctttccattcccaacctagtcttcatattctcgaactagtcatcctgttctcgacctaggtcttctccgttccccttcggctctacctgtctccccgatagtctcctcagttcttgatttttccagccaccatgagtagatggtagcaacaaacgtgcgtagtcatagcactagcgctaggcctgctgatattgcaagagaacaaagaaaagggaaaagaagcttgaattgcatgaaccaagcctccccctgccacacttgagcaagaaatgtagttctatgttccttttgtctgctactgcaacactggttctattattttaatatgcacaactatttatagttattaaaagaacactaaaacatatcgacatatcgtgatttgggggaaatgctatctgcgtatctgtatccacttgataccaatacatgtatgtgtatccactggatacagatacacgtatccatgctcgtgctgcataggtctaatcctacaaaagcgttttttatatattttgcaactttgatgtatgtaacttgtataggtatgaatttggcttatgtgaaaaaaggagacacgataaaccaatacagcagctgcagaatctgatatatcgattccaatacctgattcaggtatgaacagtggtggcaacaaattaggcagtaataaacttgcattaccacttgatgcagcagggatgcttagaagcgttacaaatacgaaactgtgcaccatgtacattactggcagtgtcagatgcatcttagacaaacaagggaacaggaacagccttctaaatacattactagcagtgtaaaacccatcttgaaggaccatgagtgtcttggcaccaaaattaatatgcttggcccacaattttgttgttgcttcagtggtcctcctggctgaagctcctagatcctaacgcagtaacgcggatttaccccctgttgtagcaaaccttttactcttccagccacgaacgattcgctttttttaaaaaaaaaatatcctttggcccagagcaagtggaaagcgcgcggcaacctctccgctgacccgtcgggcgcctgccgcttctccagggcgcagtccaaaagcagcagaggcgagggagggaagtcatgaactcactggagggcgcggaagatatcgtggatctctccgtcgatctgctcgagctccg

SEQ ID NO: 1830 - DNA, 6764 bp, Zea Mays
gttgtgttgagatccttctctagccacttggcaaattactgtgctaacaattaatcaagttttgtggcttaagattttgaagtgttacaggatcacctattcaccccccctctaggtgctctcagggagactttgcctgtggcgctctggggcgcaaggggggaatctccctttaaaaagggatcgacctctttggtagaagtcatgccttgctcctcttgcatccttcgcgccctcccgccttctgggcctctagatggggtgcgccgatgttcgctggagggaaacgcgttagagccatcccctctggcggtcccatcgtcggagagcttgcgctcgcagaggggttgtcgatcttgtcttcttcttgctgctgttagaggagcacaaccccgtggggtcggtgttcttcctccattgttcggctttaagaattttcatcgtgcagcccagttgcagtcccccactagtggtcatctagaaggatgaccaccagcctcgtggtggggagaagcaagtcaggctacggctttccctccaccctcagcttcaaggatgtttatcatccttgctggggtgaagggcgagccaagtcggggccctgccctccacgtgggctggtgacccgcttcttcctccagcattcgagggaaaagggtgttcaccagccttgcagaggaggcgaacctcagctacgtggggccggttggctgcaggccatcagctgcagcgtgtctggccctttgggctggatggcttcagcgccgcctccgatgctgcctcctgccgctctggccggggcgtggctgtgcgtccaccgcacgggcgatagtcgcgccgtgcgcgggtccgccacatccacggcttctcctgcccgtcggccgtactggggggtcgtacaagacgtcgtacgccgtaggagtggcggccgtgttcttggatggtcttgtcctcactcccgtgagaggacgggagcgaggaccccttcgtgcgtgttgaggcagccgccgccgaccagtgcagaggtggtcgctgccgtcggtgctgaggtggtcgcgaccgctggtgaggctactcgctgtagaggtggttgcctccgccagcgggaccatcgaagccacctgccgccgagtccccgactctttggctttaatggcctcgttgtcgccccccgtagggggacgggggcgaggacctccttgcaatggcacacaccctggggtgatcgccaccactggtaagccgctcggagcgggcgtcgttgtcgctgctggtgcagaggtggtcgctgccgccggcgatccgctgatgtagaccaacttccagcgtgactcctactggagcagcgtagctcattcctaaaaaaaattgagctaggaccccacttgtaagggaatgtaataacatatgtttgctcggaagcaaaatgtaataacatatgcatgcagaatcttagtctgggaagccaagttgtgtatccggaccccctggatggtggttctaggtactaggacacctgccgcagggtggtggagtgtgcaggcccacggtacgggaccaggctgagcggctacacgagtccggaccaccccaggagacaagcatcgcttctctagttccggaccccaggttgtcggacgcacaggacttatagttccaagtacttgggcatccatcatggagcggtggagtgtgcaggatttcgggtacggaaccaggctaaccggccacacaggctccggaccaccccatggaacgggcacccgttctttagaaccggcccccaggcttttttcctgtttttgtaaggcacttctgagtattatttataaagcagtgtttgacacttatctgtgcatcgctcgttcctgttgtgtgagtgaaagttccctttggcccgggaacatgatctggatgtcgcctagaggggggtgaataggcgattaaaaagtatcactttaaaacataaatcttactctactcgaagacaggattgcatagttccattctccatacctttgccttttcctgaattgccatgagagcaccagttgtcactaattgagggctccttttgttcatgcgccttagctcaaaagggtgcattagaggcacaacatggagttggtattcacacaatatcagactagagtaatcatgtgaacataaactaaacaatatgtcatatttgcacacaggttaatcattaaaaccatatagcataactcacaacggaatacaggtttattcacgaacacaacaagagttaatcatggtggatatatctaatgaaaaactaccccttaaatgattcaagagacataacctctaaagcacacaaccatgattaagcaagcatggttacgatcttgttgattattaatcattgattgaaaggtactcaacacaggtaatcaacaaagcataactgctccaaggacaggtagcacatcaatcagacttaagagcagtactgattatcaacaaagtacttaagggtaccatcctatggagcgcaagttgcagaatctcattaaggtcctctgcttgaatcaccaataatgattaaggacctgttcaacttttcacttgagatgaacatgggattagtgtctcacaataattcaaccgtgggtcaatgaataaacaccaaaacaattaacagtttaagcatagagtttgagataaccgtcttaagctctcccatggtctccagttcatctcaaggcacctgcatggtctagttagcatagtttggtacccatctcgggatgggtccatattgatcatccaaaaaagccttgggtacccaaatagcatgtgtgctagtcctaggtgatctcatgattgatctagcacaagagtgtgatttgggtctcctaagcgaataagattgagacaaatttacttgcttaggaacctcacctttattacataccttgagtagatgactctgctcaccacacttgtagcagaagcgtcgctcaacctgacatgacgcttgatgtttgtcattttccttggtgagagtcatcttggagaatgcacatgcttggttcatcaataccagacatgaagtgatcatgtggtccttgttgttgcatccaaaacatctccttatcccttcgcttgtctttgtatggacaagatgtgatgaggtggcctaatgccttgcacttgaagcatctccgttttcctcttatcttgttacttttagatgacatagagacatggtcagtgcaaacaacatgattaattaaatctttacctttttccaagctcatgttgatttcttcatctttaggaacatccttcttatggagcttaacacttgctgcagtttttcctttctcaagcttcttcaccacgcgcccgtggatatcttgagaaagttgagcaatgtgtcttctccttagttgtctttgcttcttgttcccacaccatttcttttgtgaccctaaaacttgttgctcaatcaatgattggctttcctttgagcaacaggggttagcacatgatgatatacaattcaaatgcgcacacgtgcgagaatgaggttcacatgaatttaagttcgcaattataacctcatgagcaacattaagcatgatatgtctatccaagagattatcatgagaataagacaatgaatcatatttttcagtgagagctagtttatcatgacttagcaaatctacttgcctctcaagcatggcatttttcactctaagttgagcaacacaagataaagcatcatcattactactttgctcaattaaaattgaatcataccgttggaccaagacatcatgagagcaccttagctcctcatgttctttggtcatcttctccaggctgttgtttgttttgatgagagtttcctctagcttgagaagcgtttcgccttgttccttgttccttctcaatagcttaatcaagagcgctttgtcttctttgttgagatgggtgtagaaacggcgaatctcctcttcttccacatcgtcggtctcattttccctgtcattactattagtggaagcaaaacaagaaatgtaccttgtgatgatgtagactcctcatcctcttcctcatcattgcttttgtctccatcatcattgctagcaataaaacatttattactagtggaagacaaacctgttgatgaggtggattcattgtttggttgccatcgttcttgttcttctcccttggacaagttagtatcaccaacaatagagggagcagaggtagtgcatatggacttaaaaaatttcaacttaagtttagtccatagatcatgagcattagcaaataagtcactatcactactcatgatggcaaagtaggcacctctagaaagagaatcaactaagatgttgcaagcatggtgatttagagatagacatcttagttcatcatcagaaggatttttactaacattagagggaaaaaaacttctactaaagacatatctcaaatcaggatcaacactcatgaaagcattataaatagagacaaaccaagacttgtaattagaaccattgcctaaaagaagttctacagttacctcttgtgacgacatcgtcatctccggacggctaagcccacactggagaggcctagctctgataccaattgaaagttccctttggcccgggaacaggatctggatgtcgcctagaggggggtgaataggtgaataaaaattatcactttaaaacttaaatcttactctactcgaagacaggatcgcagtggagtgaagaacccttcgagtaggttgcagtggaattgaagttcctgtcttaagaatatcctgcacttcaaggaaagctagtaccacaagtaagcagtgaagtgcagatataaaagcgagtaagacagagagtcagaatacaatacagaacagagcgcacagacgcaaggatttatcccgaggttcggccaagcctgaaatgcttgcctagtcctcgttggagttagccacacctgggcttggagtctgtttcaactccttcctctgtttgctcagatctgtcagtatgacagatagagcctttcactatgttgagttgggttacaacaaaaccgcggctgcttacaaactttttgacagcaccctggcagagtaacgatacgctcaagaccctcctcttgctcttagcagcacttctccactcactaaaggcttatagctttgccttctacacaaacaagagagatacacacaagagggagagtgagaattgattcgagtgatgtctacacttgttggctgctcttgctctaatgattgaggcgcctagaggtcccttttataggcacaaggggcctaggagccgttggaagcaatccaggaaggcaaatcttgccttctgtcgggtggcgcaccggacagtccggtgccccaccggacactgtccggtgcctgatttccttccagaaatggagcagtcgaccgttgcagtcctggagccgttggagcaccggacactgtccggtgcacaccagacagtctggtgcctccatctgaccgttggctcggtcacgcgtcacgcgcggattgcgcggccgaccgttggcccagccgaccattggctcaccggacagtccggtgcaccaccggacagtctggtgcaccaccggacagtccggtgaatttatagccgtacgtcgccggcttttcccgagagtggcctgttcaccagagttcagcctggcgcaccggacactgtccagtgcaccaccggacagtccggtgtgccagactgagctgagtcttggttgtacacatccaagcattttgcatctcttttctttttgtcgcagaacctcccaagttatcgggcccacatgcacctgtccttgtctcaagaccgcagacagctatgcgtgtgcaccaaacaacttaacaggatctgtccgagtgccccgaggaccccggataaacgacttaccgccaagatcgcaggattaagtaaatacaactcacatacaaacacttgcagcggaaataaattctttattacaaaatgattacaagttacaacatttataagttataaccatattacaatatatcatcggagtgattacaagagaatttgattcaaaaatattacaatttgaatgtataaaacatttataagttttaaaatacatgctagcttaagtgacagtcctccataaagaagctaaagatgggatatacttatataagaaggtcgagcccaccgacacttagcaccatccacaacagaacaaacttataacctgaaaaacaacagggaataaagccctgagtacgcaattactcagcaagacttacccgactaaagaaaagactctcaagggtatgctggtttgttgggaatcaaggtaaagctcatcaaatttcaaagactcgtttttgcagaaaagcttactagtagtggatccttatgccaaacttttacttcacaaattaagtatttttcctgaatctagatttgcctgatctagagcattcacttgtcctacactaacttcattttatccactttagtttcacttgttatctacgctgaaggtcgaagatccagtcttcatatccgagaagttcggcgatccgaatcgattaatacccagctggggatctccaaccacacgacatatgtagcacttaacccttgcatatgtcaactcgcccacgggtttctcaagaccagaacgggtccccgccaaccgagagctcagtaccccaccatccagcctcttgccaggtg

SEQ ID NO: 1831 - DNA, 1978 bp, Zea Mays
cttcattattgcaagttcctttttcataaaacccatatccaatgttgcacaacattctttttaaaagaaacaacttttagtttctaagcagggctaagcctcattagttctctatcaaggaatagtaatcgaattccaaggaatggcaatacatcaattgtttcatcactcaactcctatcacctaatgcagcatataagtgataaaagttttaaaacaacaaggaggtggcaaatgcaccggagcttgcctgggataaacactacgttagtgttgttaattgacgaccacttggtgagcatcttccattctggtgctggcttgatgcatccacaagattaatccaccaataccggtttgctctgatccatgtccttcagctcgcataatcagctagcgtacctattggaaatgcataatgcatatgaataagaatagacataaatgacacaggataggtaaactacactgaagagggcaaaacacttctggcagagcgctacaattcctatgagcaaacactagttaactttgactctacaacaatcacacacttggagttacttattctcagctcaaccatcaagcacaataactcaacacaaatattcagctaagacgtaacctcaatagattgcaatacttatggcaagacaaatgtaaacatttaaaagcaagcatatactaggtatctataaattactaagtataagaatcacacttttcttaaatagccggagcaaacatcacaatttaaaatctacaaacttaaagtactaacgtgcaattctcactatgaaattttcataacttttgctgaagtggaacaacgatgatatttgcctccaactgactaaaataacgatgaccatttattcaaggcgattagcttaaacgctcaattttgatttatgacatttaatcaataaacaaacatagaatatgaccattactaacacaagccatcacttcagcaattaaaaatcaactaaacttacttagccaaacaagagtaaagtttaagcattcaacattttcagaatttctggacagccgtactgtagtcaattgttttgctcataactcacaaaatattcatccaaaaatagtgaactaagactttctagaaagcttatgaaatcccctataacttttgtattatcagcataacatgatttggcattttgaaaggtcaatcagtgctaaacgtaaattctgtccagatttggacaaaattcgactactcacttcaaaaatccataactggagatttagacatccaaaacatgtgatcctagactttttagaaagctaataaaattgtctacaactcatttataatcatctctagttaattcaatgcgtagaaaggtcagttaacacaaacagtctcttctgtccagatttggacagattcagacttcatatttcaaacagccataacttgacttctagaccaccaaaaagggtgatccaaaatttgttggaaagcttaagaaaagtactacaattcttctataattactaagagctgattctcagtttaacttggacaaacaaggtcattttcgaaatcagtacagaatctggacagattctgaaactggacttggaaaaatcataactcctaaactactgaacctatggtcatggaatttttacacaatcaaggtaaaaagattatctacaagttttatatataacacttttacagaaaacacggtttactttacttaactagccacgtaataaaattggacatgcagtccaaacagcaagaactctaacttagatcttatttaacttctacacttatcatgcttttaacatttagaacactcaacactttatctttagtagaactaaaaccacataatacaacaaggcattcatgtcaccatacattaattagaaattcactcaaccactaataaatcttatcggcaaagcgctataagtactaaacgttgtttttaca

SEQ ID NO: 1832 - DNA, 782 bp, Zea Mays
cctacttcctgtaattttgtagatggtgtgcaaaaggatttattgtcctagcaagttcagctttctcataaattaaaatactacctgttcgtatgtactacttctagcacattagactgcaaggacacttgtgcagatgcactgtttctaacaatatggaatatgttgaaagtttttttcacacaaacaaaaaatgctacctgtcccactgtgctatctttaagaactaagaggttgaagtctatgcattattgcccctttctggattctgatgatgtttaagataagtgtcagcttctgatcacttgactactttattggtactcatacctgttaaaaagcttactgcaaaatgttgtcgtgatctttgtgcctactttgcatatcacataaattagcggataagtcacataggattacaaacatagctctttatatagtgatgaatttctgaggagactaagtggtcctaaacctaagtactcctcagaaaaggagtactcgtggcatgcctgttactccttgcccgcattatgtgaatgctagcatgtgataaaaatacaagtcatgtaaagttcaagagctgatcacatttaatactcgtggcatgcctgttactccgaagctttaacatactcagcgatccttctcaattttcctcaaatttgaggattagcctctaccttcccgtccctcaaagcacaaagccatgtagaatcgagaggaatctcggagatcaggagaagaaaaatagggacagtggaagaatacatatctcaact

SEQ ID NO: 1833 - DNA, 2207 bp, Zea Mays
aaaaactcgtttcatttgggctctgagcggtcctgacatcctgcacgccgtttctctcgtcggctcacctcacacctggctctcccatccacctccctccgcgcgctccgccgcctcaccttctccccctctccctcagcagccgccacgagcggcccttcatcgacgacgtctgctccgacaatgccaccctcatgcctcgctcggatctctccgatcgcgtcccttctcacaccacaaaccctcagaccgcttctctcgtcaatacctcgatagcactcctcgtccccctcacccttgcggtggccagtggagtggcggccgacgactcggaccaccgatacaagatgtacaagcttgtcctgctaaatggcaacaatggcccctttcacaatcctagacttgaatgggacaactggcgatatggttgattttcaatctacaggggatgcagggaatggcgcaaccatcaccgagatgggtaacccggttcctgagccatcctacgaggaatgtaaatttgggcttcaggcttgcctaatttagtatactaccttctgtttgctcttaacatgctgctttcgttatgcagctgttctttcagcagaagaggctagattatggagtgttgctactatgaattgcttagatttcgatgcctggaccacagttgttgaggagacggacaaaaatgttgaggttatgcatactacaagattacttgtgttctgactgccaccatgtagcaacattgaggtgaaagattggtatgtggagtcattccgtgaaatccggtcctttccagaggtgaggaaccagaaagatgagctcgccttcacccagatgatcaaaatgatcagggtacgacacaccaatgtggtgcctgcgattgcattgggtgtgcagcagctgaagaaggacttgggcggtccaaaggcgttcccccccggaatccatgagatccatcagtttcttgaccgcttctacatgtcaaggattgggatccggatgctgatagggcagcacgtcgctttgcatgaccctgatccagagcctggtgtgatagggcttataaacacaaaaatgtcacccatgacagttgctcgaattgctagtgaagatgcacgtgctatttgcatgcgggagtatggatcatctcctgatgtcgacatatatggtgatccgggttttacatttccatatgttacaccacatctacatctcatgattttcgagctggtgaagaactcccttcgcgcggtacaggaacggtatatggattctgataagcttgcacctccagttcgaatcatagttgctgatggagcagaggatgtaactattaagattagtgatgaaggtggtggaataccaaggagtgggctctcaagaatttttacgtatctctatagtacagcagaaaaccctcctgatctggacggacataatgaaggagtaactatggctggatatggttatgggatccctattagtcgcctttatgctcgatatttcggtggggacttgcagatcatctctatggaaggatatggaactgatgcttacctccacctttcacggctgggagattcggaggaacccttgccgtaatttattcaaaagaaccattcctgtaattaggatattgcttctgtgctggtatgcaagtatagttctgaaggccagccacctgttcagctgttcgtgtccctacttgttgtctttattgttcattcatcatcttaatggattgtgatcgtaattcctaatcgttttatgactgatttgtactgtcattataattgtcgaacctccaaaaaaaaaagttgccgtcgagcatccgaggtatttattagtttgagtgagtaatgggattcaccataacactgtaagcctgttactccaatgcctctaaagcatgtttttttcagtctcagcttgttcgatataatatgaggaatgatctttcactgaaattattcgatgaatattaatgttaaaatggatcgattcaatgcagaatgtgtaattctttgaaccaaatgcctgccaaaagtgtgtcattggttggagggagggtgagaagtgagattgtttttcccagtgcagctgatttcatcctctcgtcgacgtgtcagcttcagaatgcaacatttctggtgtccagttatcgtgcacatagcgtggatttggtcaagtttattcgg

SEQ ID NO: 1834 - DNA, 2117 bp, Zea Mays
gggctctgagcggtcctgacatcctgcacgccgtttctctcgtcggctcacctcacacctggctctcccatccacctccctccgcgcgctccgccgcctcaccttctccccctctccctcagcagccgccacgagcggcccttcatcgacgacgtctgctccgacaatgccaccctcatgcctcgctcggatctctccgatcgcgtcccttctcacaccacaaaccctcagaccgcttctctcgtcaatacctcgatagcactcctcgtccccctcacccttgcggtggccagtggagtggcggccgacgactcggaccaccgatacaagatgtacaagcttgtcctgctaaatggcaacaatggcccctttcacaatcctagtgcagacttgaatgggacaactggcgatatggttgattttcaatctacaggggatgcagggaatggcgcaaccatcaccgagatgggtaacccggttcctgagccatcctacgaggaatctgttctttcagcagaagaggctagattatggagtgttgctactatgaattgcttagatttcgatgcctggaccacagttgttgaggagacggacaaaaatgttgaggttatgcatactacaagattacttgtgttctgactgccaccatgtagcaacattgaggtgaaagattggtatgtggagtcattccgtgaaatccggtcctttccagaggtgaggaaccagaaagatgagctcgccttcacccagatgatcaaaatgatcagggtacgacacaccaatgtggtgcctgcgattgcattgggtgtgcagcagctgaagaaggacttgggcggtccaaaggcgttcccccccggaatccatgagatccatcagtttcttgaccgcttctacatgtcaaggattgggatccggatgctgatagggcagcacgtcgctttgcatgaccctgatccagagcctggtgtgatagggcttataaacacaaaaatgtcacccatgacagttgctcgaattgctagtgaagatgcacgtgctatttgcatgcgggagtatggatcatctcctgatgtcgacatatatggtgatccgggttttacatttccatatgttacaccacatctacatctcatgattttcgagctggtgaagaactcccttcgcgcggtacaggaacggtatatggattctgataagcttgcacctccagttcgaatcatagttgctgatggagcagaggatgtaactattaagattagtgatgaaggtggtggaataccaaggagtgggctctcaagaatttttacgtatctctatagtacagcagaaaaccctcctgatctggacggacataatgaaggagtaactatggctggatatggttatgggatccctattagtcgcctttatgctcgatatttcggtggggacttgcagatcatctctatggaaggatatggaactgatgcttacctccacctttcacggctgggagattcggaggaacccttgccgtaatttattcaaaagaaccattcctgtaattaggatattgcttctgtgctggtatgcaagtatagttctgaaggccagccacctgttcagctgttcgtgtccctacttgttgtctttattgttcattcatcatcttaatggattgtgatcgtaattcctaatcgttttatgactgatttgtactgtcattataattgtcgaacctccaaaaaaaaaagttgccgtcgagcatccgaggtatttattagtttgagtgagtaatgggattcaccataacactgtaagcctgttactccaatgcctctaaagcatgtttttttcagtctcagcttgttcgatataatatgaggaatgatctttcactgaaattattcgatgaatattaatgttaaaatggatcgattcaatgcagaatgtgtaattctttgaaccaaatgcctgccaaaagtgtgtcattggttggagggagggtgagaagtgagattgtttttcccagtgcagctgatttcatcctctcgtcgacgtgtcagcttcagaatgcaacatttctggtgtccagttatcgtgcacatagcgtggatttggtcaagtttattcgg

SEQ ID NO: 1835 - DNA, 1539 bp, Zea Mays
ggaatctgttctttcagcagaagaggctagattatggagtgttgctactatgaattgcttagatttcgatgcctggaccacagttgttgaggagacggacaaaaatgttgaggttatgcatactacaagattacttgtgttctgactgccaccatgtagcaacattgaggtgaaagattggtatgtggagtcattccgtgaaatccggtcctttccagaggtgaggaaccagaaagatgagctcgccttcacccagatgatcaaaatgatcagggtacgacacaccaatgtggtgcctgcgattgcattgggtgtgcagcagctgaagaaggacttgggcggtccaaaggcgttcccccccggaatccatgagatccatcagtttcttgaccgcttctacatgtcaaggattgggatccggatgctgatagttgctcgaattgctagtgaagatgcacgtgctatttgcatgcgggagtatggatcatctcctgatgtcgacatatatggtgatccgggttttacatttccatatgttacaccacatctacatctcatgattttcgagctggtgaagaactcccttcgcgcggtacaggaacggtatatggattctgataagcttgcacctccagttcgaatcatagttgctgatggagcagaggatgtaactattaagattagtgatgaaggtggtggaataccaaggagtgggctctcaagaatttttacgtatctctatagtacagcagaaaaccctcctgatctggacggacataatgaaggagtaactatggctggatatggttatgggatccctattagtcgcctttatgctcgatatttcggtggggacttgcagatcatctctatggaaggatatggaactgatgcttacctccacctttcacggctgggagattcggaggaacccttgccgtaatttattcaaaagaaccattcctgtaattaggatattgcttctgtgctggtatgcaagtatagttctgaaggccagccacctgttcagctgttcgtgtccctacttgttgtctttattgttcattcatcatcttaatggattgtgatcgtaattcctaatcgttttatgactgatttgtactgtcattataattgtcgaacctccaaaaaaaaaagttgccgtcgagcatccgaggtatttattagtttgagtgagtaatgggattcaccataacactgtaagcctgttactccaatgcctctaaagcatgtttttttcagtctcagcttgttcgatataatatgaggaatgatctttcactgaaattattcgatgaatattaatgttaaaatggatcgattcaatgcagaatgtgtaattctttgaaccaaatgcctgccaaaagtgtgtcattggttggagggagggtgagaagtgagattgtttttcccagtgcagctgatttcatcctctcgtcgacgtgtcagcttcagaatgcaacatttctggtgtccagttatcgtgcacatagcgtggatttggtcaagtttattcgg

SEQ ID NO: 1836 - DNA, 437 bp, Zea Mays
gtttgttctttcccttttaaagttttcttgcactattctttgctgataccatttgatgttgctttatgttaaattctcatttagtgaagcaacaccttgcaagaaagaacttgtgttattgctcttcttatctaagccctcttgctttattttcatagacttattagaagtattgatttatcaattccgcattatttagcaatactctctacaagcaaaggacttaattttatactccgataattgtgtatcttgttctaaccactaatcaaggggtctagctggggtgtaaagttataattttcaggtttcgtctatccacccctctaggcgactttcaggattttttgtgataaaagttagtcttcagagactaattgggtctaactagaccttccgcatttatttaccaggtgtagcgcactagactacggctc

SEQ ID NO: 1837 - DNA, 2142 bp, Zea Mays
catttacacgaaatccactcgatcgatggtaaagtagcgaaaactgattctcagaattgcaaaattgcaaatttctcctcgccacgccacgctgaaggcgaccctgacatgcgtggtccacatcgcggtggcctacactcgtcgccgcttcactaccgcgctctccccctcttcgtcgttgccgtcgccgcagtccccatccatccgtcgaggcatccatccatccacccattccattttcgctctcctcttccgtcacacctccctcctcctcgtccccccctcctgcggcgcacttatatatataccaccacgtcgatgcgccactcagctggcatcgccatcgacggcgtgccgccatagacggcctgacacccccccgctcccgcccccgccctattcatcccttcatcatcccaatttccacaaacctcgcgcgcggcggagggagaaggaaggatggcgtcggagccggtggcgcgggcggtggcggaggaggtggcgcgctggggcgcgatgcgccagaccggggtcagcctgcgctacatgatggagttcggggcgcgccccacggagcggaccctccttctcgccgcgcagttcctgcacaaggagctccccatccgcatcgcgcgacgggcgctcgacctcgactcgctccccttcggcctctccaccaagcccgccatcctcaaggtgaaagattggtatgtggagtcattccgtgaaatccggtcctttccagaggtgaggaaccagaaagatgagctcgccttcacccagatgatcaaaatgatcagggtacgacacaccaatgtggtgcctgcgattgcattgggtgtgcagcagctgaagaaggacttgggcggtccaaaggcgttcccccccggaatccatgagatccatcagtttcttgaccgcttctacatgtcaaggattgggatccggatgctgatagcacgtcgctttgcatgaccctgatccagagcctggtgtgatagggcttataaacacaaaaatgtcacccatgacagttgctcgaattgctagtgaagatgcacgtgctatttgcatgcgggagtatggatcatctcctgatgtcgacatatatggtgatccgggttttacatttccatatgttacaccacatctacatctcatgattttcgagctggtgaagaactcccttcgcgcggtacaggaacggtatatggattctgataagcttgcacctccagttcgaatcatagttgctgatggagcagaggatgtaactattaagattagtgatgaaggtggtggaataccaaggagtgggctctcaagaatttttacgtatctctatagtacagcagaaaaccctcctgatctggacggacataatgaaggagtaactatggctggatatggttatgggatccctattagtcgcctttatgctcgatatttcggtggggacttgcagatcatctctatggaaggatatggaactgatgcttacctccacctttcacggctgggagattcggaggaacccttgccgtaatttattcaaaagaaccattcctgtaattaggatattgcttctgtgctggtatgcaagtatagttctgaaggccagccacctgttcagctgttcgtgtccctacttgttgtctttattgttcattcatcatcttaatggattgtgatcgtaattcctaatcgttttatgactgatttgtactgtcattataattgtcgaacctccaaaaaaaaaagttgccgtcgagcatccgaggtatttattagtttgagtgagtaatgggattcaccataacactgtaagcctgttactccaatgcctctaaagcatgtttttttcagtctcagcttgttcgatataatatgaggaatgatctttcactgaaattattcgatgaatattaatgttaaaatggatcgattcaatgcagaatgtgtaattctttgaaccaaatgcctgccaaaagtgtgtcattggttggagggagggtgagaagtgagattgtttttcccagtgcagctgatttcatcctctcgtcgacgtgtcagcttcagaatgcaacatttctggtgtccagttatcgtgcacatagcgtggatttggtcaagtttattcgg

SEQ ID NO: 1838 - DNA, 1768 bp, Zea Mays
ccacatcgcggtggcctacactcgtcgccgcttcactaccgcgctctccccctcttcgtcgttgccgtcgccgcagtccccatccatccgtcgaggcatccatccatccacccattccattttcgctctcctcttccgtcacacctccctcctcctcgtccccccctcctgcggcgcacttatatatataccaccacgtcgatgcgccactcagctggcatcgccatcgacggcgtgccgccatagacggcctgacacccccccgctcccgcccccgccctattcatcccttcatcatcccaatttccacaaacctcgcgcgcggcggagggagaaggaaggatggcgtcggagccggtggcgcgggcggtggcggaggaggtggcgcgctggggcgcgatgcgccagaccggggtcagcctgcgctacatgatggagttcggggcgcgccccacggagcggaccctccttctcgccgcgcagttcctgcacaaggagctccccatccgcatcgcgcgacgggcgctcgacctcgactcgctccccttcggcctctccaccaagcccgccatcctcaagggcagcacgtcgctttgcatgaccctgatccagagcctggtgtgatagggcttataaacacaaaaatgtcacccatgacagttgctcgaattgctagtgaagatgcacgtgctatttgcatgcgggagtatggatcatctcctgatgtcgacatatatggtgatccgggttttacatttccatatgttacaccacatctacatctcatgattttcgagctggtgaagaactcccttcgcgcggtacaggaacggtatatggattctgataagcttgcacctccagttcgaatcatagttgctgatggagcagaggatgtaactattaagattagtgatgaaggtggtggaataccaaggagtgggctctcaagaatttttacgtatctctatagtacagcagaaaaccctcctgatctggacggacataatgaaggagtaactatggctggatatggttatgggatccctattagtcgcctttatgctcgatatttcggtggggacttgcagatcatctctatggaaggatatggaactgatgcttacctccacctttcacggctgggagattcggaggaacccttgccgtaatttattcaaaagaaccattcctgtaattaggatattgcttctgtgctggtatgcaagtatagttctgaaggccagccacctgttcagctgttcgtgtccctacttgttgtctttattgttcattcatcatcttaatggattgtgatcgtaattcctaatcgttttatgactgatttgtactgtcattataattgtcgaacctccaaaaaaaaaagttgccgtcgagcatccgaggtatttattagtttgagtgagtaatgggattcaccataacactgtaagcctgttactccaatgcctctaaagcatgtttttttcagtctcagcttgttcgatataatatgaggaatgatctttcactgaaattattcgatgaatattaatgttaaaatggatcgattcaatgcagaatgtgtaattctttgaaccaaatgcctgccaaaagtgtgtcattggttggagggagggtgagaagtgagattgtttttcccagtgcagctgatttcatcctctcgtcgacgtgtcagcttcagaatgcaacatttctggtgtccagttatcgtgcacatagcgtggatttggtcaagtttattcgg

SEQ ID NO: 1839 - DNA, 1924 bp, Zea Mays
atcgcggtggcctacactcgtcgccgcttcactaccgcgctctccccctcttcgtcgttgccgtcgccgcagtccccatccatccgtcgaggcatccatccatccacccattccattttcgctctcctcttccgtcacacctccctcctcctcgtccccccctcctgcggcgcacttatatatataccaccacgtcgatgcgccactcagctggcatcgccatcgacggcgtgccgccatagacggcctgacacccccccgctcccgcccccgccctattcatcccttcatcatcccaatttccacaaacctcgcgcgcggcggagggagaaggaaggatggcgtcggagccggtggcgcgggcggtggcggaggaggtggcgcgctggggcgcgatgcgccagaccggggtcagcctgcgctacatgatggagttcggggcgcgccccacggagcggaccctccttctcgccgcgcagttcctgcacaaggagctccccatccgcatcgcgcgacgggcgctcgacctcgactcgctccccttcggcctctccaccaagcccgccatcctcaaggtgaaagattggtatgtggagtcattccgtgaaatccggtcctttccagaggtgaggaaccagaaagatgagctcgccttcacccagatgatcaaaatgatcagggtacgacacaccaatgtggtgcctgcgattgcattgggtgtgcagcagctgaagaaggacttgggcggtccaaaggcgttcccccccggaatccatgagatccatcagtttcttgaccgcttctacatgtcaaggattgggatccggatgctgatagatgcacgtgctatttgcatgcgggagtatggatcatctcctgatgtcgacatatatggtgatccgggttttacatttccatatgttacaccacatctacatctcatgattttcgagctggtgaagaactcccttcgcgcggtacaggaacggtatatggattctgataagcttgcacctccagttcgaatcatagttgctgatggagcagaggatgtaactattaagattagtgatgaaggtggtggaataccaaggagtgggctctcaagaatttttacgtatctctatagtacagcagaaaaccctcctgatctggacggacataatgaaggagtaactatggctggatatggttatgggatccctattagtcgcctttatgctcgatatttcggtggggacttgcagatcatctctatggaaggatatggaactgatgcttacctccacctttcacggctgggagattcggaggaacccttgccgtaatttattcaaaagaaccattcctgtaattaggatattgcttctgtgctggtatgcaagtatagttctgaaggccagccacctgttcagctgttcgtgtccctacttgttgtctttattgttcattcatcatcttaatggattgtgatcgtaattcctaatcgttttatgactgatttgtactgtcattataattgtcgaacctccaaaaaaaaaagttgccgtcgagcatccgaggtatttattagtttgagtgagtaatgggattcaccataacactgtaagcctgttactccaatgcctctaaagcatgtttttttcagtctcagcttgttcgatataatatgaggaatgatctttcactgaaattattcgatgaatattaatgttaaaatggatcgattcaatgcagaatgtgtaattctttgaaccaaatgcctgccaaaagtgtgtcattggttggagggagggtgagaagtgagattgtttttcccagtgcagctgatttcatcctctcgtcgacgtgtcagcttcagaatgcaacatttctggtgtccagttatcgtgcacatagcgtggatttggtcaagtttattcgg

SEQ ID NO: 1840 - DNA, 1993 bp, Zea Mays
atcgcggtggcctacactcgtcgccgcttcactaccgcgctctccccctcttcgtcgttgccgtcgccgcagtccccatccatccgtcgaggcatccatccatccacccattccattttcgctctcctcttccgtcacacctccctcctcctcgtccccccctcctgcggcgcacttatatatataccaccacgtcgatgcgccactcagctggcatcgccatcgacggcgtgccgccatagacggcctgacacccccccgctcccgcccccgccctattcatcccttcatcatcccaatttccacaaacctcgcgcgcggcggagggagaaggaaggatggcgtcggagccggtggcgcgggcggtggcggaggaggtggcgcgctggggcgcgatgcgccagaccggggtcagcctgcgctacatgatggagttcggggcgcgccccacggagcggaccctccttctcgccgcgcagttcctgcacaaggagctccccatccgcatcgcgcgacgggcgctcgacctcgactcgctccccttcggcctctccaccaagcccgccatcctcaaggtgaaagattggtatgtggagtcattccgtgaaatccggtcctttccagaggtgaggaaccagaaagatgagctcgccttcacccagatgatcaaaatgatcagggtacgacacaccaatgtggtgcctgcgattgcattgggtgtgcagcagctgaagaaggacttgggcggtccaaaggcgttcccccccggaatccatgagatccatcagtttcttgaccgcttctacatgtcaaggattgggatccggatgctgatagagcctggtgtgatagggcttataaacacaaaaatgtcacccatgacagttgctcgaattgctagtgaagatgcacgtgctatttgcatgcgggagtatggatcatctcctgatgtcgacatatatggtgatccgggttttacatttccatatgttacaccacatctacatctcatgattttcgagctggtgaagaactcccttcgcgcggtacaggaacggtatatggattctgataagcttgcacctccagttcgaatcatagttgctgatggagcagaggatgtaactattaagattagtgatgaaggtggtggaataccaaggagtgggctctcaagaatttttacgtatctctatagtacagcagaaaaccctcctgatctggacggacataatgaaggagtaactatggctggatatggttatgggatccctattagtcgcctttatgctcgatatttcggtggggacttgcagatcatctctatggaaggatatggaactgatgcttacctccacctttcacggctgggagattcggaggaacccttgccgtaatttattcaaaagaaccattcctgtaattaggatattgcttctgtgctggtatgcaagtatagttctgaaggccagccacctgttcagctgttcgtgtccctacttgttgtctttattgttcattcatcatcttaatggattgtgatcgtaattcctaatcgttttatgactgatttgtactgtcattataattgtcgaacctccaaaaaaaaaagttgccgtcgagcatccgaggtatttattagtttgagtgagtaatgggattcaccataacactgtaagcctgttactccaatgcctctaaagcatgtttttttcagtctcagcttgttcgatataatatgaggaatgatctttcactgaaattattcgatgaatattaatgttaaaatggatcgattcaatgcagaatgtgtaattctttgaaccaaatgcctgccaaaagtgtgtcattggttggagggagggtgagaagtgagattgtttttcccagtgcagctgatttcatcctctcgtcgacgtgtcagcttcagaatgcaacatttctggtgtccagttatcgtgcacatagcgtggatttggtcaagtttattcgg

SEQ ID NO: 1841 - DNA, 1840 bp, Zea Mays
atcgcggtggcctacactcgtcgccgcttcactaccgcgctctccccctcttcgtcgttgccgtcgccgcagtccccatccatccgtcgaggcatccatccatccacccattccattttcgctctcctcttccgtcacacctccctcctcctcgtccccccctcctgcggcgcacttatatatataccaccacgtcgatgcgccactcagctggcatcgccatcgacggcgtgccgccatagacggcctgacacccccccgctcccgcccccgccctattcatcccttcatcatcccaatttccacaaacctcgcgcgcggcggagggagaaggaaggatggcgtcggagccggtggcgcgggcggtggcggaggaggtggcgcgctggggcgcgatgcgccagaccggggtcagcctgcgctacatgatggagttcggggcgcgccccacggagcggaccctccttctcgccgcgcagttcctgcacaaggagctccccatccgcatcgcgcgacgggcgctcgacctcgactcgctccccttcggcctctccaccaagcccgccatcctcaaggtgaaagattggtatgtggagtcattccgtgaaatccggtcctttccagaggtgaggaaccagaaagatgagctcgccttcacccagatgatcaaaatgatcagggtacgacacaccaatgtggtgcctgcgattgcattgggtgtgcagcagctgaagaaggacttgggcggtccaaaggcgttcccccccggaatccatgagatccatcagtttcttgaccgcttctacatgtcaaggattgggatccggatgctgatagatatgttacaccacatctacatctcatgattttcgagctggtgaagaactcccttcgcgcggtacaggaacggtatatggattctgataagcttgcacctccagttcgaatcatagttgctgatggagcagaggatgtaactattaagtgatgaaggtggtggaataccaaggagtgggctctcaagaatttttacgtatctctatagtacagcagaaaaccctcctgatctggacggacataatgaaggagtaactatggctggatatggttatgggatccctattagtcgcctttatgctcgatatttcggtggggacttgcagatcatctctatggaaggatatggaactgatgcttacctccacctttcacggctgggagattcggaggaacccttgccgtaatttattcaaaagaaccattcctgtaattaggatattgcttctgtgctggtatgcaagtatagttctgaaggccagccacctgttcagctgttcgtgtccctacttgttgtctttattgttcattcatcatcttaatggattgtgatcgtaattcctaatcgttttatgactgatttgtactgtcattataattgtcgaacctccaaaaaaaaaagttgccgtcgagcatccgaggtatttattagtttgagtgagtaatgggattcaccataacactgtaagcctgttactccaatgcctctaaagcatgtttttttcagtctcagcttgttcgatataatatgaggaatgatctttcactgaaattattcgatgaatattaatgttaaaatggatcgattcaatgcagaatgtgtaattctttgaaccaaatgcctgccaaaagtgtgtcattggttggagggagggtgagaagtgagattgtttttcccagtgcagctgatttcatcctctcgtcgacgtgtcagcttcagaatgcaacatttctggtgtccagttatcgtgcacatagcgtggatttggtcaagtttattcgg

SEQ ID NO: 1842 - DNA, 2990 bp, Zea Mays
gaaacacgcatgcacggagtgaattgtccttcagaaataaacctttaaggatggtttgaaagcccaatttctaaacgaaccaacctaccttttcccgtatgcaaaacccaccgtggatatgggtcgtggggaaatttcacggcttgtttcgaacgtgctctcccggaccagcgctcccccgacccggcctatcagtagggaaaatgctcccccaacacattacctcgcgcaaccttccccacgggcaaagggagacgatgcaagggatgctccaccgtctgcacgtcaccgtccgctccgctgccgcagcctttccttgacacggtcgcgagcgggacacgagatccaatacaaggtcggctctcctgcaagtctgtggcacatggagcgaaccgagcaagtccgcgcctccaccagcgtccaccgctcctccaccaagcaagttcttctcaccctctctactcgtttcctggatgcgaattcaactcacgtcggccaggggtgaaccaagaataaaattagagtgagagcatacttgtaaggatgaacatcaaaataccagagcatggacatctaagttggactgactaggggaccatatggtgaaatctgaactataatacttgcaacagagaagtgagcgagggcctaggccctcactcacatgtatgtaggtccgccccttccaagagatgcacttagagcgaattcaatgtttggacaagttctaaaaggccctaggaacatattggaacacattagaaaagttagaaaggtcagatattcaatatgatgttctaggagctaagtctcagtgacatttagtgaaagggttgagcaggtctaaaatatgaagaactatgactcaatgtggttggatggactaaggataagtttatctaagtcatataagtgctcaagagtatatcgaaacgaagagaacaaaagagaagaaaagaatgtctagaaaggacaagtctagctactttgaggtgcaccgagctggtctggtttggcaccggaccgggcaccaaactaggcacctagagaccttgttttttgggcaacagtgacctggcgcaccagaccagcccgatataactggactcgacacccagagagaatgcttttcagactttggcagctcaggtgcactggactagtctagtgtgcactagaccaacaatgtttccaatggttgaaaaggcttggtacaatagtccgctgacgtggctaaataatgtgtggtctggtgtggcaccggactggtcaggagcacactgataactttcgcacaatgactacaaacaagacagagtgttagaggttcggtgagcactggacttgctacaatgagaggtatgatgcatacattttaaaaacagatttgggagttgtgttccaacatctatgtgagggtttggtgttatatatatgatccaactagtgtgttacacatccaagagtcgagcaaacaagtctatacacaagagcaacacatccaagtgactaaagagtcccgagtgccacaaatttagtagagggctagtcttagccattctttatgagaaattgaactagtgcacttaagtaagttaagttgtggagttgtgttgcgatctttgagcttggagctaagactcccactaagattgtagaagcgtgcaagagtctccaagtgtgtggagagacttgcggagtcacgaactcattgagtaagggaaagaggactcatgtttgatctttgtgatcacttgagtgaggaaagggttgagagacccaatccttaggggactcctcaatgaagatgtaggtttctttgtgaaaccaaactccagtaacaaattgtcgtgtctctctgatagttgcctaaaggggaggtgaataggaactcctgaatatttcacaaattcaaaacaaacttgatcctaattagatgttagcacaacatatagatcaaatcaaagtgaggaagaatgaagttcttgcagttgttttctctcttgattgtggattagagaatagagcagaatcacaagtgaagaataagcaataacttagagaggggagaagggaagaattacaaaagataaagcacacaattcatagacaatttttcccgtagttcgaccaagcctcaaatgatagcctacatccacgttgtggtgtccaaaaggacgagggttgcacccaacccttctccagtgatccaaagatcaatttgaggccacaaattccacttataatattctcctcacaaggatctacatagatcaaagtctcttgctatttgtacacaggttgatgggagttacaatctccaaaaaagcaagagggaggaataaacacatacaagagcatagtaacaacactaagagatcgaagaatgcaagcacaaaactgaaacaaagccctctctcgcgaatacgagcacttggatcacttggtgtgcttctctaatgcgcaggagtgagtatgctagctcttgagttcgttgttgtattgagggggatagtttgggggttctatttatagcccctgttgggggccttcggcttccgaaggtcctcaaaaacatgatttaacaatgcctctggagtataatgtgtggacagggatcttcgaacaagaacccacggtatgaagaagcacgaaaacaatacgaaggatgaaacagagccgaagttatgcgcaaggagcttcggcatgatgacagaaaagaggaaactgacttaagaggaaaagactatctagacctagatagattactatagagttattgtcaaaagcaaagggcctggatgtattttgcatgggctgcgacctgtgcctataaataggtgaacaatattcccgtactgttcacgctgacttggcattcactttcgcgtcacgcttgtacccttgctttccttcgagccgaaggtacatttataatttgttatttttgatacagtaacgcaaataaaaataagttgataataatgttt

SEQ ID NO: 1843 - DNA, 2766 bp, Zea Mays
gctcccccgacccggcctatcagtagggaaaatgctcccccaacacattacctcgcgcaaccttccccacgggcaaagggagacgatgcaagggatgctccaccgtctgcacgtcaccgtccgctccgctgccgcagcctttccttgacacggtcgcgagcgggacacgaggtattgaaccattgccaccttccctggcttgccgtccttcatcgttgtccccgttcagtttgctatccttcactgtcgtcttccatgacacgatatccaatacaaggtcggctctcctgcaagtctgtggcacatggagcgaaccgagcaagtccgcgcctccaccagcgtccaccgctcctccaccaagcaagttcttctcaccctctctactcgtttcctggatgcgaattcaactcacgtcggccaggggtgaaccaagaataaaattagagtgagagcatacttgtaaggatgaacatcaaaataccagagcatggacatctaagttggactgactaggggaccatatggtgaaatctgaactataatacttgcaacagagaagtgagcgagggcctaggccctcactcacatgtatgtaggtccgccccttccaagagatgcacttagagcgaattcaatgtttggacaagttctaaaaggccctaggaacatattggaacacattagaaaagttagaaaggtcagatattcaatatgatgttctaggagctaagtctcagtgacatttagtgaaagggttgagcaggtctaaaatatgaagaactatgactcaatgtggttggatggactaaggataagtttatctaagtcatataagtgctcaagagtatatcgaaacgaagagaacaaaagagaagaaaagaatgtctagaaaggacaagtctagctactttgaggtgcaccgagctggtctggtttggcaccggaccgggcaccaaactaggcacctagagaccttgttttttgggcaacagtgacctggcgcaccagaccagcccgatataactggactcgacacccagagagaatgcttttcagactttggcagctcaggtgcactggactagtctagtgtgcactagaccaacaatgtttccaatggttgaaaaggcttggtacaatagtccgctgacgtggctaaataatgtgtggtctggtgtggcaccggactggtcaggagcacactgataactttcgcacaatgactacaaacaagacagagtgttagaggttcggtgagcactggacttgctacaatgagaggtatgatgcatacattttaaaaacagatttgggagttgtgttccaacatctatgtgagggtttggtgttatatatatgatccaactagtgtgttacacatccaagagtcgagcaaacaagtctatacacaagagcaacacatccaagtgactaaagagtcccgagtgccacaaatttagtagagggctagtcttagccattctttatgagaaattgaactagtgcacttaagtaagttaagttgtggagttgtgttgcgatctttgagcttggagctaagactcccactaagattgtagaagcgtgcaagagtctccaagtgtgtggagagacttgcggagtcacgaactcattgagtaagggaaagaggactcatgtttgatctttgtgatcacttgagtgaggaaagggttgagagacccaatccttaggggactcctcaatgaagatgtaggtttctttgtgaaaccaaactccagtaacaaattgtcgtgtctctctgatagttgcctaaaggggaggtgaataggaactcctgaatatttcacaaattcaaaacaaacttgatcctaattagatgttagcacaacatatagatcaaatcaaagtgaggaagaatgaagttcttgcagttgttttctctcttgattgtggattagagaatagagcagaatcacaagtgaagaataagcaataacttagagaggggagaagggaagaattacaaaagataaagcacacaattcatagacaatttttcccgtagttcgaccaagcctcaaatgatagcctacatccacgttgtggtgtccaaaaggacgagggttgcacccaacccttctccagtgatccaaagatcaatttgaggccacaaattccacttataatattctcctcacaaggatctacatagatcaaagtctcttgctatttgtacacaggttgatgggagttacaatctccaaaaaagcaagagggaggaataaacacatacaagagcatagtaacaacactaagagatcgaagaatgcaagcacaaaactgaaacaaagccctctctcgcgaatacgagcacttggatcacttggtgtgcttctctaatgcgcaggaggatcttcgaacaagaacccacggtatgaagaagcacgaaaacaatacgaaggatgaaacagagccgaagttatgcgcaaggagcttcggcatgatgacagaaaagaggaaactgacttaagaggaaaagactatctagacctagatagattactatagagttattgtcaaaagcaaagggcctggatgtattttgcatgggctgcgacctgtgcctataaataggtgaacaatattcccgtactgttcacgctgacttggcattcactttcgcgtcacgcttgtacccttgctttccttcgagccgaaggtacatttataatttgttatttttgatacagtaacgcaaataaaaataagttgataataatgttt

SEQ ID NO: 1844 - DNA, 842 bp, Zea Mays
ttccttgacacggtcgcgagcgggacacgagatcttcttcgattcttgatctccaagatccaatacaaggtcggctctcctgcaagtctgtggcacatggagcgaaccgagcaagtccgcgcctccaccagcgtccaccgctcctccaccaagttgatgggagttacaatctccaaaaaagcaagagggaggaataaacacatacaagagcatagtaacaacactaagagatcgaagaatgcaagcacaaaactgaaacaaagccctctctcgcgaatacgagcacttggatcacttggtgtgcttctctaatgcgcaggagtgagtatgctagctcttgagttcgttgttgtattgagggggatagtttgggggttctatttatagcccctgttgggggccttcggcttccgaaggtcctcaaaaacatgatttaacaatgcctctggagtataatgtgtggacagggatcttcgaacaagaacccacggtatgaagaagcacgaaaacaatacgaaggatgaaacagagccgaagttatgcgcaaggagcttcggcatgatgacagaaaagaggaaactgacttaagaggaaaagactatctagacctagatagattactatagagttattgtcaaaagcaaagggcctggatgtattttgcatgggctgcgacctgtgcctataaataggtgaacaatattcccgtactgttcacgctgacttggcattcactttcgcgtcacgcttgtacccttgctttccttcgagccgaaggtacatttataatttgttatttttgatacagtaacgcaaataaaaataagttgataataatgttt

SEQ ID NO: 1845 - DNA, 870 bp, Zea Mays
gaggtattgaaccattgccaccttccctggcttgccgtccttcatcgttgtccccgttcagtttgctatccttcactgtcgtcttccatgacacgatgtcggctctcctgcaagtctgtggcacatggagcgaaccgagcaagtccgcgcctccaccagcgtccaccgctcctccaccaagttgatgggagttacaatctccaaaaaagcaagagggaggaataaacacatacaagagcatagtaacaacactaagagatcgaagaatgcaagcacaaaactgaaacaaagccctctctcgcgaatacgagcacttggatcacttggtgtgcttctctaatgcgcaggagtgagtatgctagctcttgagttcgttgttgtattgagggggatagtttgggggttctatttatagcccctgttgggggccttcggcttccgaaggtcctcaaaaacatgatttaacaatgcctctggagtataatgtgtggacagggatcttcgaacaagaacccacggtatgaagaagcacgaaaacaatacgaaggatgaaacagagccgaagttatgcgcaaggagcttcggcatgatgacagaaaagaggaaactgacttaagaggaaaagactatctagacctagatagattactatagagttattgtcaaaagcaaagggcctggatgtattttgcatgggctgcgacctgtgcctataaataggtgaacaatattcccgtactgttcacgctgacttggcattcactttcgcgtcacgcttgtacccttgctttccttcgagccgaaggtacatttataatttgttatttttgatacagtaacgcaaataaaaataagttgataataatgttt

SEQ ID NO: 1846 - DNA, 1803 bp, Zea Mays
gaggtattgaaccattgccaccttccctggcttgccgtccttcatcgttgtccccgttcagtttgctatccttcactgtcgtcttccatgacacgatatccaatacaaggtcggctctcctgcaagtctgtggcacatggagcgaaccgagcaagtccgcgcctccaccagcgtccaccgctcctccaccaagcaagttcttctcaccctctctactcgtttcctggatgcgaattcaactcacgtcggccaggggtgaaccaagaataaaattagagtgagagcatacttgtaaggatgaacatcaaaataccagagcatggacatctaagttggactgactaggggaccatatggtgaaatctgaactataatacttgcaacagagaagtgagcgagggcctaggccctcactcacatgtatgtaggtccgccccttccaagagatgcacttagagcgaattcaatgtttggacaagttctaaaaggccctaggaacatattggaacacattagaaaagttagaaaggtcagatattcaatatgatgttctaggagctaagtctcagtgacatttagtgaaagggttgagcaggtctaaaatatgaagaactatgactcaatgtggttggatggactaaggataagtttatctaagtcatataagtgctcaagagtatatcgaaacgaagagaacaaaagagaagaaaagaatgtctagaaaggacaagtctagctactttgaggtgcaccgagctggtctggtttggcaccggaccgggcaccaaactaggcacctagagaccttgttttttgggcaacagtgacctggcgcaccagaccagcccgatataactggactcgacacccagagagaatgcttttcagactttggcagctcaggtgcactggactagtctagtgtgcactagaccaacaatgtttccaatggttgaaaaggcttggtacaatagtccgctgacgtggctaaataatgtgtggtctggtgtggcaccggactggtcaggagcacactgataactttcgcacaatgactacaaacaagacagagtgttagaggttcggtgagcactggacttgctacaatgagaggttgatgggagttacaatctccaaaaaagcaagagggaggaataaacacatacaagagcatagtaacaacactaagagatcgaagaatgcaagcacaaaactgaaacaaagccctctctcgcgaatacgagcacttggatcacttggtgtgcttctctaatgcgcaggagtgagtatgctagctcttgagttcgttgttgtattgagggggatagtttgggggttctatttatagcccctgttgggggccttcggcttccgaaggtcctcaaaaacatgatttaacaatgcctctggagtataatgtgtggacagggatcttcgaacaagaacccacggtatgaagaagcacgaaaacaatacgaaggatgaaacagagccgaagttatgcgcaaggagcttcggcatgatgacagaaaagaggaaactgacttaagaggaaaagactatctagacctagatagattactatagagttattgtcaaaagcaaagggcctggatgtattttgcatgggctgcgacctgtgcctataaataggtgaacaatattcccgtactgttcacgctgacttggcattcactttcgcgtcacgcttgtacccttgctttccttcgagccgaaggtacatttataatttgttatttttgatacagtaacgcaaataaaaataagttgataataatgttt

SEQ ID NO: 1847 - DNA, 868 bp, Zea Mays
ttgccaccttccctggcttgccgtccttcatcgttgtccccgttcagtttgctatccttcactgtcgtcttccatgacacgatatccaatacaaggtcggctctcctgcaagtctgtggcacatggagcgaaccgagcaagtccgcgcctccaccagcgtccaccgctcctccaccaagttgatgggagttacaatctccaaaaaagcaagagggaggaataaacacatacaagagcatagtaacaacactaagagatcgaagaatgcaagcacaaaactgaaacaaagccctctctcgcgaatacgagcacttggatcacttggtgtgcttctctaatgcgcaggagtgagtatgctagctcttgagttcgttgttgtattgagggggatagtttgggggttctatttatagcccctgttgggggccttcggcttccgaaggtcctcaaaaacatgatttaacaatgcctctggagtataatgtgtggacagggatcttcgaacaagaacccacggtatgaagaagcacgaaaacaatacgaaggatgaaacagagccgaagttatgcgcaaggagcttcggcatgatgacagaaaagaggaaactgacttaagaggaaaagactatctagacctagatagattactatagagttattgtcaaaagcaaagggcctggatgtattttgcatgggctgcgacctgtgcctataaataggtgaacaatattcccgtactgttcacgctgacttggcattcactttcgcgtcacgcttgtacccttgctttccttcgagccgaaggtacatttataatttgttatttttgatacagtaacgcaaataaaaataagttgataataatgttt

SEQ ID NO: 1848 - DNA, 2366 bp, Zea Mays
gccttatttgtctcgtgttgatcattgtgatgaccaccacctcaactggacatggcggtatggcaccgacgctgccaacaagccatgcatgctatacatcattttctttctttttttcatttttagggaggaactatatagcatattattatgaatacaaagcatgacactccacccacatggtagccgcacggcatggtactgtgtgtggcaataaaaaggacctctgatcaagcctcatttcgcatcggcggacatggtggtggccgtgcagctggccgctcttctcgcgctgctgctcgcgctgtggcgcctggtgtggcggccgcacgccgtggcgcggtcgttcgccaggcagggcatccggggcccgccctacacgttcctggcagggtccttgccggaggcgaagcggctgctgatggccggccggagagggacggcgcccctggacgccggctgccacgacatcatgcccgtcctcttgccgcagtttcacagatgggtcgcggactatggtaaacttggtgaccaccggtggtgctgattctccattttttttttcccgtttcttctctactagaagaaattgtcaagaaacatgtagtaggcgcctgtctacagttgttggaaatgcatggttggccgtgagtgactcgtcatgaaccagtgccgacaagacattatcttcaagattttgattaaacggaacctcaaatatacatatatattgttgggcattcgtgcagggagaacgttgctgttctggatcgggccgattcccgctgtcttgtctactgatctacagctgattaagcaggttctgacagacaggacgggcctgtatcagaaggacttcatgatccccgtgctcaagttcctcttcggcaacggtgtcatattgataaacggagacgattggaagcggcaccgcaaagtggtcctccctgcgttcaaccatgagacgatcaagagcatgtcggcggtgacggcagaggtaacggagcagatgatgcagcaatggcgcggccagatacacggaagcgaagaggaatccgccgagatagacatgatccacgccttcaacgacctgacctccaaggtcaatggccgcgtcgccttcggcacgagccaccgggaagtcgaggaggtcattgtactgatgcgggagatgcagaagctcgccactgcggccacgctcgatgctccaatactctggtatctgccaactcggcgtaacctgcacgtccggcgtctgaacaaacagctgagaagcaagatcatgtccatcatgcaggcgcggctggccgccgacggagctgataggcgtggtgggcgcggcggcgccgtttccggcggaggcgacctacttgggctgttgctagaggcgtggacgccgcagccgcagcacgggaacggcggcgagacgctgacaaccgacgaggtgatcgacgagtgcaagaccttcttcgccgcggggcaggaaaccacagctacgctcctggtctgggccatgttcctgctcgccgtgcacccggaatggcaggacaaagtcagggaggaggtcgtcagggaattctgcaccagcgacgacggcgaggttccccatgccgatgtcctcgccaagctcaagctgctatacatggtgttgctggagacgtcgcggctctacccgccgatcgtgtacatacagcggagggctgcctgggacgccgtccttggaggcatcaaggtgccccagggcaccgtcatctccatccccattgccatgctgcaccgggacaagcaggtctggggccccgacgccgatgagttcaacccgatgaggttcgagcatggcctcacaaaggccgccaaggatcccaaggcgctgctgtctttctccctgggcccaagagtgtgcactggccagagcttcggcatcgtagaagtgcaggtcgtcatggcgatgatcctcaggaggttctccttctccctctccccaaagtatgttcacaagcccaagtatctcctgtccttgacacccaagcttgggatgcctctcatcgtcaggaatgtggatggctgagagggataatattgtaaaagctcgttttgtgtgtgaaaatgaatacatgactagtgtgtgacaaatggtactctctttgtgttactactgctgtaacaagcccgacagaagaaccatccaatgcaggcccacgaaggggatccagtctgcgccggcctagtactcggcttagggagtttgtgtgagttgtaattgagatataagggaatattgattagggaaaagacatcagacttgtaataagaattctggacagactgtcgctctgcctatctactctgccatctactcttcttcc

SEQ ID NO: 1849 - DNA, 4741 bp, Zea Mays
atgaattttatagagatctgcctagttttaagaaaagaaaaaaaacgaagaaaacagaggggggtacatccaaaagtggcgaggagagagggagacgaaacaaacgagaacaagcaaggtaggcaagaaccaaaacaggcgaggcggcgagggaccagcgtgcaaagcgaaggcgaccaagcaggcaagcctccctgccgaccagcgactggcgtgctgcgtgccggacagacggaggaggaggaaagccgaaagcaccaactccccctctcgagtctcgtctcctccactccactgcactcggcgctccactccacttcctccctcggtcgcttacgcagcttccaacgattccattcccagctccctcctcatcctttccgttcctcccatcccccacccaacccgtttcaaatcgcaccaaaacccccctcgaagacctggagcgaggcctgccccttccgcgctcgcccctgccaggtgtagatcccccattcctgtcgctcgctcgccgccggccggattcctgatccgacgggaggtcttgtgcggaggcgggaggcgctgttgcgtgcctgcctgatcggttcctgcttcctgcgagttggtggtggtgcggcggcggcggcgggttctggcatggggttgcgctgccggggcatttcctcgaccaggcggtgggcggcggcctaagatgcgagggcggctggcccggggagtggggcaccaggtcggggatagcttctcgccgtgcgccagcctccgcctgctcatgctgccggccgcccggggccctcggcgacgggcattggggcgcgctctccccgcgaggtgctgacgctgacgcgcgcgcggcgctactagccgccagccgcccgccatgggcaacagcacgtcccgggtcgtcggctgcttcgcgccgcccgacaaggccggcggcatcgacctcgacttcctcgagccgctcgacgaagggctcggccactccttctgctacgtccgcccgggcgccgtcgccgactcgcccgcgatcacgccctccaactccgagcgctacacgctcgactccagcgtcatggactcggagacccgcagcgggtccttccgccaggagcccgccgacgacctggccgccgccgcagccgccggcctgcagcggccctgcaggagcttcggcgagaccaccttccggaccatctcgggggcctccgtcagcgcgaacgcgtcctccgccaggacgggcaccctcaccgtctcccttatacgtgacgtgcaggagcccgccgccgcgttcgagagcaccgcctccttcgccgccgtgcccttgcagccggtgccgcgggggtcgggcccgctcaacaccttcttgtcggggccgctggagagagggttcgcctccggcccgctggacaaaggctccggcttcatgtctgggccattggacaagggagccttcatgtcaggccccatcgatgctggcagcagaagcaacttctcagcacctctttcctatggacggaggaagcctcgtctgaggcttcttgtacataggattagtagacccatgaaaaccgcactgtccagaacattcagcaggagctcacaaaatccaggctgggttcaaaagtttctgtcgcatcctatgtctcaactgccctgggcaagggacgcaaagtccagatcagaaggttcacaggatggattggaatctgggatacccgagcctgagtataacgtgacaaggaaccttcagtgggcacatggaaaggcaggggaagatagggttcatgttgttctatccgaagagcaaggatggttgttcattggaatttatgatggatttagtggccctgatgtgcctgactttttaatgagcaatctatacaaggccattgatagagaactggaaggattgctctgggtttatgaagacagctctgaaaggagtgatcatgtatcgactcatgaagagggtggattggttgctgcttctgtggatgctcctcatgatgatagtggccagtgccagagtgacagtgggagacaagaacttggtaattttggaaaacaaaatgtatcacctggaaagggttgtgatgatagtgccttgcaatttcagccaaactgtaccagcagtgaagagaaagatttggctccacatggttcaagtagtgagatgttgggcagggatgagatagttgaggaaatggttgaagctgatctgggaaatgatctccaaagtagagaaccccacagctcgaacagagatctttcaggtacagatctaaacaccagctgcagatgtgcaacagaaaccagttcctattgtgatcagcatgccaaattcttgaaaggaaacagaaaaagcaagcgtctctttgagcttcttcagatggaactgctgcaagattataacacaaggttatctaaggagccaccagaggaaagtaaaataccaaacttgcatgttacacaggcagacactgcagaagcgcgctcaagaaacacagctgaggtctccaggtgttcattggcagcaactggagaatgttttgatgattctgaaggtcttggaagttcaagacacgctgatagtgtacttggcataggtattaaagagtgtacagggtgttctatatctacatcttcatcagggcacaagcaagttacgagaagaattttaatcggatcaaagttgaggaagatgtacaaaaagcaaaaaatgttgcagaagaagtttttcccatggaactatgattggcacagagatcaacctcatgttgatgaaagtgttataaaatcttcagaagtcactaggagatgtaagtcgggaccagtagaacatgatgctgtattgagggcaatgtcacgggcacttgaaataacagaggaagcgtacatgaaaattgtggaaaaggagcttgatagatacccagagcttgcattaatgggttcgtgtgtccttgtaatgttaatgaaggaccaggatgtatatgtcatgaatcttggcgacagccgagctatcttggcacaggacaatgatcactttgatcagtacgatagctcaagtttctcaaaaggagatttacaacatcgaaataggtcaagggagtcacttgtccgtgtggagcttgataggatatcggaagagtcgccgatgcataatcctaacagtcacctaaacagcaacgcaaaagctaaggaactgtcaatatgtagactaaaaatgagagcggttcaattgtcaactgaccatagcacgagtattgaggaggaagtcttgaggattaaagtagaacatcctgatgatccacaagctgtctttaatggtagagtgaagggacagctgaaggttacaagagcttttggtgctggttttctaaagaagatggattgtatcaatatttcagcaatgatgaggtagtttcgcatgtgctttggttcatggaaaatgtaccagagggagacccagcgcaataccttgtagctgaacttctttgtcgggcagccaagaagaatggaatgaattttcacgagctactggatatcccccagggcgatcgtcggaaataccatgacgatgtttctgttatggtagtctcgcttgaaggaagaatctggcgatcttctggatgagtgtttgaaacatgacctggtctgttccttgcagccttacttagtggtagtaaatctcaatcaggaaaggcaccaatgtcttgctctgtcttaatttttcaaccatgtttcaaattctggcagtccatgtgccttttcttgtcttctgcgttttgaacttgcgctgcattcttgggcggtctgaattgacgtatacagttttttcacttttgatattagggaaaaaaggggttcttttgagggcagatgtcttttcctggcgttctctttagtgctagtttggcaactccatttttcaagggatttttatttttcctaaactaattttccttgacaaaataaaaatcccttgggaaaatgggggtttcaaactagccctaaaatctatttttgtgttgtggggttaatatttattctgtttgctatatttttgtcgctgtcgaaaaggaccgttctttttccaagacattcggggtgttgcggatcgatgctgagcaaacatgcattatacagttgctgcttatgtaaattattttttgtcgcataggggttggaagtcgcatcaaagagcaatcttattgtcctgctttgtcattgcgcccagtagtggttgatcctttttgacgcaggcacagtgagtagctggtttgctgttcgtcgtagtttgtcggctcaccactcctaagattcagcttaccagaccatgatctacctcctgttctcgttgtggacctgctagttacagccaagaggttcagcaggaacaaaagattcccgaggaatttagtggttatcagcccacgacgaatcaacctcaactgagacggtgacagtattgtgatgctgaatttagaatgaccgaactttgacccccggcatttttttgttttgtttttgtcgtcttctttctctagagcctttcactgctgggatatgcctgagggatgctatgttatttgcattcagggtagaaaaattctggtacggtaccgtcgtagttgtctatttgggggtaggcacgttcgatctataggtgcagcgtaagtacatagaatgtgaaatgagaggatttttgagacgtcgagctttatttactaaaagggag

SEQ ID NO: 1850 - DNA, 4135 bp, Zea Mays
ccaaaacaggcgaggcggcgagggaccagcgtgcaaagcgaaggcgaccaagcaggcaagcctccctgccgaccagcgactggcgtgctgcgtgccggacagacggaggaggaggaaagccgaaagcaccaactccccctctcgagtctcgtctcctccactccactgcactcggcgctccactccacttcctccctcggtcgcttacgcagcttccaacgattccattcccagctccctcctcatcctttccgttcctcccatcccccacccaacccgtttcaaatcgcaccaaaacccccctcgaagacctggagcgaggcctgccccttccgcgctcgcccctgccaggtgtagatcccccattcctgtcgctcgctcgccgccggccggattcctgatccgacgggaggtcttgtgcggaggcgggaggcgctgttgcgtgcctgcctgatcggttcctgcttcctgcgagttggtggtggtgcggcggcggcggcgggttctggcatggggttgcgctgccggggcatttcctcgaccaggcggtgggcggcggcctaagatgcgagggcggctggcccggggagtggggcaccaggtcggggatagcttctcgccgtgcgccagcctccgcctgctcatgctgccggccgcccggggccctcggcgacgggcattggggcgcgctctccccgcgaggtgctgacgctgacgcgcgcgcggcgctactagccgccagccgcccgccatgggcaacagcacgtcccgggtcgtcggctgcttcgcgccgcccgacaaggccggcggcatcgacctcgacttcctcgagccgctcgacgaagggctcggccactccttctgctacgtccgcccgggcgccgtcgccgactcgcccgcgatcacgccctccaactccgagcgctacacgctcgactccagcgtcatggactcggagacccgcagcgggtccttccgccaggagcccgccgacgacctggccgccgccgcagccgccggcctgcagcggccctgcaggagcttcggcgagaccaccttccggaccatctcgggggcctccgtcagcgcgaacgcgtcctccgccaggacgggcaccctcaccgtctcccttatacgtgacgtgcaggagcccgccgccgcgttcgagagcaccgcctccttcgccgccgtgcccttgcagccggtgccgcgggggtcgggcccgctcaacaccttcttgtcggggccgctggagagagggttcgcctccggcccgctggacaaaggctccggcttcatgtctgggccattggacaagggagccttcatgtcaggccccatcgatgctggcagcagaagcaacttctcagcacctctttcctatggacggaggaagcctcgtctgaggcttcttgtacataggattagtagacccatgaaaaccgcactgtccagaacattcagcaggagctcacaaaatccaggctgggttcaaaagtttctgtcgcatcctatgtctcaactgccctgggcaagggacgcaaagtccagatcagaaggttcacaggatggattggaatctgggatacccgagcctgagtataacgtgacaaggaaccttcagtgggcacatggaaaggcaggggaagatagggttcatgttgttctatccgaagagcaaggatggttgttcattggaatttatgatggatttagtggccctgatgtgcctgactttttaatgagcaatctatacaaggccattgatagagaactggaaggattgctctgggtttatgaagacagctctgaaaggagtgatcatgtatcgactcatgaagagggtggattggttgctgcttctgtggatgctcctcatgatgatagtggccagtgccagagtgacagtgggagacaagaacttggtaattttggaaaacaaaatgtatcacctggaaagggttgtgatgatagtgccttgcaatttcagccaaactgtaccagcagtgaagagaaagatttggctccacatggttcaagtagtgagatgttgggcagggatgagatagttgaggaaatggttgaagctgatctgggaaatgatctccaaagtagagaaccccacagctcgaacagagatctttcaggtacagatctaaacaccagctgcagatgtgcaacagaaaccagttcctattgtgatcagcatgccaaattcttgaaaggaaacagaaaaagcaagcgtctctttgagcttcttcagatggaactgctgcaagattataacacaaggttatctaaggagccaccagaggaaagtaaaataccaaacttgcatgttacacaggcagacactgcagaagcgcgctcaagaaacacagctgaggtctccaggtgttcattggcagcaactggagaatgttttgatgattctgaaggtcttggaagttcaagacacgctgatagtgtacttggcataggtattaaagagtgtacagggtgttctatatctacatcttcatcagggcacaagcaagttacgagaagaattttaatcggatcaaagttgaggaagatgtacaaaaagcaaaaaatgttgcagaagaagtttttcccatggaactatgattggcacagagatcaacctcatgttgatgaaagtgttataaaatcttcagaagtcactaggagatgtaagtcgggaccagtagaacatgatgctgtattgagggcaatgtcacgggcacttgaaataacagaggaagcgtacatgaaaattgtggaaaaggagcttgatagatacccagagcttgcattaatgggttcgtgtgtccttgtaatgttaatgaaggaccaggatgtatatgtcatgaatcttggcgacagccgagctatcttggcacaggacaatgatcactttgatcagtacgatagctcaagtttctcaaaaggagatttacaacatcgaaataggtcaagggagtcacttgtccgtgtggagcttgataggatatcggaagagtcgccgatgcataatcctaacagtcacctaaacagcaacgcaaaagctaaggaactgtcaatatgtagactaaaaatgagagcggttcaattgtcaactgaccatagcacgagtattgaggaggaagtcttgaggattaaagtagaacatcctgatgatccacaagctgtctttaatggtagagtgaagggacagctgaaggttacaagagcttttggtgctggttttctaaagaagccaaaatttaacgaggcactacttgagatgttccgcatcgactatgttggaacatcaccatatatcagctgcaatcctgctgtacttcaccaccgtctctgcgcaaatgataggtttcttgtgctgtcttcagatggattgtatcaatatttcagcaatgatgaggtagtttcgcatgtgctttggttcatggaaaatgtaccagagggagacccagcgcaataccttgtagctgaacttctttgtcgggcagccaagaagaatggaatgaattttcacgagctactggatatcccccagggcgatcgtcggaaataccatgacgatgtttctgttatggtagtctcgcttgaaggaagaatctggcgatcttctggatgagtgtttgaaacatgacctggcacagtgagtagctggtttgctgttcgtcgtagtttgtcggctcaccactcctaagattcagcttaccagaccatgatctacctcctgttctcgttgtggacctgctagttacagccaagaggttcagcaggaacaaaagattcccgaggaatttagtggttatcagcccacgacgaatcaacctcaactgagacggtgacagtattgtgatgctgaatttagaatgaccgaactttgacccccggcatttttttgttttgtttttgtcgtcttctttctctagagcctttcactgctgggatatgcctgagggatgctatgttatttgcattcagggtagaaaaattctggtacggtaccgtcgtagttgtctatttgggggtaggcacgttcgatctataggtgcagcgtaagtacatagaatgtgaaatgagaggatttttgagacgtcgagctttatttactaaaagggag

SEQ ID NO: 1851 - DNA, 1844 bp, Zea Mays
aaatcttcttgtgctcctcttttccaactctccgcgccgatctccaaatcccaaaaccctgacccatccacctcctcttccgccgccaccagcccagtagcccaccatcaccgccgacatgggaggaggaggcggcggccgcaaggcccgcaacttcgcgaccttccgcctctttccgcgcgccggcgctgccgatcccaacgaccgcgtctttgtccgcgtcgacaacaacgactacaccgttcccgggttcgccgatgaggactccttcgacccctccttcggcgatggcaacttccactctgcctccggccccctcccagaacacgtccgccgcgagatcctcgagcttggcctccccgacgacggttacaactacctctcccacctccgcgagctccgtcccgccgccgtcgccgcctcatccttcgtccccagctccactgcgcgccccgagcctgtcccgctcgatgtcaaggcttatgatgcaagtagggtacgggttggtcccagcgagggtgaactggacgaggggaagacgatgtgtaaggtggctgccaagactgcaccagtgaggcgaattgagaaggctgtcgacccagatgtcgccaggttgctcgatgagagcgatgtgtctcatgttgggtctgaggatgagggcctggaggaagattttgtcatcatagctaaccaggctgagggggaggaattcgaggaagatgacatagaagggatggaagagtggaatggtgttttgagtgatgtggaagaggaggagttcgattttgacgaggatgagccaaagccaagagtgagacgattgctggatgaacaatttgatctacttgctttggaagagtatggagacagtgatgatgatggcggggttgttaaaggtggggaatatgaactgccaagcgaggctttagatgaactgaaattgttccaaaatcagaatgtatctgttgacgaagaatatagaacaccagcagattttgttcgtcaaaaactggactcaagcgcggcagacgaggtggatgaatctgcttgtgtgataaaaaaatgttctgaatacgctgaaagatatttcaatgaaactgcagaagatgtggtagtacttgtgtcggaaagcagtgatgaatctgaagtttgggactgtgagaccattgtttccacattctctaaccttgataatcatcctgggaaaattgaaactccaggaatccacagaaagcggctccctagagttttccctggagaaacaactacgacaaatgacatcatcaagcttcatgggaaagagaaactgccagtagaatacctgccacagaggagaagaaatggtgaaaaggagaagaaagtaaagcccgtagaagcttctgtcactgataaatttaaaaaaggagctgagaaggaaacaaaagaggacaagaaggcaagaaaggcagcagtgaaagaagaaaagagagaagcccggaaagcaaagaaagagctcaaaggcctgtataaatcagaaacacagaaggctcagaaagttgctgctgttactggaccatcgtccatacgattaatgtgatggttgtccgccaggacaaatgcatcaaagctacgaaagattcatgataccagttcatctttgtgccatgctcgtggattttgtggacaagatacccaatgcatagttcttgcctttgagttatataatcttgttgcaaaatatagagttcttgcgtcttctcttctgaaacacgacgtttgctatgctattcaaaaacagaggcattgtagcactgctatgtattaattcagttaatcgaaggagaagataagaagtttatacgcac

SEQ ID NO: 1852 - DNA, 1049 bp, Zea Mays
atgcccaggatcagaagcggcgacctcgctcttgccgctcaagcacgaaagaagccccgtcgagccggaggccgcgtgtcgtgttccggccctcgacgccgtgctcgaccgcaatacgaccttcctcttccttcgccgagtgtgatcgttcctggcttccctcctgcatccgcatcggatccccatgccgaggctggaaagctgtacgaccttcgcactccgctacgcgcaagtggcggcctcgctcctgccgctcaagcacgaaagaagcccatcgagccaaaggccgtgcgatgtgttccagccctcgacgccgtgctcgaccatgatacgcccttccgcttccttcgccaagtgtgctcgttcctggcttccttcgccagagtaatatctgagtcagcaacttgacttcatttgaatcatgcggcttcttaggtttcagtctgactaaatatctaagtttgcagccgcaccttttgtttcatgtcttctttgggggtggccgggtggagtgggttggagctgcaaagtccctgatttttaatgcattttgtcagagtagccacatgtgtgatggcttttggccttttgccttgcgcctagaacaataacaatgactaatagaatcagcggggcaacatccgatatattatctaattatcgtggctggtgctgaggcagttgcgttgtgtggtgggtctcaaatcccaattaggctaggaagattagattctagtttcctcaagatagcttctggacttactgaacaaacttgcaatagcactcaagtatcttcctcctgcactgaataagacaacactccctttgatgctgttgaggaacacccacatgggaggtcaacggtaattgtaattgtagccctaggtgtcaatggaacaccatcgccaaaattcattgcaagtccactgaaggtcctctgaaccaaagagacgcttgatgggctaaatgaaagatccaggcatcattttctttgatggagtcaaaacctaaggagggcgtccacaccctatgcccccgcctcgtgttcc

SEQ ID NO: 1853 - DNA, 1631 bp, Zea Mays
atgcccaggatcagaagcggcgacctcgctcttgccgctcaagcacgaaagaagccccgtcgagccggaggccgcgtgtcgtgttccggccctcgacgccgtgctcgaccgcaatacgaccttcctcttccttcgccgagtgtgatcgttcctggcttccctcctgcatccgcatcggatccccatgccgaggctggaaagctgtacgaccttcgcactccgctacgcgcaagtggcggcctcgctcctgccgctcaagcacgaaagaagcccatcgagccaaaggccgtgcgatgtgttccagccctcgacgccgtgctcgaccatgatacgcccttccgcttccttcgccaagtgtgctcgttcctggcttccttcgccagagtaatatctgagtcagcaacttgacttcatttgaatcatgcggcttcttaggtttcagtctgactaaatatctaagtttgcagccgcaccttttgtttcatgtcttctttgggggtggccgggtggagtgggttggagctgcaaagtccctgatttttaatgcattttgtcagagtagccacatgtgtgatggcttttggccttttgccttgcgcctagaacaataacaatgactaatagaatcagcggggcaacatccgatatattatctaattatcgtggctggtgctgaggcagttgcgttgtgtggtgggtctcaaatcccaattaggctaggaagattagattctaggtgagaaattgcaatgatttttttaatttactcctccagcttacggttataaaaaagctatgtgttttgtctttgtatcgttagtttcctcaagatagcttctggacttactgaacaaacttgcaatagcactcaagtatcttcctcctgcactgaataagacaacactccctttgatgctgttgaggaacacccacatgggaggtcaacggtaattgtaattgtagccctaggtgtcaatggaacaccatcgccaaaattcattgcaagtccactgaaggtcctctgaaccaaagagacgcttgatgggctaaatgaaagatccaggcatcattttctttgatggagtcaagtatgtctttgtcttgcaacatttagcatgttttgcaaggtttatagttcgttatacttgtaaaccggaaaaccataaagcgccaaaaaggacaacatgatatatgttatttatcaacgtagattcaaagagcgtgctaggtacttatttgttcgttcattcaactcaacacatggatgcagatcaaatgtgccaccaatatttcactgttacataaatccagtaagatttatctctttttctgatcttgtataaaaaatagtctagaatattttgctttcatagtttgttaccacctgatttgaagtgtaaaacttgtactatctcatttaatatatagaaattgtattaacacacagacacttaattaggtatatgttcgtgcgttgctacgaaattaatatgataacatacatcaatatgcaaaaaatattttgttttattatattgatcctgtagcaacgtacggtcatataactaatctttacacctattaagaacctaaggagggcgtccacaccctatgcccccgcctcgtgttcc

SEQ ID NO: 1854 - DNA, 1285 bp, Zea Mays
atgcccaggatcagaagcggcgacctcgctcttgccgctcaagcacgaaagaagccccgtcgagccggaggccgcgtgtcgtgttccggccctcgacgccgtgctcgaccgcaatacgaccttcctcttccttcgccgagtgtgatcgttcctggcttccctcctgcatccgcatcggatccccatgccgaggctggaaagctgtacgaccttcgcactccgctacgcgcaagtggcggcctcgctcctgccgctcaagcacgaaagaagcccatcgagccaaaggccgtgcgatgtgttccagccctcgacgccgtgctcgaccatgatacgcccttccgcttccttcgccaagtgtgctcgttcctggcttccttcgccagaccgcaccttttgtttcatgtcttctttgggggtggccgggtggagtgggttggagctgcaaagtccctgatttttaatgcattttgtcagagtagccacatgtgtgatggcttttggccttttgccttgcgcctagaacaataacaatgactaatagaatcagcggggcaacatccgatatattatctaattatcgtggctggtgctgaggcagttgcgttgtgtggtgggtctcaaatcccaattaggctaggaagattagattctagtttcctcaagatagcttctggacttactgaacaaacttgcaatagcactcaagtatcttcctcctgcactgaataagacaacactccctttgatgctgttgaggaacacccacatgggaggtcaacggtaattgtaattgtagccctaggtgtcaatggaacaccatcgccaaaattcattgcaagtccactgaaggtcctctgaaccaaagagacgcttgatgggctaaatgaaagatccaggcatcattttctttgatggagtcaatgattaccgaaggatggatgagcacgatcaatatgagtcaattggtttagatgattcactcgaggatgagaggaatcttgatgaaaccatggctgatcgaagggtcgtagaagtagagcctaatgcaagggatgtgaggactggtgtagcagatgacaagaagtatgccttcaagacaagttttagttactgtatgatattagagaaattatcatatttatattctagattaatgatcttgattgaactaccgaatgagtatttgctactatctcaccttcctgattgagcaagataaatcttttgtatggttcttatataaatattatattttcagtaccttatatttaaatgtataaattgc

SEQ ID NO: 1855 - DNA, 1749 bp, Zea Mays
atgcccaggatcagaagcggcgacctcgctcttgccgctcaagcacgaaagaagccccgtcgagccggaggccgcgtgtcgtgttccggccctcgacgccgtgctcgaccgcaatacgaccttcctcttccttcgccgagtgtgatcgttcctggcttccctcctgcatccgcatcggatccccatgccgaggctggaaagctgtacgaccttcgcactccgctacgcgcaagtggcggcctcgctcctgccgctcaagcacgaaagaagcccatcgagccaaaggccgtgcgatgtgttccagccctcgacgccgtgctcgaccatgatacgcccttccgcttccttcgccaagtgtgctcgttcctggcttccttcgccagaccgcaccttttgtttcatgtcttctttgggggtggccgggtggagtgggttggagctgcaaagtccctgatttttaatgcattttgtcagagtagccacatgtgtgatggcttttggccttttgccttgcgcctagaacaataacaatgactaatagaatcagcggggcaacatccgatatattatctaattatcgtggctggtgctgaggcagttgcgttgtgtggtgggtctcaaatcccaattaggctaggaagattagattctagtttcctcaagatagcttctggacttactgaacaaacttgcaatagcactcaagtatcttcctcctgcactgaataagacaacactccctttgatgctgttgaggaacacccacatgggaggtcaacggtaattgtaattgtagccctaggtgtcaatggaacaccatcgccaaaattcattgcaagtccactgaaggtcctctgaaccaaagagacgcttgatgggctaaatgaaagatccaggcatcattttctttgatggagtcaacaatcaacacccgccgctcgttccccgtgccacctgcctctccaccgcgacaggcgccgcgcaaacgccgcccccacgcgctccccctcctgtcgccctgctccccctccccccgaccgggatctgcggctgctgccatcctcaaaacgccggaggccatggggttcgactgcgcgcaccgctctgcactggatgccatgggattcgactacgtgcaccgctctgctgtagacatcgtcatcgtcgatgtcctcctccgctacatcacccacctggactggtctgccgccttccatgccaacctcgccggccacgcactcgccaacgagctcgacgttgtacaggtgctcgcaggtggtcggcaccgacacggacggcttcgcgggcgcggcggccacggaccgctgcctcgttggcttcggtgtaattagagacctcatggtgttcgtcgacaactaactcgatgattaccgaaggatggatgagcacgatcaatatgagtcaattggtttagatgattcactcgaggatgagaggaatcttgatgaaaccatggctgatcgaagggtcgtagaagtagagcctaatgcaagggatgtgaggactggtgtagcagatgacaagaagtatgccttcaagacaagttttagttactgtatgatattagagaaattatcatatttatattctagattaatgatcttgattgaactaccgaatgagtatttgctactatctcaccttcctgattgagcaagataaatcttttgtatggttcttatataaatattatattttcagtaccttatatttaaatgtataaattgc

SEQ ID NO: 1856 - DNA, 135 bp, Zea Mays
taataggtcaaaggacacttgccttcaaacagatgctcaggatcttcaacctcatagaacacagagagcttgatcacttggtcgccaacgcttgatcgttgattccttgaagctcggaaacgaatcgcgatctaa

SEQ ID NO: 1857 - DNA, 2053 bp, Zea Mays
cgcacacccagccagaacgaacgccagaaggcccagaaccgctacctcctccaatacactttcgtggctccgccgcagcacgaaaccctagcttctgcatctccgccccctccacctcccctccgcgaagcaggcgagatgtcgtcgggcggcggtggggggcagcagttccgctacacgcagacgccgtccaaggtgctgcacctgcggaaccttccgtgggagtgcgcggaagaggagctcgttgagctctgcaagcccttcggccgcatcatcaacacaaagagcggcgtcggcgccaaccgcaaccaggccttcgtcgagttcactgacgttaatcaggcaatctcgatggtttcttactttgcatcatcttcagaaccagcacaaatacgaggcaagactgtttacattcagtattcaaacaggcaagaaataattaacaacaagagtcctggagagactgctggaaatgtcttgcttgttactatagagggtgttcaagctagtgacgtcaccattgatgtgatccatatggcccatgttaactggagaaaatgtcgttatcaacacctgcaatgggagagataccatgtttgttttgccgcctctgtcttctaactagtacattcaaagttcttatgaactcttatgtctcatcttgaggatgcaactttctaagtatcccccatcaacgcgcttatctccggtgtagggcacctcctgtttattcaagttattcatgaaaggttttctcggcctttgggtatgttcataaaatagccacctttgaaaaggctgcaggttttcagatactgcttcagctgctagagaagccttagatggaaggagcatcccaagttacttgcttccagagcacgtgacatcctgctgcctgcggatttctttttctgcacataaggatttaaacatcaagtttcagtcaaaccgcagcagggattataataatccatatcttccaattaattattctgccatggatggtacattgcagcctgctgttggatctgacggaaggaaagtggaggctcaaggcaatgttcttcttgcatcaattgagaatatgcaatatgctgtttctgtagacgtgcttcatactgtgttctcatcatttggtacagtccagaaaattgctatttttgagaagaatgggggaacacaagctttgattcagtaccctgatgtaaatactgccgctgtagcgaaggaagcattggaagggcattgcatctacgatggcggctactgtaagcttcacctgtcatactcccgtcatactgatctgaatgtgaaggcacatggtgacaagagcagagattatacaattccagctggcgtaatccaaggggcgccacaaccacctggtatacaagccacgtcccctgggtggcaaggtaaccttcaagcagcagggccatatgccccacccggtgcccctcctcaaaatcacagtgccaatggacaagtgccgaactggactcctggcaattcagggtattccccagccccaggaacatatccaggccagatgtactcatctccggcacagtatgtagcatcagggagcttccttaatacctcagcggccactccgcctcagtatgcaacctcagggggcttccctaataccccatccaccgctccgtcacagtatgcagcatcaaggggcttccctaacaccacacctgccgcccctcctggtgctccatcacaaacgccgcacgcttcccagcagatgccgcatcagcatggaaatcattcaggaggaggcacgcccggaactagccaaccgccactgccagcatcatattaccgttaagttggatcttcttttgctattgtacttgacctgtgttttgaactgagtaatcatgtaatactgcaataacctgcggtctgtaactgtgtttagatgtgatagcagatggatacgagtgaggaatacatgaatatgtttggggttttcattcattttaaaaaacggatcagtgttggctcatggcgattactggcaagatcatgattgatgttg

SEQ ID NO: 1858 - DNA, 2075 bp, Zea Mays
cccagccagaacgaacgccagaaggcccagaaccgctacctcctccaatacactttcgtggctccgccgcagcacgaaaccctagcttctgcatctccgccccctccacctcccctccgcgaagcaggcgagatgtcgtcgggcggcggtggggggcagcagttccgctacacgcagacgccgtccaaggtgctgcacctgcggaaccttccgtgggagtgcgcggaagaggagctcgttgagctctgcaagcccttcggccgcatcatcaacacaaagagcggcgtcggcgccaaccgcaaccaggccttcgtcgagttcactgacgttaatcaggcaatctcgatggtttcttactttgcatcatcttcagaaccagcacaaatacgaggcaagactgtttacattcagtattcaaacaggcaagaaataattaacaacaagagtcctggagagactgctggaaatgtcttgcttgttactatagagggtgttcaagctagtgacgtcaccattgatgtgatccatatgcaggcccatgttaactggagaaaatgtcgttatcaacacctgcaatgggagagataccatgtttgttttgccgcctctgtcttctaactagtacattcaaagttcttatgaactcttatgtctcatcttgaggatgcaactttctaagtatcccccatcaacgcgcttatctccggtgtagggcacctcctgtttattcaagttattcatgaaaggttttctcggcctttgggtatgttcataaaatagccacctttgaaaaggctgcaggttttcaggcattgatccagtacactgatgcagatactgcttcagctgctagagaagccttagatggaaggagcatcccaagttacttgcttccagagcacgtgacatcctgctgcctgcggatttctttttctgcacataaggatttaaacatcaagtttcagtcaaaccgcagcagggattataataatccatatcttccaattaattattctgccatggatggtacattgcagcctgctgttggatctgacggaaggaaagtggaggctcaaggcaatgttcttcttgcatcaattgagaatatgcaatatgctgtttctgtagacgtgcttcatactgtgttctcatcatttggtacagtccagaaaattgctatttttgagaagaatgggggaacacaagctttgattcagtaccctgatgtaaatactgccgctgtagcgaaggaagcattggaagggcattgcatctacgatggcggctactgtaagcttcacctgtcatactcccgtcatactgatctgaatgtgaaggcacatggtgacaagagcagagattatacaattccagctggcgtaatccaaggggcgccacaaccacctggtatacaagccacgtcccctgggtggcaaggtaaccttcaagcagcagggccatatgccccacccggtgcccctcctcaaaatcacagtgccaatggacaagtgccgaactggactcctggcaattcagggtattccccagccccaggaacatatccaggccagatgtactcatctccggcacagtatgtagcatcagggagcttccttaatacctcagcggccactccgcctcagtatgcaacctcagggggcttccctaataccccatccaccgctccgtcacagtatgcagcatcaaggggcttccctaacaccacacctgccgcccctcctggtgctccatcacaaacgccgcacgcttcccagcagatgccgcatcagcatggaaatcattcaggaggaggcacgcccggaactagccaaccgccactgccagcatcatattaccgttaagttggatcttcttttgctattgtacttgacctgtgttttgaactgagtaatcatgtaatactgcaataacctgcggtctgtaactgtgtttagatgtgatagcagatggatacgagtgaggaatacatgaatatgtttggggttttcattcattttaaaaaacggatcagtgttggctcatggcgattactggcaagatcatgattgatgttg

SEQ ID NO: 1859 - DNA, 2025 bp, Zea Mays
cccagccagaacgaacgccagaaggcccagaaccgctacctcctccaatacactttcgtggctccgccgcagcacgaaaccctagcttctgcatctccgccccctccacctcccctccgcgaagcaggcgagatgtcgtcgggcggcggtggggggcagcagttccgctacacgcagacgccgtccaaggtgctgcacctgcggaaccttccgtgggagtgcgcggaagaggagctcgttgagctctgcaagcccttcggccgcatcatcaacacaaagagcggcgtcggcgccaaccgcaaccaggccttcgtcgagttcactgacgttaatcaggcaatctcgatggtttcttactttgcatcatcttcagaaccagcacaaatacgaggcaagactgtttacattcagtattcaaacaggcaagaaataattaacaacaagagtcctggagagactgctggaaatgtcttgcttgttactatagagggtgttcaagctagtgacgtcaccattgatgtgatccatatggcccatgttaactggagaaaatgtcgttatcaacacctgcaatgggagagataccatgtttgttttgccgcctctgtcttctaactagtacattcaaagttcttatgaactcttatgtctcatcttgaggatgcaactttctaagtatcccccatcaacgcgcttatctccggtgtagggcacctcctgtttattcaagttattcatgaaaggttttctcggcctttgggtatgttcataaaatagccacctttgaaaaggctgcaggttttcaggcattgatccagtacactgatgcagatactgcttcagctgctagagaagccttagatggaaggagcatcccaagttacttgcttccagagcacgtgacatcctgctgcctgcggatttctttttctgcacataaggatttaaacatcaagtttcagtcaaaccgcagcagggattataataatccatatcttccaattaattattctgccatggatggtacattgcagcctgctgttggatctgacggaaggaaagtggaggctcaaggcaatgttcttcttgcatcaattgagaatatgcaatatgctgtttctgtagacgtgcttcatactgtgttctcatcatttggtacagtccagaaaattgctatttttgagaagaatgggggaacacaagctttgattcagtaccctgatgtaaatactgccgctgtagcgaaggaagcattggaagggcattgcatctacgatggcggctactgcacatggtgacaagagcagagattatacaattccagctggcgtaatccaaggggcgccacaaccacctggtatacaagccacgtcccctgggtggcaaggtaaccttcaagcagcagggccatatgccccacccggtgcccctcctcaaaatcacagtgccaatggacaagtgccgaactggactcctggcaattcagggtattccccagccccaggaacatatccaggccagatgtactcatctccggcacagtatgtagcatcagggagcttccttaatacctcagcggccactccgcctcagtatgcaacctcagggggcttccctaataccccatccaccgctccgtcacagtatgcagcatcaaggggcttccctaacaccacacctgccgcccctcctggtgctccatcacaaacgccgcacgcttcccagcagatgccgcatcagcatggaaatcattcaggaggaggcacgcccggaactagccaaccgccactgccagcatcatattaccgttaagttggatcttcttttgctattgtacttgacctgtgttttgaactgagtaatcatgtaatactgcaataacctgcggtctgtaactgtgtttagatgtgatagcagatggatacgagtgaggaatacatgaatatgtttggggttttcattcattttaaaaaacggatcagtgttggctcatggcgattactggcaagatcatgattgatgttg

SEQ ID NO: 1860 - DNA, 2068 bp, Zea Mays
gccagaacgaacgccagaaggcccagaaccgctacctcctccaatacactttcgtggctccgccgcagcacgaaaccctagcttctgcatctccgccccctccacctcccctccgcgaagcaggcgagatgtcgtcgggcggcggtggggggcagcagttccgctacacgcagacgccgtccaaggtgctgcacctgcggaaccttccgtgggagtgcgcggaagaggagctcgttgagctctgcaagcccttcggccgcatcatcaacacaaagagcggcgtcggcgccaaccgcaaccaggccttcgtcgagttcactgacgttaatcaggcaatctcgatggtttcttactttgcatcatcttcagaaccagcacaaatacgaggcaagactgtttacattcagtattcaaacaggcaagaaataattaacaacaagagtcctggagagactgctggaaatgtcttgcttgttactatagagggtgttcaagctagtgacgtcaccattgatgtgatccatatggcccatgttaactggagaaaatgtcgttatcaacacctgcaatgggagagataccatgtttgttttgccgcctctgtcttctaactagtacattcaaagttcttatgaactcttatgtctcatcttgaggatgcaactttctaagtatcccccatcaacgcgcttatctccggtgtagggcacctcctgtttattcaagttattcatgaaaggttttctcggcctttgggtatgttcataaaatagccacctttgaaaaggctgcaggttttcaggcattgatccagtacactgatgcagatactgcttcagctgctagagaagccttagatggaaggagcatcccaagttacttgcttccagagcacgtgacatcctgctgcctgcggatttctttttctgcacataaggatttaaacatcaagtttcagtcaaaccgcagcagggattataataatccatatcttccaattaattattctgccatggatggtacattgcagcctgctgttggatctgacggaaggaaagtggaggctcaaggcaatgttcttcttgcatcaattgagaatatgcaatatgctgtttctgtagacgtgcttcatactgtgttctcatcatttggtacagtccagaaaattgctatttttgagaagaatgggggaacacaagctttgattcagtaccctgatgtaaatactgccgctgtagcgaaggaagcattggaagggcattgcatctacgatggcggctactgtaagcttcacctgtcatactcccgtcatactgatctgaatgtgaaggcacatggtgacaagagcagagattatacaattccagctggcgtaatccaaggggcgccacaaccacctggtatacaagccacgtcccctgggtggcaaggtaaccttcaagcagcagggccatatgccccacccggtgcccctcctcaaaatcacagtgccaatggacaagtgccgaactggactcctggcaattcagggtattccccagccccaggaacatatccaggccagatgtactcatctccggcacagtatgtagcatcagggagcttccttaatacctcagcggccactccgcctcagtatgcaacctcagggggcttccctaataccccatccaccgctccgtcacagtatgcagcatcaaggggcttccctaacaccacacctgccgcccctcctggtgctccatcacaaacgccgcacgcttcccagcagatgccgcatcagcatggaaatcattcaggaggaggcacgcccggaactagccaaccgccactgccagcatcatattaccgttaagttggatcttcttttgctattgtacttgacctgtgttttgaactgagtaatcatgtaatactgcaataacctgcggtctgtaactgtgtttagatgtgatagcagatggatacgagtgaggaatacatgaatatgtttggggttttcattcattttaaaaaacggatcagtgttggctcatggcgattactggcaagatcatgattgatgttg

SEQ ID NO: 1861 - DNA, 1993 bp, Zea Mays
cagaaggcccagaaccgctacctcctccaatacactttcgtggctccgccgcagcacgaaaccctagcttctgcatctccgccccctccacctcccctccgcgaagcaggcgagatgtcgtcgggcggcggtggggggcagcagttccgctacacgcagacgccgtccaaggtgctgcacctgcggaaccttccgtgggagtgcgcggaagaggagctcgttgagctctgcaagcccttcggccgcatcatcaacacaaagagcggcgtcggcgccaaccgcaaccaggccttcgtcgagttcactgacgttaatcaggcaatctcgatggtttcttactttgcatcatcttcagaaccagcacaaatacgaggcaagactgtttacattcagtattcaaacaggcaagaaataattaacaacaagagtcctggagagactgctggaaatgtcttgcttgttactatagagggtgttcaagctagtgacgtcaccattgatgtgatccatatggcccatgttaactggagaaaatgtcgttatcaacacctgcaatgggagagataccatgtttgttttgccgcctctgtcttctaactagtacattcaaagttcttatgaactcttatgtctcatcttgaggatgcaactttctaagtatcccccatcaacgcgcttatctccggtgtagggcacctcctgtttattcaagttattcatgaaaggttttctcggcctttgggtatgttcataaaatagccacctttgaaaaggctgcaggttttcaggcattgatccagtacactgatgcagatactgcttcagctgctagagaagccttagatggaaggagcatcccaagagcacgtgacatcctgctgcctgcggatttctttttctgcacataaggatttaaacatcaagtttcagtcaaaccgcagcagggattataataatccatatcttccaattaattattctgccatggatggtacattgcagcctgctgttggatctgacggaaggaaagtggaggctcaaggcaatgttcttcttgcatcaattgagaatatgcaatatgctgtttctgtagacgtgcttcatactgtgttctcatcatttggtacagtccagaaaattgctatttttgagaagaatgggggaacacaagctttgattcagtaccctgatgtaaatactgccgctgtagcgaaggaagcattggaagggcattgcatctacgatggcggctactgcacatggtgacaagagcagagattatacaattccagctggcgtaatccaaggggcgccacaaccacctggtatacaagccacgtcccctgggtggcaaggtaaccttcaagcagcagggccatatgccccacccggtgcccctcctcaaaatcacagtgccaatggacaagtgccgaactggactcctggcaattcagggtattccccagccccaggaacatatccaggccagatgtactcatctccggcacagtatgtagcatcagggagcttccttaatacctcagcggccactccgcctcagtatgcaacctcagggggcttccctaataccccatccaccgctccgtcacagtatgcagcatcaaggggcttccctaacaccacacctgccgcccctcctggtgctccatcacaaacgccgcacgcttcccagcagatgccgcatcagcatggaaatcattcaggaggaggcacgcccggaactagccaaccgccactgccagcatcatattaccgttaagttggatcttcttttgctattgtacttgacctgtgttttgaactgagtaatcatgtaatactgcaataacctgcggtctgtaactgtgtttagatgtgatagcagatggatacgagtgaggaatacatgaatatgtttggggttttcattcattttaaaaaacggatcagtgttggctcatggcgattactggcaagatcatgattgatgttg

SEQ ID NO: 1862 - DNA, 1773 bp, Zea Mays
aaaaaccatgtaaaaatatatctaaataaaatataaaataaaaggctcgacgtcgtcgtcacctctctcgccgtccacgagtcacggcgggcgggcggcggcggcggccgggggtcccggttgcacacggctcgccaccatgcctgaccccaccaccaaactcccctctccacgcccccgccggcgccgcaggctcttcagcctctgcctcggcacagcgctcctcgcgctcatcgtctccgcgctcgtccacgtcgtcgcccagccgccgggtcccgctcccgcctccgcgcgcttctccgtcatcatagacggaggcagcacgggcacccgggcccacgtcttcgcggcggggcccgacggccgcccggatctggcgcgctccaccgtgatgcgcgtctccccgggcctctcgtccttcgccgccgacccggcgcgggccggggagtccctgaagcctctgttagattttgcgagggataagattggcggcgccgttagggaggcggaggtgcggctcatggccaccgcagggctgcgcctgctcgaggagcgcgcccaggaggcgatcttagcgtcttgtagggacgttctacgagcctctgggttccggttcgaggacgcgtgggccaaggtgatcccaggctcggatgaaggtgtctatgcttgggttgcggcaaattatgctcttggaagacttggaggggatcctaacaaaaccgttggaataattgaacttgggggcgcttcagctcagcttacctttgtttctgatgaagtacttccacccaaactgtcatataattatacttttggtgaaacaacatacactctctataccaacagctttttaaactttggtcaaaatgcagctcaagactcattccatgaaatgctgaggtcaagaggctctttcaaaaatggtacacttgctgatccttgtgctcccagaggatattcacgcaatgaaggtgcttcaaggtcaacattagagaaccagtatgttaataatgggactggaaactttacagagtgcatatcttcttcacaacttttactgcaaaaaggaaaggttctttggacttaagaagtcttcatcactatctgatttcatgtttgctggagaacaattttgcaaccagcatttgtcgagtcttagaaaaaggcatcctaataggtcagatgaggatttttcacggtattgcttctcgatggcatacattgtggctctactgcatgacagtcttggtgtaccactggatgacaagaggattgagtattcaaaccaggttggagacattcaggttgaatgggctctaggagctttcatcacactgatgcaaaatacgagtttaaagccattacacaccaccgcagaatcaacccatagcaatagaccattgtttgctgtgctgggaatgtttcttttatgtggagtactctttgtatcaagatggaggaagcccaagacgaaaatcatatacgacttagagaaaggccgatacatcataacacgcatcagctgacgctaaatcttgtgcagaagaactatatttatacgacatgaatagatgctgtgttgtgcaacaatgtacgagttcaattctttgtgtttttacctttaggtagcagagctgggtgggtggagcaggaagatagcgcatttgtgcgtatagaagaatgatgtgtagaacaaattgccatgtgttaattgaattatttgatgaataattatagttgctttgttcatctaatgaggtcgatatttctcac

SEQ ID NO: 1863 - DNA, 1900 bp, Zea Mays
aatgccgttcgttctccgccttcgcttttcaccgtccaaggacccggcgccatcgagcagcttctggaggtagcgcagggatcgcgatgtggtcgtcgaagggatcttcgtcggctcgtcgccccctccttcttcggccactgcgcacgagggcgacggcgatggctgctgctgccacattgatgtgggagggagcagacggagaagccactgactctgactagagagcggccggagtgaaagttgttgaaagcgggagcgggagccttaccaaactgggctggcaaggcgtcgtcgcaggttgccggttcgccgctgccagcgaagcactcacctcgccgtcgtcctccggctgccgttcctgcggtcatatgtgacgccttacctgcagttctcctcgtccctcacgcctcaactcccgcacctctgagtctcgatggaggaccgcctcttcgataagtccctgaacccgaataagcttttgaaggaacaattcgtcagcaacttgacggggtcttccctgctggagatcgcggcgctctccaccgtcgtgccggcattggtagttctcagaaagtggagcagcagagataattctaggaaggattcagcaaagaaaaacgatgatcaagttcaccctgttggtaaagattggatgcaatacttctctacactagctgtagactatctcactgttgtattgccaattattgtggttttcacagtcttatctgaatgggcttttggttgtgctatttctcttgcaatcctgatatacatctacgtcatgtttaaaaggcctcagctttatcttaaagatgggttcagccagttgccttcgatgagggcagacatatcttcttaccgtgtctcagtggttctggtgacatgtttgtgcattttagctgtggacttcaaaatatttccaagacgctatgccaaggctgaaacatatggtagtggcatcatggatcttggagtaggatcatttgtagtggctaatgcactggtatctagacaagcacgaaacatagcctcaatgagtttcaaggcggctctgagttccataagtccactagtatttcttggctttgctcgcattatatccacatggggtgttgattatcaggtccatgtaggagaatatggtgttcattggaacttctttttcaccctcgcagctgtttctatccttacatccattgtcaggattcatccaaaacattgtggcttagttggtctgcttatccttgctggataccagatttggctatcttctggattaaatgagtacctcatttctgataaaagaagtgctgatataatcagccagaataaggagggcatttatagcatccttgcgcccggggaaggccatacccatggttgccgccaagacacatttagagatctcgactcgggaaactgactttgaaatccactactcctggggcccctagtcgtagggacctcctctggccccgaccaagggagggcttagcactagaagacattatagaagtgtccggatgcaatgacttctcaaatgtcagaaggccggtgttctttcgggcgacccacatgcaatgaagattggacccctagcgccccaatacctccatgttatgaccggcatccaatatgtcagacgccataagcgccatagcagctagctagtttattggccagtttattgctggtttgttaacagccggatagataagatgagaattagcagtcgtctagataagatagggttagttggagaataatgtggagatccacctagatagatggagattagttgaagaggcaatcaaataagttagaaattgcctatatgtacagactattatcattaatgaaggattaagcagggcaactcttgcctactgctctc

SEQ ID NO: 1864 - DNA, 2524 bp, Zea Mays
aatgccgttcgttctccgccttcgcttttcaccgtccaaggacccggcgccatcgagcagcttctggaggtagcgcagggatcgcgatgtggtcgtcgaagggatcttcgtcggctcgtcgccccctccttcttcggccactgcgcacgagggcgacggcgatggctgctgctgccacattgatgtgggagggagcagacggagaagccactgactctgactagagagcggccggagtgaaagttgttgaaagcgggagcgggagccttaccaaactgggctggcaaggcgtcgtcgcaggttgccggttcgccgctgccagcgaagcactcacctcgccgtcgtcctccggctgccgttcctgcggtcatatgtgacgccttacctgcagttctcctcgtccctcacgcctcaactcccgcacctctgagtctcgatggaggaccgcctcttcgataagtccctgaacccgaataagcttttgaaggaacaattcgtcagcaacttgacggggtcttccctgctggagatcgcggcgctctccaccgtcgtgccggcattggtagttctcagaaagtggagcagcagagataattctaggaaggattcagcaaagaaaaacgatgatcaagttcaccctgttggtaaagattggatgcaatacttctctacactagctgtagactatctcactgttgtattgccaattattgtggttttcacagtcttatctgaatgggcttttggttgtgctatttctcttgcaatcctgatatacatctacgtcatgtttaaaaggcctcagctttatcttaaagatgggttcagccagttgccttcgatgagggcagacatatcttcttaccgtgtctcagtggttctggtgacatgtttgtgcattttagctgtggacttcaaaatatttccaagacgctatgccaaggctgaaacatatggtagtggcatcgagtttcaaggcggctctgagttccataagtccactagtatttcttggctttgctcgcattatatccacatggggtgttgattatcaggtccatgtaggagaatatggtgttcattggaacttctttttcaccctcgcagctgtttctatccttacatccattgtcaggattcatccaaaacattgtggcttagttggtctgcttatccttgctggataccagatttggctatcttctggattaaatgagtacctcatttctgataaaagaagtgctgatataatcagccagaataaggagggcatttatagcatccttggatactggggtatgtttctaattggtgtttctttgggtttctatctgttttttgacactagttcaaagggcaagaacaggaacactcaagtcatgaaaatctgggttcttgctgcgttgttttggattttggcaatcatctttgatagctatattgagagagtttctcggcgaatggagagttgcatatcattatattgaaaggagagaataaaggcatcaagcccaaaacaaacaaacacacatccacacacacgcacacaaagacacccctcaaagcccaacctacacaccccaccggcttacaccaccagtacaaaaaactcctcctttagccagggtcgaacagagttcgaatgctcttggcgcctgccaaagaccatagatgcagctcttctttaaatctctcctctagggaagataggcaaggtcgtgctccataaaaaacacaactgtttctatgcttccaaatgctccatgctccaaggatgacaatgctattgaaactctttcttttgcctttgggaaatagatgagaagctttcctccaccaatcttcgaaacaactatcacctctcttagactccacattattgagtctaagtgaagaaaggatagcatgccaaaactgccttgcaaaaacacaattggttaagatatgctagatcgtttccttctcttggtcacaaagaacacaactctggggataatcaagacctattttctgaagtctgtctgccgtccaacatttattattaatggctagccaaataaatgttttacatttgggggctgcccaggctttacaaattttcttccaaggttcaaaggagattgcaccactgaagaaaattctataggcagactttgagataaaaccccatcactagagaatctccaaacatgtgtatcattgttttccagggcatcccacagctgcaagtattgcataatgcccgcaagagataggttccctgtatatcccgaacccaagaatgagaagggagggcctgctgcagtcctaactttcctatattttttggggctgcagcagcaatgattggtgcaagctcctcaatagagcacccgttaatccatttatccatccaaaaataagttgtagctccatcaccaataatagaagtcacagatacccgaaataaagctctggcttgattggaaacattaagatcaaggcctctccaaggtttatcagagtttgttttcggaagccatag

SEQ ID NO: 1865 - DNA, 10098 bp, Zea Mays
ttactattgcccgcttccctcagggagcagggcgaaccctagccaccagctctctctctctctctctctctctctcgattagccacggtgccctccgtcgtgcacactgccggcgacaacgcagccgccacccccttcttcctcccctcgcttgcagccctaaccgtgaacagtactcgccggtactgtagcgcgggtgctgtagcatgagtattgtagcgcccctgttctctcgctttctgccggccacaccgagccatggcgctccagcgccgtgatcgctgtcgggctccagcacctcatcgctattcccttcgccacatccccgtgcaactttgcttatgttatgcttgtttttggccagaattttcaggtaatgtgcttttctatgttcttttgtttaattatactctctccgtcccaaaatagtagtcgttttagctctatatttttatgactgttcatatggatgaagatgaatctagatacatatatagaacacatacattaattattgtgtgaatccaataaaaaggtaaaacgtatttttatttgggacgaaaggagtagaatacattaattagcacaccaggttggtcttttctttaacatcttggtagtgttcgtatttgttaagcaatagacaaatactggacttttctttaacaatatgcactttatctgataatgccgacaaattaacccataatgtggccaaagaaagccaaagcgttaggctagataaggtagatgataagctgtggacatatgcaccaactactacttgactagaagctgaaatctaaggtaggcacaagacttattcgatcaatcattagacccgtgagtagtagcacgggggtttgcaaagccacgaagttaactacttagccaattaaatgatcacactttcctgagagtttacgaacagtgggtttgtctgttttttctttagttgtttggtctagtatttttgtttatgcttcacattagcttcactgttcatggctttatgctgattgattatccaatttaggttttatgtatcctcacattagctgggttcgtctcatataaaaagaacttggttcttgaagatgcattcaatcaaaatatgctcggttcattccttctggcaaatatccttactggtctggttaatctctcagttaacacgctctctgcttcttccctcaccgccttcatgattctgtcagtatacacctttgctttatgcatggttactggccttatccatttttgtggtgttagaatgaaattctggtgaattgtaagctaccatttgatatgatgtatgcattcattaacttgtcagcgaactagtagctagcttgcttgaaatataatgatttttaggggggggggggggggaaataaggcagattggtatcctactacgtgatgcagatgacctgacgtatcccactgacgacctagctggaggtgcgtgggcattcggccctctttccgcgtggcgtttcttcgtgcctgaggcgacgacggtttggcaccggctctctgccgtcgagagagaatggcaccagccaccagctcgtgtcaccactgccggcataggtggtctgttcctcttcagctcgctgcttatttaagaaaccgtgacagagaatgcctttgaccttaaatctgttgaaccaatgtaccgggggaggaggtaaccagtgcatcagtactccggcccctcagctccacttcagatcagatctcctgaattgcacgtttgagatcgagatctatcaggccatgctaagagagtaagaggtgatcaaatgacagtactgaaaagtgtagcaacaaccacgcttgcttgtgtgtgatggtggagtgagagacaaggagagctggatccaccaccctgtcctctggagacttgatgagtcggacgcatcaaattgcgttgcgtgatcggacgggtccaaatggtattaactcgcagcccatggattgcgagccttcatggaatggtttccggatcacgatggatcaatcgttcatcgctgacgaactagtacgtggtatttgtattgcaccgaccttgtgtggcccatagtactacttcctttaacttgttttcggtactctcgtttctgaaattgatgttgctaggttattctaatcggtcaaattttcataagttcaactagatttataatatttcatgttttataatatttggttgcaaatgctatatcttgaggaaaggtagtcgactctctaaatttaagaagaaatgtgatgcggttttctactcgggtattcttcaaatagcaaggcttgtagggttttaaacaaaactcgtggcattattgaggaatcatttgatgttgagtttgatgaaacaaataggttttaagatgaaaatcaaaatcttaatgatgtaagtggagttcacttgaggaatgccattaagattgaccattggtgaaattcagccaaaagaagatgacgatgatgcatggttgtcattccatcatcttcaactctaaatgaggaaattcatcaaagttaacaaaataatgaagttgagaatgctcatgataatggtaacaagtcattcggttcctcaagcttcatcaagtgattctcatattgtatcaaggatccatcattatattgcaaaagataacatggtcgatcaaattatgggtgacataagtaagggtgtttaaactcgctcccgcattgctttattttatgaatatttctcttttgtatcttgtattaaacataaccgtatagatgaagcactacttgatgttgattgggtgaatgcaatgcatgaggaattaaataactacatccgtaatgaagtttgagagcttgttgaaagacccaagaatcacaatgttactggtactaaatgggtatttcacaacaagcataatgaagatagattggtagtgaggaacacgacacgattagtggcacaagattatatttaaatagaaggattgtattttggtgagataattttcatgttgcaagattagaggcaatatgggttcttcttgcttatgcttgtgcttacaacattaaactctaccaaatggatgtaaatgacgttttttctaaatgctaagattagtgaactagtgtatgtggagcaacctctcggttttgaggaccccaagaagcatagccacatgtacaagctttctaaagctttctatgggcttaagcaagctccatgcacttggtatgaaaggcttagagaattcttgttttccaaatagtttaaaattgggaaggttggcactatatgttcactaaaagaattggtaaagatttatttgtttgtcaaatctacgttgatgatatcatttttggatttactaatgagttgttttacgaggaatttggaaaatgatgtcaaaagagtttgaaatgtcaatgatatgggaattgaatttcttttgtggccttcaaaacaaacaatggaaatatgggatttttgtgagccaatctaagtatttaaaggacatgctaaagaaatttgggctagaagatgcaaatccaatcgagactcacatggctacaaatggtcatctagacttagatgagggatgtgcaattgttgattaaaagtgttttcgttctattattgatagtttactttacattactgcatctaggcctgatgtaatgtttagtgtttgcatgtgtgctcggtttcaagcttcacctagagaagtttatttgaaagtcgcaaagaggattctaaggtatttgaagcatactcccaatgttggcttattgtatcataaaggtgctcaatttgaattaattggatattcggattccgattatgcgggacacaaagttgatagaatgaacacttctggttgttgtcaatttcttggaagatctctagtctcatggtcttctaagaagtaaaatttggtcgatgtatctaccgccgaggtggaatacatatcagtctgtaattgttgtgctcaagtattgtggatgaagcaaactctattggattatgagatctttttcaaaaaatgtgtctttcatgtgtgataatgagagtgcagtgaaattgggtacaaattcggttcaacactcaagaacgaagcatattgatataaaacattattttttgagggatcatggtgtcaaaggggatatctcaatatgttttattagcacgaatgatcaattagtggatatatttacaaaatctttggatgaatcaaggttttgcaagttgaaaaacgaaatgaatgtaattgacttcttaaacgtggcttgaagtcgagggcacatgtatagacatccatttgagccctagtgcatctctctaagtcatttattgactatttttcttgaattttttattcttacatgatctaagtgggttctatgtgaaaatgctatttattctagtacattatgtgtttatgcatacatgctaacccttgtaacaatcaaaatatccatatttaagcaaagaaccccatttgaattttggattcataaaatggacaaaaaatggaaactgagtatcatgccacagactgttaggaccttgaccgcggatagtccggagtaacaggacagagactgaaagggaaatagggtcaaaccttttcctaaatgattttggtggttgaaatgccaacacaaataattggactaactagtttgctctagattatatattctacaggtgctaaaggttcaacataaaccaataaaaagatcaagttagggttcaaaaagaaaggagcaaaagaaaccgaagagaaccctggtctggcgcaccggacagtccggtgtgccactggacagtgtccggtgcaccaccggatagtgtctggtgcaccaggggtcgtacagttcaaacttgccaccttcgggtttttggaaagccgctccgctataatttatcggactgtccggtgtgccagcggagcaatgactatcaagtgcaacggtcaactccaatggtcgcctgcaaacgtgaacaatgcgtggatagttcgcgcagagtcagagcagcgccagaaggcacaccggacagtgaacagtgcctgtccggtgcggaaccggactgtccggtgcccccaagatgtcagagctccaacggtcgaaaccgtcagaaccctaacggacagcctccccaatggttggtttggtggttggggctataaataccccccaaccaccaccactccaagcatccaagtttttcagacatctcattcaatacaagagctagtgcaatcaatacaagacacaattcaaaagaatcaaagcctctccaagtcccaaacacactccaaacacctagtgactagagagagagagttttgctcgtgttatttgagctcttgttcttggatcactttcttcttctcattcttgttcttcaagcacttgtaatcaaagcaagagacaccaattgtgtggtggtccttgtggggtctaagtgacccgtttgattaaggagaaagctcactcggtctaacaaaccgtttgagagagggaaagggttgaaatagacccatttctttgtgaccacctcaacggggactaggtttgcattaaccgaacctcggtaaaacaaatcatcgtgtcactcgctttatttcttggttgatttgtttttcgccctctcttccggacttcgattttattctaacgctaaccccggtttgaagtgtgcttaaagtttgtaaatttcagtttccgcctattcaacccccctctaggcgactttcaattggtatcggagccgatacttcattagagtctaaccactcgaagtgatgtcggaaggatccgctaagagggaaatggaaacggacacaagccgcgggaaggctccatcaagggagtccggcgccaaaggaagggaggactcacctccccgcatcaagtcgcatcagagtggcgacaagaagaaaaagatgaagaaattggtctactacgagaccgattcttcgttgctgaaagggaaatagggtcaaaccttttcctaaatgattttggtggttgaattgcccaacacaaataattggactaactagtttgctctagatcatacattctacaggtgccaaaggttcaacacaaaccaatcaaaagaacaagttaggcttcaaaagaacagagcaaaaaggaaaccgaagtactccctggtctggcgcaccggactgtccggtgtgccaccggacagtgtccggtgcaccagggaggattgactccaactcttcaccttcgggtttcccaggcgcacctccgctataattcaccggactgtccggtgtgccaccggactgtccggtgcgccagcggagcaacgactacatacgcgcaacggtcgactctgacaggaacagtgcagaacagttgaaagggaattaggcttacacatattttcctaaatgattttggtggttgaattgcccaacacaaataattggactaactagtttgctctagtctataagttatacatgtgccaaaggttcacactaagccaataaaaagaccaagaaaagggttcaacaaagagagcaagggataaccgaagtgtgccctggtctggcgcactggactgtccggtgcaccaccggacattgtccggtgcaccaggggactacaagctgaactcaccaccttcgggaaaacgcagaggcgcttcgctataattcaccggactgtccggtgtaccaccggacagtgtccggtgccccaggggagagcgactctgaactcgccagcttcggatttcggctccgctataattcaccggactgtccggtgagccagcggagcaacggctacttcgcgccaacggtcgactgcaacgcattaaatgcgcgccaacgcgcgcagaggagcagagcacgagcgggtggcacaccggacagtctacaggacttgttcggtgcaccaccagacagccaggcgggcccacaagtcagagctcttacggtcggaacccaacggcttggtgacgtggctggcgcaccggactatccggtgcgccatgcgacagcagcctccaccaaacggctagtttggtggttggggctataaataccctcaaccaccccacattcaagtcatccaagttttccaccttccaactacttacaagagctctagcattcaattctagacacacccaagtgatcaaatcctctcccaattccacaaaagctttagtgttaagtgagagagatttgttgtgttcttttgagctcttgcgcttggattgcttctttgtctcattctttcttgcgatcatctcaattgtaaacaaggcaagagacaccaattgtgtggtggtccttgcgggaagtttggttcccaattgatttgagaagagaagctcactcggtccgagggaccgtttgagagagggaaagggttgaaagagacccggtctttgtgaccacctcaacggggagtaggtttgcgagaaccgaacctcagtaaaacaaatccgcgtgtcatactctttattcgcttgcgatttgttttgcaccctctctcgcggactcgttttatatttctaacgctaacccggcttgtagttgtgattaagtttgtaaatttcagattcaccctattcacccccctctaggtgactttcaattggtatcagagcccggtgcttcattagagcctaaccgctcgaagtgatgtcgggagatcacgccaagaaggagatggagatcggcgacaagcccactacaagccacaggaaggcttcatcggaagagtctcgcaacaaggggaaggggaaggagaagaaagcctcttcccacaagtcgcatcggagtggcgacaagaaaaagaagatgatgaaggtggtctactacgagaccgatacttcatcaccttccacctttggctccgacgcgccatccattacttctaagagccatgagcgcaagaagtttagtaagattcccctacgctaccctcgcattcctaaatatactccattgctttccgttccattaggcaaaccgccaatctttgacggtgaagattacgctaggtggagtgatttgatgaaatttcacctaacctcactccacaaaagtatatggaatgttgttgagtttggagcacaggtaccatccgtaggggatgaggattatgatgaggacgaggtagcccaaatcgagcacttcaactcccaagccacaactatactcctcgcctctctaagtcgagaggagtataacaaggtgcaaggattaaagagcaccaaggaagtttgggacgtgctcaataccgcgcacgaaggagatgagctaaccaagatcaccaagcgggagacaatcgagggggagcttggtcgcttccgtcttcgccaaggggaggagccacaagacatgtacaaccggctcaaaaccttggtgaaccaagtgcgcaacctcgagagcaaaaaatgggatgaccacgaaatggttaaggttattctaagatcacttattttccttaaccccactcaagttcaattgattcgtggcaatcctatatatacactaatgactcccgaggaagtgatcgggaattttgtgagctttgagttcatgatcaaaggctcaaggaagatcaacgagcttgatggtccctccacgtccgaagcacaaccgatcgcatttaaggcgacggaggagaagaaggaggagtctacatcaagtagacaaccaatcgacgcctccaagctcgacaacgaggaaatggcgctcgtcatcaagagcttccaccaaatcctcaagcaaaggagggagaaagattacaagccccgctccaagaaagtttgttacaagtgtggtaagcccggtcactttatagcaaaatgtcctatttctagtgacagtgacaggggcgacgacaagaaggggagaagaaaggagaagaagaaatactacaagaagaagggtggcgacgctcatatatgccgcgagtgggactcggacgagagctcctccgactcctcctccgacgaggacgccgccaacatcgccatcaacaagggccttctctttcccaacgtcggccacaagtgcctcatggcaaaggacgacaaaaagaagaaggttaaatccaaatcctccactagatatgagtcctctagcgatgataatgctagtgacgaggaagataatttgcgtactctttttgccaacctaaacatgcaacaaaaagaaaaattaaatgaattgattagtgccattcatgagaagtatgatctcttggacactcaagaggacttccttattaaagaaaacaaaaagcatattaaggtgaaaaatgcttatgctctagaagtagaaaagtgcgaaaaattatctagtgagctaagcacttgccgtgagactattgacaaccttagaaatgaaaatgctagtttaagtgctaaggttgattcaaatgtttgtgatgtttcaattcccaatcttagaaatgataatgatgatttgcttgctaagattgaagaattaaacatttctcttgctagccttaggattgagaatgaaaaattacttactaaggctaaagaactagatgtttgcaatgcttccatttccgaccttagaagtaaaaatgatatattacatgctaaggtggtagaattaaaatcttgcaaaccctctacatctatcgttgaacatactactatttgtactagatgtagagatgttaacattgatgttattcatgatcacatggctttaattaaacaacaaaatgatcatatagcaaaattagatgctaaaattgccgagcatgacttagaaaacgaaaaatttaaatttgctagaagcatgctctatagagggagacgccctggcattaaagatggcattggcttccaacagggaggcaatgtcaaacttaatgccacttctaagaaattgtccaactttgttaagggcaaggctcccatgcctcaggataacgagggttacattttgtaccctgtcggttatcctgagagcaaaattaggagaattcattctaggaagtctcactctggccctaaccatgcttttatgtataagggtgagacatctagttcta

SEQ ID NO: 1866 - DNA, 4718 bp, Zea Mays
tctacacagacaaacaacacctaaagcaagcggccaggccacgtagtgcacaagagcaacagcaagaaccaagcccttgctttcagttcagtaaaaccagatccgaagctacctaccgtccatggacaggatggtaaatgggtaaccagcagcagacaggagcacaacgcaaggccctcttgcgctttcgtatgctttccatttttcttgtgcttgcccctccttgcaagaagcacccttttcgctttgaatcttccaccaaggccgccaaagctaggcccgttcaaacgaaaaggatctgcaccgagtttcaatagcttcctttcctcacgcttctccgtgtaggatgctatgcatgctaacacccaatgctttgcccgctagctttggtgcagaacacaaagaaggggggtggagggtgaatcttgaagcattggagagggtttctggatggaatccaacggccgggggtggtttcctggtcatggtccaaggatggcattttaccagcgccaaagctgaaagatcaatttattcagtggtgagcacttagatgcagaaaacaagatgaataattgtaaagcgacgctaagatccctgcttgcgaagtgggcaagggagcccacaagatcgtcctactagtcctagctgcaagaaagaaaatgacgatgcacgggttaaagtaacaatacagttggtttcaaaaatggcacggctatttcttcttctggtcatagtttcttgcgagagttatctactagtaaagacaacgcacaagtacagaacaaaccaactttaccaaatattgcgttgcagttgcagctaaccacagataatttaatctgaaacaagtaatgtaaaattgatactgctacaacttagagcatgccatctaatctacttaggaaaacgactcgtcgtggcatgtatgagtcttacgtctcttttattcttaatataatgatgcgcacctgtgcgttagagaaaaaaaataactgtccatatccatctaggtaattgatacaagaaaaaactgcaaattatggtggaaaacatcagtttttagagtgagcaaaagtagctctacattcaattcttagtttcccaacatgtgctttgtattcccatgaaaactcataagtagctttaatgagaacaactgcataattgtctgaagttttatgaatgaatcggcagcttttttccccccctctattgtctgttccttcttgaagttgatttgtcgtgatgctattttcagtcttaaagagtagtttagactgagaaccgtaccaccttaagaaaaactgtagctggtgggcaaacggaaagaagttcaacaaaaggaaaaggtaaaaaaagagaaagtacagtatgttcaaacggacctccgtacccttgcttctgtgaaaagcgagcggtctgttcggccttggcttgtccacacctgcaaatatgcaaccagatcatctgataaaaccataataacttcaattggggtgaaatatcgtctggaatgtaatgtttccctgccttgaaaaagagagcaagcaaacttcattgactcttgatcggtctcagtggaagttcgtctgcattaaatagattgtcacataggaatttttgttgacatgacaatatattttaagaaaagagaagaaatgatgaaactcttttgctaggattatcaactccttttgagtcataaaattaaatgcctatgaaagtatagaatgaaactttctattgatggtgcatgttcctaagctaacaaaatattatcatcaagtgctcgcaagaaaaaacaaaatatattttcaggcaggaaacaagaccagagcaaagcattccttcttggcgtttgagaaatggaagcagcgaagaaccctcggggatggtgaagcggaacagtggtttgtcctggagcatctgcactgaactggacgcccccgtgcgatgttagtcgcttgtttcattggtgccagctaagtagcgatggctgaagaagccagaccacgcttcccaccttccctaaaagccatggctactcggctaggcattccatcgagcagatgggcggcgctcctatatgaacagaggcgcacaatgtaggatcggcaatttgcatcggcgaggctgcggtggctgagaacaatcgcagcaaatggaactgggatcggagcgatggatatcgtcgatgtagattcctgcgccgaggaatttgcgtgggaattcggaaatgcagaggccggactggaggcccagctgcagagcagacgcgttttttgtgcggaagaagccgcaccgcatgtaaacgccctctccatctacccgcccacgtgtccgattccgatctgacggaccggatggaagcaccggaactgccggcccagccggtcgactttgaaggcgaaaacgcggaagagaaagagaggacagaggagcccgcttcaggcttcaggcttcaggcggacacatccctcgcctcaatagctccgccgctggcgattagtgaagagagctccgaggtggtatcccttgtatcgcatagattccggactctagtcgtcgcggttctcgcaaggtccgcggatccgcgccccgctctggatctccgcttgatttgttgttctggaaggtatggcacgaaacttgaccgacaacaggaccagaaatacactagttatgattgtgatttttggtctctgttccttcttctatctcttgggtgtttggcagaaaagtggttctggaggaggagacgggatacagacttgggtcaatgaacagaccaaatgtgcacaacttccaaatctgagttttgagacccaccatagtgcatccaaccttctgaatgatactgataattccaaaattgaaccattcaagccatgtgatgagcaatacactgattacactccttgtgaggagcaaagtcgtgcaatgaccttccctagagataacatgatctatcgggagaggcattgtccaccggataaggagaagctttattgcctgatcccagcaccaaagggctatgttgcacctttccgatggccaaagagccgtgattttgttcattatgctaatgtaccacacaagagtcttactgttgagaaggctatccagaactgggtgcactatgagggcaatgttttcaggtttcctggtggcggaacacagtttcctcagggtgcagataaatatatagaccagcttgcttctgtcatcccaatagctgaaggaaaagttgccagtttgggagcttacctgtttaagaaaaatgtgttgaccatttcatttgcaccacgggataatcatgaggcacaagtacagtttgcattggagagaggtgtccctgcatatattggtgtccttggatcaataaagctgccatttccttctcgtgcctttgacatggcccattgctcgagatgtttgattccatggagtggaaatgatggtatgtacatgatggaagttgacagagtattaaggcctggcggatattgggtgctgtcaggcccgcccattggctggaagatttattatgaggggtggcaacattctaaggaagatcttcagaatgagcaaagaaaaatagaacaattcgcacaacttctttgttggaagaagatatctgagaaggatggtattgccatatggagaaagagattaaatgacaagtcttgctccatgaaacaatataatccaaaaggtgtaaaatgtggtttgacaagtgacagtgatgtatggtacaagaagatggaagtttgtatagaccccctacccaatgttaatagtgtatctaaggttgccggtggtcaattagagccttttcccaagaggctctatgcagtacctcctcgtataacccttggttctgtgcctggtttctcagttcagtcatatgaagaggacaataaactttggcagaaatatgttgaggcttacaagaataccaataatttgcttgatactggaagatatcgcaatataatggacatgaatgctgggttctctacttatccaaggacatatgaccttatacattctaatggcatcttcagcttgtaccaaaacaaatgtcagtttgaagatatactcctggaaatggacagaatcttacgcccggagggtgcagtcataattcgtgacaaggttgatgttcttgtaaaagtggagaaaatagccaatgccatgaggtggaagacaagattggctgatcatgagggtggccctcttgtacctgagaagatactcttcgcggtcaagcaatactggaccgttgcaaaaacaagcagctaacattattcgtattttatttttttctccagtcacagagatgcagaagacatgccaaaaggatcaattgaccttgcactagtgactcatatctgatcggacagatgcagctgcttataattggaaccctgcagcagtccaggaagttatgaactagcagtggacttacagttttgtataggatactcatttacctctacacgcacctcttttttttgttgttgtatctcagaatctcatcaaatggattgcatgtggacctataaggtctttttcggtgttaaatattgcataattcaccatatgatgattcgtgtggtaggtttatttgtaataaactcgaaggaataattgtgatggtgtatagaacaaaggacacaagatttaaatatatccatgcagccaaatcgttg

SEQ ID NO: 1867 - DNA, 4645 bp, Zea Mays
tctacacagacaaacaacacctaaagcaagcggccaggccacgtagtgcacaagagcaacagcaagaaccaagcccttgctttcagttcagtaaaaccagatccgaagctacctaccgtccatggacaggatggtaaatgggtaaccagcagcagacaggagcacaacgcaaggccctcttgcgctttcgtatgctttccatttttcttgtgcttgcccctccttgcaagaagcacccttttcgctttgaatcttccaccaaggccgccaaagctaggcccgttcaaacgaaaaggatctgcaccgagtttcaatagcttcctttcctcacgcttctccgtgtaggatgctatgcatgctaacacccaatgctttgcccgctagctttggtgcagaacacaaagaaggggggtggagggtgaatcttgaagcattggagagggtttctggatggaatccaacggccgggggtggtttcctggtcatggtccaaggatggcattttaccagcgccaaagctgaaagatcaatttattcagtggtgagcacttagatgcagaaaacaagatgaataattgtaaagcgacgctaagatccctgcttgcgaagtgggcaagggagcccacaagatcgtcctactagtcctagctgcaagaaagaaaatgacgatgcacgggttaaagtaacaatacagttggtttcaaaaatggcacggctatttcttcttctggtcatagtttcttgcgagagttatctactagtaaagacaacgcacaagtacagaacaaaccaactttaccaaatattgcgttgcagttgcagctaaccacagataatttaatctgaaacaagtaatgtaaaattgatactgctacaacttagagcatgccatctaatctacttaggaaaacgactcgtcgtggcatgtatgagtcttacgtctcttttattcttaatataatgatgcgcacctgtgcgttagagaaaaaaaataactgtccatatccatctaggtaattgatacaagaaaaaactgcaaattatggtggaaaacatcagtttttagagtgagcaaaagtagctctacattcaattcttagtttcccaacatgtgctttgtattcccatgaaaactcataagtagctttaatgagaacaactgcataattgtctgaagttttatgaatgaatcggcagcttttttccccccctctattgtctgttccttcttgaagttgatttgtcgtgatgctattttcagtcttaaagagtagtttagactgagaaccgtaccaccttaagaaaaactgtagctggtgggcaaacggaaagaagttcaacaaaaggaaaaggtaaaaaaagagaaagtacagtatgttcaaacggacctccgtacccttgcttctgtgaaaagcgagcggtctgttcggccttggcttgtccacacctgcaaatatgcaaccagatcatctgataaaaccataataacttcaattggggtgaaatatcgtctggaatgtaatgtttccctgccttgaaaaagagagcaagcaaacttcattgactcttgatcggtctcagtggaagttcgtctgcattaaatagattgtcacataggaatttttgttgacatgacaatatattttaagaaaagagaagaaatgatgaaactcttttgctaggattatcaactccttttgagtcataaaattaaatgcctatgaaagtatagaatgaaactttctattgatggtgcatgttcctaagctaacaaaatattatcatcaagtgctcgcaagaaaaaacaaaatatattttcaggcaggaaacaagaccagagcaaagcattccttcttggcgtttgagaaatggaagcagcgaagaaccctcggggatggtgaagcggaacagtggtttgtcctggagcatctgcactgaactggacgcccccgtgcgatgttagtcgcttgtttcattggtgccagctaagtagcgatggctgaagaagccagaccacgcttcccaccttccctaaaagccatggctactcggctaggcattccatcgagcagatgggcggcgctcctatatgaacagaggcgcacaatgtaggatcggcaatttgcatcggcgaggctgcggtggctgagaacaatcgcagcaaatggaactgggatcggagcgatggatatcgtcgatgtagattcctgcgccgaggaatttgcgtgggaattcggaaatgcagaggccggactggaggcccagctgcagagcagacgcgttttttgtgcggaagaagccgcaccgcatgtaaacgccctctccatctacccgcccacgtgtccgattccgatctgacggaccggatggaagcaccggaactgccggcccagccggtcgactttgaaggcgaaaacgcggaagagaaagagaggacagaggagcccgcttcaggcttcaggcttcaggcggacacatccctcgcctcaatagctccgccgctggcgattagtgaagagagctccgaggtggtatcccttgtatcgcatagattccggactctagtcgtcgcggttctcgcaaggtccgcggatccgcgccccgctctggatctccgcttgatttgttgttctggaaggtatggcacgaaacttgaccgacaacaggaccagaaatacactagttatgattgtgatttttggtctctgttccttcttctatctcttgggtgtttggcagaaaagtggttctggaggaggagacgggatacagacttgggtcaatgaacagaccaaatgtgcacaacttccaaatctgagttttgagacccaccatagtgcatccaaccttctgaatgatactgataattccaaaattgaaccattcaagccatgtgatgagcaatacactgattacactccttgtgaggagcaaagtcgtgcaatgaccttccctagagataacatgatctatcgggagaggcattgtccaccggataaggagaagctttattgcctgatcccagcaccaaagggctatgttgcacctttccgatggccaaagagccgtgattttgttcattatgctaatgtaccacacaagagtcttactgttgagaaggctatccagaactgggtgcactatgagggcaatgttttcaggtttcctggtggcggaacacagtttcctcagggtgcagataaatatatagaccagcttgcttctgtcatcccaatagctgaaggaaaagtgagaactgcactggatactggttgtggggttgccagtttgggagcttacctgtttaagaaaaatgtgttgaccatttcatttgcaccacgggataatcatgaggcacaagtacagtttgcattggagagaggtgtccctgcatatattggtgtccttggatcaataaagctgccatttccttctcgtgcctttgacatggcccattgctcgagatgtttgattccatggagtggaaatgatggtatgtacatgatggaagttgacagagtattaaggcctggcggatattgggtgctgtcaggcccgcccattggctggaagatttattatgaggggtggcaacattctaaggaagatcttcagaatgagcaaagaaaaatagaacaattcgcacaacttctttgttggaagaagatatctgagaaggatggtattgccatatggagaaagagattaaatgacaagtcttgctccatgaaacaatataatccaaaaggtgtaaaatgtggtttgacaagtgacagtgatgtatggtacaagaagatggaagtttgtatagaccccctacccaatgttaatagtgtatctaaggttgccggtggtcaattagagccttttcccaagaggctctatgcagtacctcctcgtataacccttggttctgtgcctggtttctcagttcagtcatatgaagaggacaataaactttggcagaaatatgttgaggcttacaagaataccaataatttgcttgatactggaagatatcgcaatataatggacatgaatgctgggttctctacttatccaaggacatatgaccttatacattctaatggcatcttcagcttgtaccaaaacaaatgtcagtttgaagatatactcctggaaatggacagaatcttacgcccggagggtgcagtcataattcgtgacaaggttgatgttcttgtaaaagtggagaaaatagccaatgccatgaggtggaagacaagattggctgatcatgaggtcacagagatgcagaagacatgccaaaaggatcaattgaccttgcactagtgactcatatctgatcggacagatgcagctgcttataattggaaccctgcagcagtccaggaagttatgaactagcagtggacttacagttttgtataggatactcatttacctctacacgcacctcttttttttgttgttgtatctcagaatctcatcaaatggattgcatgtggacctataaggtctttttcggtgttaaatattgcataattcaccatatgatgattcgtgtggtaggtttatttgtaataaactcgaaggaataattgtgatggtgtatagaacaaaggacacaagatttaaatatatccatgcagccaaatcgttg

SEQ ID NO: 1868 - DNA, 2467 bp, Zea Mays
gttagtttaatttaattgttataatttatagtagctggcaagagtggttaaggttttcaaccagtgatatgatacccaaattctcttggtaatcttttcgaccatgcaacatatcgccatatcggtggcttttgacaaaatctagatctttttttaagggaaatctagatctaggactttatggatttacttcctaattcctcccttttcctattgttaaggaacttcttagttgatatcgttttacatagatatcaactaaactgactcactgaatcttaattttaagaaaagtggttctggaggaggagacgggatacagacttgggtcaatgaacagaccaaatgtgcacaacttccaaatctgagttttgagacccaccatagtgcatccaaccttctgaatgatactgataattccaaaattgaaccattcaagccatgtgatgagcaatacactgattacactccttgtgaggagcaaagtcgtgcaatgaccttccctagagataacatgatctatcgggagaggcattgtccaccggataaggagaagctttattgcctgatcccagcaccaaagggctatgttgcacctttccgatggccaaagagccgtgattttgttcattatgctaatgtaccacacaagagtcttactgttgagaaggctatccagaactgggtgcactatgagggcaatgttttcaggtttcctggtggcggaacacagtttcctcagggtgcagataaatatatagaccagcttgcttctgtcatcccaatagctgaaggaaaagtgagaactgcactggatactggttgtggggttgccagtttgggagcttacctgtttaagaaaaatgtgttgaccatttcatttgcaccacgggataatcatgaggcacaagtacagtttgcattggagagaggtgtccctgcatatattggtgtccttggatcaataaagctgccatttccttctcgtgcctttgacatggcccattgctcgagatgtttgattccatggagtggaaatgatggtatgtacatgatggaagttgacagagtattaaggcctggcggatattgggtgctgtcaggcccgcccattggctggaagatttattatgaggggtggcaacattctaaggaagatcttcagaatgagcaaagaaaaatagaacaattcgcacaacttctttgttggaagaagatatctgagaaggatggtattgccatatggagaaagagattaaatgacaagtcttgctccatgaaacaatataatccaaaaggtgtaaaatgtggtttgacaagtgacagtgatgtatggtacaagaagatggaagtttgtatagaccccctacccaatgttaatagtgtatctaaggttgccggtggtcaattagagccttttcccaagaggctctatgcagtacctcctcgtataacccttggttctgtgcctggtttctcagttcagtcatatgaagaggacaataaactttggcagaaatatgttgaggcttacaagaataccaataatttgcttgatactggaagatatcgcaatataatggacatgaatgctgggttctctacttatccaaggacatatgaccttatacattctaatggcatcttcagcttgtaccaaaacaaatgtcagtttgaagatatactcctggaaatggacagaatcttacgcccggagggtgcagtcataattcgtgacaaggttgatgttcttgtaaaagtggagaaaatagccaatgccatgaggtggaagacaagattggctgatcatgagggtggccctcttgtacctgagaagatactcttcgcggtcaagcaatactggaccgttgcaaaaacaagcagctaacattattcgtattttatttttttctccagtcacaggtaacttggtccctggatgtgtttattggggggaaaatctgccggtttgaaaatcatcatcccatgtttgttactgaaaatagaaaacaagcttacaatcaccctggaggatggtaagttatgcgggacctagttgtgaacttgtgatttgcttattccactgttgcagagatgcagaagacatgccaaaaggatcaattgaccttgcactagtgactcatatctgatcggacagatgcagctgcttataattggaaccctgcagcagtccaggaagttatgaactagcagtggacttacagttttgtataggatactcatttacctctacacgcacctcttttttttgttgttgtatctcagaatctcatcaaatggattgcatgtggacctataaggtctttttcggtgttaaatattgcataattcaccatatgatgattcgtgtggtaggtttatttgtaataaactcgaaggaataattgtgatggtgtatagaacaaaggacacaagatttaaatatatccatgcagccaaatcgttg

SEQ ID NO: 1869 - DNA, 2371 bp, Zea Mays
  misc_feature (1)..(2): n is a, c, g, or t
nntcttatgacccagatgcaccaagcgccaagaataatagcactattaaggttctttcggaaatctttaggaacactgtctcctactcttctccaacactcagcaaaggagtcctcatcgtcattaatggtcagatgaccaagactgaaagggccatgatgctgtacccaaattgtcgtgctagactacaagaagtcaggagatgctgaatagtttcatcagcttggtcatggagaggacagtgctcagggtgtgaaagacatccgttttctaattttcaactgtccagtatttgtctctaatagtcaaccaaataaaaaccttgcattttggaggcgcccaagatttccataaccttttccaaggttcaaatttaatggagcctagaaagaaggttttattgcaggacttagggctagtttggaaacttaaatcccctccaggatttccagggctaattttcccctcaatcctcaggagtcccggaggggatgtaagtttccaaactagcccttagaagaaaattttcctgaagcctcatgtttccaaatatgaatgtcatcatcttgagatagggctgtgccttcgattaaattccacaactgaaagaattgttggatacctgtcaaggacaggggtgccttgatatctctaacccaaggtctgctgtccaaagcttgctccaccgtttggaatttcagagctttttcgtccactttggccaccatatgagggaccagatcagagatagaggcacccataagctacctatcagccagaaaagggcaatcttgccattacccacatgagtttcaactgcagttgcgaagaaatctctgaccagagcctgaacagggaagtccagaccaggccaaggccaagaggaatcagtttttggaaccgaagccatctagcatgtaaagcccatcccatcagttgcaggtttgggattccaagccctccaaggttcaatggcctggttattttctcccaagacataagacaacttccaccattcacttctttcctccctttccacaaaaggcccttctcaatttatcaatagccttaaccacccatttccatttaggcacattcaaggcaatgaagtccttattttgaatcaattggtcagaattgaacttaataatattcagactcagacctaaagctgtctggcattcccgatcaataaaattagtgtgcagagtgagatccagggatgcattaacgagtctgatttagtatttatcaacataaaaaaagacgagcctgattcagtcgggtagttgggcaaacttcaaatgttgcgggtctattttgttttgtcatttgctgattttgtggttggtttgcagatctccttggtcaaacaaatatgacccccctttggaagatgggacagttccttctcaagggatgaggaatcttgaggtactatgaaggtggcatctcatctgtttacatttgggaggatgaagataatgggtttatcgcatgcttcttaattaagaaagatggacaaggaaaaagagggtacatgcagattggttcatgggatgctattcatgttgttcaggttggtcctgaagaagaaggagcggcacattactgcttgaacagcactgtgatgctctcattgacaacaaacaacaagcagtctggaactttcaacctgtctggatccattagacggcagatgagtatgactcttgctgtagctgatggacaccttgttaatatggggaaaatgatagaagaaatggaggggaagctgagaaattcactggaccaagtttattttgggaagaccagagaaatggtttgcactcttcggccaccaccagaagttcttaatatgagactacctgacagctgagccagtgcatagaagtgtcaacttaacaaagaaaaacgtattcttctccactctaggcgtggtctgttcttgcttcgtagttaatagtctgtgcatctgtatcgacatctgttgaggtatctatgataggagcttattatcttctgatctcttgtgattagctgtatccgcgaagtgtttgacaggagccagtgtttgcagtggaattcagttaccaacagatgaatctccacaaaacgttgtgttggcgttctgtatcttctgaagaatctgatggtgttgtggctggccttgctatctgtcaaagtactaatgcggtgtttgttttgaggagtcacctcatatcggataagattgtgcatcctgagtccattttaaaacctggtgtttcttatgcttttacaaattagcttctgagaaatgaagtagtgctggataatttttttctgcttcacaaatcaaataaaaaaaagaggtgcaggaagatcgtgg

SEQ ID NO: 1870 - DNA, 2095 bp, Zea Mays
  misc_feature (1)..(1): n is a, c, g, or t
ntcttatgacccagatgcaccaagcgccaagaataatagcactattaaggttctttcggaaatctttaggaacactgtctcctactcttctccaacactcagcaaaggagtcctcatcgtcattaatggtcagatgaccaagactgaaagggccatgatgctgtacccaaattgtcgtgctagactacaagaagtcaggagatgctgaatagtttcatcagcttggtcatggagaggacagtgctcagggtgtgaaagacatccgttttctaattttcaactgtccagtatttgtctctaatagtcaaccaaataaaaaccttgcattttggaggcgcccaagatttccataaccttttccaaggttcaaatttaatggagcctagaaagaaggttttattgcaggacttagggctagtttggaaacttaaatcccctccaggatttccagggctaattttcccctcaatcctcaggagtcccggaggggatgtaagtttccaaactagcccttagaagaaaattttcctgaagcctcatgtttccaaatatgaatgtcatcatcttgagatagggctgtgccttcgattaaattccacaactgaaagaattgttggatacctgtcaaggacaggggtgccttgatatctctaacccaaggtctgctgtccaaagcttgctccaccgtttggaatttcagagctttttcgtccactttggccaccatatgagggaccagatcagagatagaggcacccataagctacctatcagccagaaaagggcaatcttgccattacccacatgagtttcaactgcagttgcgaagaaatctctgaccagagcctgaacagggaagtccagaccaggccaaggccaagaggaatcagtttttggaaccgaagccatctagcatgtaaagcccatcccatcagttgcaggtttgggattccaagccctccaaggttcaatggcctggttattttctcccaagacataagacaacttccaccattcacttctttcctccctttccacaaaaggcccttctcaatttatcaatagccttaaccacccatttccatttaggcacattcaaggcaatgaagtccttattttgaatcaattgatctccttggtcaaacaaatatgacccccctttggaagatgggacagttccttctcaagggatgaggaatcttgaggttgaggcaaacgaagttttctcagtgtatcgtgaccagtactatgaaggtggcatctcatctgtttacatttgggaggatgaagataatgggtttatcgcatgcttcttaattaagaaagatggacaaggaaaaagagggtacatgcagattggttcatgggatgctattcatgttgttcaggttggtcctgaagaagaaggagcggcacattactgcttgaacagcactgtgatgctctcattgacaacaaacaacaagcagtctggaactttcaacctgtctggatccattagacggcagatgagtatgactcttgctgtagctgatggacaccttgttaatatggggaaaatgatagaagaaatggaggggaagctgagaaattcactggaccaagtttattttgggaagaccagagaaatggtttgcactcttcggccaccaccagaagttcttaatatgagactacctgacagctgagccagtgcatagaagtgtcaacttaacaaagaaaaacgtattcttctccactctaggcgtggtctgttcttgcttcgtagttaatagtctgtgcatctgtatcgacatctgttgagtggaattcagttaccaacagatgaatctccacaaaacgttgtgttggcgttctgtatcttctgaagaatctgatggtgttgtggctggccttgctatctgtcaaagtactaatgcggtgtttgttttgaggagtcacctcatatcggataagattgtgcatcctgagtccattttaaaacctggtgtttcttatgcttttacaaattagcttctgagaaatgaagtagtgctggataatttttttctgcttcacaaatcaaataaaaaaaagaggtgcaggaagatcgtgg

SEQ ID NO: 1871 - DNA, 2072 bp, Zea Mays
ccaagcgccaagaataatagcactattaaggttctttcggaaatctttaggaacactgtctcctactcttctccaacactcagcaaaggagtcctcatcgtcattaatggtcagatgaccaagactgaaagggccatgatgctgtacccaaattgtcgtgctagactacaagaagtcaggagatgctgaatagtttcatcagcttggtcatggagaggacagtgctcagggtgtgaaagacatccgttttctaattttcaactgtccagtatttgtctctaatagtcaaccaaataaaaaccttgcattttggaggcgcccaagatttccataaccttttccaaggttcaaatttaatggagcctagaaagaaggttttattgcaggacttagggctagtttggaaacttaaatcccctccaggatttccagggctaattttcccctcaatcctcaggagtcccggaggggatgtaagtttccaaactagcccttagaagaaaattttcctgaagcctcatgtttccaaatatgaatgtcatcatcttgagatagggctgtgccttcgattaaattccacaactgaaagaattgttggatacctgtcaaggacaggggtgccttgatatctctaacccaaggtctgctgtccaaagcttgctccaccgtttggaatttcagagctttttcgtccactttggccaccatatgagggaccagatcagagatagaggcacccataagctacctatcagccagaaaagggcaatcttgccattacccacatgagtttcaactgcagttgcgaagaaatctctgaccagagcctgaacagggaagtccagaccaggccaaggccaagaggaatcagtttttggaaccgaagccatctagcatgtaaagcccatcccatcagttgcaggtttgggattccaagccctccaaggttcaatggcctggttattttctcccaagacataagacaacttccaccattcacttctttcctccctttccacaaaaggcccttctcaatttatcaatagccttaaccacccatttccatttaggcacattcaaggcaatgaagtccttattttgaatcaattgatctccttggtcaaacaaatatgacccccctttggaagatgggacagttccttctcaagggatgaggaatcttgaggttgaggcaaacgaagttttctcagtgtatcgtgaccagtactatgaaggtggcatctcatctgtttacatttgggaggatgaagataatgggtttatcgcatgcttcttaattaagaaagatggacaaggaaaaagagggtacatgcagattggttcatgggatgctattcatgttgttcaggttggtcctgaagaagaaggagcggcacattactgcttgaacagcactgtgatgctctcattgacaacaaacaacaagcagtctggaactttcaacctgtctggatccattagacgatgagtatgactcttgctgtagctgatggacaccttgttaatatggggaaaatgatagaagaaatggaggggaagctgagaaattcactggaccaagtttattttgggaagaccagagaaatggtttgcactcttcggccaccaccagaagttcttaatatgagactacctgacagctgagccagtgcatagaagtgtcaacttaacaaagaaaaacgtattcttctccactctaggcgtggtctgttcttgcttcgtagttaatagtctgtgcatctgtatcgacatctgttgagtggaattcagttaccaacagatgaatctccacaaaacgttgtgttggcgttctgtatcttctgaagaatctgatggtgttgtggctggccttgctatctgtcaaagtactaatgcggtgtttgttttgaggagtcacctcatatcggataagattgtgcatcctgagtccattttaaaacctggtgtttcttatgcttttacaaattagcttctgagaaatgaagtagtgctggataatttttttctgcttcacaaatcaaataaaaaaaagaggtgcaggaagatcgtgg

SEQ ID NO: 1872 - DNA, 1021 bp, Zea Mays
aaaggcccttctcaatttatcaatagccttaaccacccatttccatttaggcacattcaaggcaatgaagtccttattttgaatcaattgatctccttggtcaaacaaatatgacccccctttggaagatgggacagttccttctcaagggatgaggaatcttgaggttgaggcaaacgaagttttctcagtgtatcgtgaccagtactatgaaggtggcatctcatctgtttacatttgggaggatgaagataatgggtttatcgcatgcttcttaattaagaaagatggacaaggaaaaagagggtacatgcagattggttcatgggatgctattcatgttgttcagatgagtatgactcttgctgtagctgatggacaccttgttaatatggggaaaatgatagaagaaatggaggggaagctgagaaattcactggaccaagtttattttgggaagaccagagaaatggtttgcactcttcggccaccaccagaagttcttaatatgagactacctgacagctgagccagtgcatagaagtgtcaacttaacaaagaaaaacgtattcttctccactctaggcgtggtctgttcttgcttcgtagttaatagtctgtgcatctgtatcgacatctgttgaggtatctatgataggagcttattatcttctgatctcttgtgattagctgtatccgcgaagtgtttgacaggagccagtgtttgcagtggaattcagttaccaacagatgaatctccacaaaacgttgtgttggcgttctgtatcttctgaagaatctgatggtgttgtggctggccttgctatctgtcaaagtactaatgcggtgtttgttttgaggagtcacctcatatcggataagattgtgcatcctgagtccattttaaaacctggtgtttcttatgcttttacaaattagcttctgagaaatgaagtagtgctggataatttttttctgcttcacaaatcaaataaaaaaaagaggtgcaggaagatcgtgg

SEQ ID NO: 1873 - DNA, 1625 bp, Zea Mays
atggcccttggcgcgagccagatgccaacagccctgtggatgtgggtggcagcgtggaggctcgtggccgccacacccgctgcagcgttacaggaggcgcatgcgcctagccgtggaggagcacgcggcggcacgcgccaggcgggagcgccggagggtgccgcccacgcgtccacgcgtgcccctcccccagcctgccacctcccgcacgccctcctggcccgcgcggccgcccgtcctctcggtctccgaccacgactgtgcgccttcctaagtaaccctagctcggcgccctccctccgcgacatccaagcccggcaatctcatcgtcgcgcttgcaccgttacgcagtgcgacctctgcgtcttcgaatccaggaaggtagagaggaggaggaggtttgtggcaggatttgaccagcccaatggttccatccgagatggggagcgtcgccaccgccgtcagcacgcctgctgcggacaagctgctccatgggcctatctctggcaagaagtgcaagaaaccaggcccgaggaagattcataaggctgagagggagaagcttaaacgagaccacctaaatgatctctttgttgagctgggtaatatgctagatagacagaacaatgggaaagcatgcatactgactgacactactcggatactaagagacctgcttgttcaagtagactctcttcgaaaggaacatagcgacctacaaaacgaatctcattatgtaacaatggagagggatgagatgcaggatgaaaacggcgtgctccgcaaagaaatttcagagcttcaaaacgagttgacaatgcgggtttcaggcagtccagcaggttggggccatggcaccgccagatcagatccccctcttcctcactcaaccgcagtgttctcgtcggagcaggcgatgcaaccacccaccattgcaagcgttgtattcccgttgcagcagccactggcaccatcagcaatgaccaaaccacctcatgctgcaccaccactcgaactgaagctctttccagaagtggcatctgccgaaggccatgagccgtgtgaagaccacaaagctcccaaccatgtggcacgaccacaggcaaggtacccaacgcaatcagcctcatggcccgtaaacctgttctctggccttccacgaatggaagatgagcaatgcagtagcagcacaagcggcagcagcagagaggataacacagatatagaatgagtggatcagctcctacaatcaaagagtctctgttttgagtctagtggatgtaaatttgaatctcctttttggatttcagaacgatagattatactctgttggaaataggacccctcccattgcaagtctttgttggaatctctataaatgcgaatcaatcttactggcactttgcatgccgaagctatggtctgggataatcaatgtttagatacagtttagcaaagcttggccagtggccatcaaaacagaatgttgcataacatctgataattgtcaactatagaataaggggatgtttggtttttagagactaatttttagtccattcattttagtctttatgtttgtcaatttagaaactaaaatggagggaataaaaattagtctctat

SEQ ID NO: 1874 - DNA, 2166 bp, Zea Mays
atggcccttggcgcgagccagatgccaacagccctgtggatgtgggtggcagcgtggaggctcgtggccgccacacccgctgcagcgttacaggaggcgcatgcgcctagccgtggaggagcacgcggcggcacgcgccaggcgggagcgccggagggtgccgcccacgcgtccacgcgtgcccctcccccagcctgccacctcccgcacgccctcctggcccgcgcggccgcccgtcctctcggtctccgaccacgactgtgcgccttcctaagtaaccctagctcggcgccctccctccgcgacatccaagcccggcaatctcatcgtcgcgcttgcaccgttacgcagtgcgacctctgcgtcttcgaatccaggtaggaaggtagagaggaggaggaggtttgtggcaggatttgaccagcccaatggttccatccgagatggggagcgtcgccaccgccgtcagcacgcctgctgcggacaagctgctccatgggcctatctctggcaagaagtgcaagaaaccaggcccgaggaagattcataaggctgagagggagaagcttaaacgagaccacctaaatgatctctttgttgagctgggtaatatgctaggtgagcactttattgcgaaccccataatttcaggtgcccaatctgcgaatggcctactcttctttgtttcagcgttgcaatcttaagtaccattgcttcagagttcatgtttgttgtttcatgtttaaatgttatgtatgacatgccagttgtcacataccactttctgaaatgtagctgttttacatgttgcgattgaggccaggctcaggtgtttttttcagttccaccactgtcaaaactttgtttggtataatagtcttgtcttcccaagagagcatgagcatggaccattgagagtatacgaatatgcctaacatcttataatttattagacttgaattttcttgtttttttaattgaaacttgcattcatgtttaaccttgaaccctgaccatgcactttgtgtgttttgacttttgaacacaaccctgcacctgctctttcctttgtactcataacgctttatactgctcaaaatttgctacggggcttttttttggcttatcacatttagcatgcctttgcagaagcagatagacagaacaatgggaaagcatgcatactgactgacactactcggatactaagagacctgcttgttcaagtagactctcttcgaaaggaacatagcgacctacaaaacgaatctcattatgtaacaatggagagggatgagatgcaggatgaaaacggcgtgctccgcaaagaaatttcagagcttcaaaacgagttgacaatgcgggtttcaggcagtccagcaggttggggccatggcaccgccagatcagatccccctcttcctcactcaaccgcagtgttctcgtcggagcaggcgatgcaaccacccaccattgcaagcgttgtattcccgttgcagcagccactggcaccatcagcaatgaccaaaccacctcatgctgcaccaccactcgaactgaagctctttccagaagtggcatctgccgaaggccatgagccgtgtgaagaccacaaagctcccaaccatgtggcacgaccacaggcaaggtacccaacgcaatcagcctcatggcccgtaaacctgttctctggccttccacgaatggaagatgagcaatgcagtagcagcacaagcggcagcagcagagaggataacacagatatagaatgagtggatcagctcctacaatcaaagagtctctgttttgagtctagtggatgtaaatttgaatctcctttttggatttcagaacgatagattatactctgttggaaataggacccctcccattgcaagtctttgttggaatctctataaatgcgaatcaatcttactggcactttgcatgccgaagctatggtctgggataatcaatgtttagatacagtttagcaaagcttggccagtggccatcaaaacagaatgttgcataacatctgataattgtcaactatagaataaggggatgtttggtttttagagactaatttttagtccattcattttagtctttatgtttgtcaatttagaaactaaaatggagggaataaaaattagtctctat

SEQ ID NO: 1875 - DNA, 1645 bp, Zea Mays
atggcccttggcgcgagccagatgccaacagccctgtggatgtgggtggcagcgtggaggctcgtggccgccacacccgctgcagcgttacaggaggcgcatgcgcctagccgtggaggagcacgcggcggcacgcgccaggcgggagcgccggagggtgccgcccacgcgtccacgcgtgcccctcccccagcctgccacctcccgcacgccctcctggcccgcgcggccgcccgtcctctcggtctccgaccacgactgtgcgccttcctaagtaaccctagctcggcgccctccctccgcgacatccaagcccggcaatctcatcgtcgcgcttgcaccgttacgcagtgcgacctctgcgtcttcgaatccaggtaggtctctgcaggaaggtagagaggaggaggaggtttgtggcaggatttgaccagcccaatggttccatccgagatggggagcgtcgccaccgccgtcagcacgcctgctgcggacaagctgctccatgggcctatctctggcaagaagtgcaagaaaccaggcccgaggaagattcataaggctgagagggagaagcttaaacgagaccacctaaatgatctctttgttgagctgggtaatatgctagaagcagatagacagaacaatgggaaagcatgcatactgactgacactactcggatactaagagacctgcttgttcaagtagactctcttcgaaaggaacatagcgacctacaaaacgaatctcattatgtaacaatggagagggatgagatgcaggatgaaaacggcgtgctccgcaaagaaatttcagagcttcaaaacgagttgacaatgcgggtttcaggcagtccagcaggttggggccatggcaccgccagatcagatccccctcttcctcactcaaccgcagtgttctcgtcggagcaggcgatgcaaccacccaccattgcaagcgttgtattcccgttgcagcagccactggcaccatcagcaatgaccaaaccacctcatgctgcaccaccactcgaactgaagctctttccagaagtggcatctgccgaaggccatgagccgtgtgaagaccacaaagctcccaaccatgtggcacgaccacaggcaaggtacccaacgcaatcagcctcatggcccgtaaacctgttctctggccttccacgaatggaagatgagcaatgcagtagcagcacaagcggcagcagcagagaggataacacagatatagaatgagtggatcagctcctacaatcaaagagtctctgttttgagtctagtggatgtaaatttgaatctcctttttggatttcagaacgatagattatactctgttggaaataggacccctcccattgcaagtctttgttggaatctctataaatgcgaatcaatcttactggcactttgcatgccgaagctatggtctgggataatcaatgtttagatacagtttagcaaagcttggccagtggccatcaaaacagaatgttgcataacatctgataattgtcaactatagaataaggggatgtttggtttttagagactaatttttagtccattcattttagtctttatgtttgtcaatttagaaactaaaatggagggaataaaaattagtctctat

SEQ ID NO: 1876 - DNA, 1631 bp, Zea Mays
atggcccttggcgcgagccagatgccaacagccctgtggatgtgggtggcagcgtggaggctcgtggccgccacacccgctgcagcgttacaggaggcgcatgcgcctagccgtggaggagcacgcggcggcacgcgccaggcgggagcgccggagggtgccgcccacgcgtccacgcgtgcccctcccccagcctgccacctcccgcacgccctcctggcccgcgcggccgcccgtcctctcggtctccgaccacgactgtgcgccttcctaagtaaccctagctcggcgccctccctccgcgacatccaagcccggcaatctcatcgtcgcgcttgcaccgttacgcagtgcgacctctgcgtcttcgaatccaggaaggtagagaggaggaggaggtttgtggcaggatttgaccagcccaatggttccatccgagatggggagcgtcgccaccgccgtcagcacgcctgctgcggacaagctgctccatgggcctatctctggcaagaagtgcaagaaaccaggcccgaggaagattcataaggctgagagggagaagcttaaacgagaccacctaaatgatctctttgttgagctgggtaatatgctagaagcagatagacagaacaatgggaaagcatgcatactgactgacactactcggatactaagagacctgcttgttcaagtagactctcttcgaaaggaacatagcgacctacaaaacgaatctcattatgtaacaatggagagggatgagatgcaggatgaaaacggcgtgctccgcaaagaaatttcagagcttcaaaacgagttgacaatgcgggtttcaggcagtccagcaggttggggccatggcaccgccagatcagatccccctcttcctcactcaaccgcagtgttctcgtcggagcaggcgatgcaaccacccaccattgcaagcgttgtattcccgttgcagcagccactggcaccatcagcaatgaccaaaccacctcatgctgcaccaccactcgaactgaagctctttccagaagtggcatctgccgaaggccatgagccgtgtgaagaccacaaagctcccaaccatgtggcacgaccacaggcaaggtacccaacgcaatcagcctcatggcccgtaaacctgttctctggccttccacgaatggaagatgagcaatgcagtagcagcacaagcggcagcagcagagaggataacacagatatagaatgagtggatcagctcctacaatcaaagagtctctgttttgagtctagtggatgtaaatttgaatctcctttttggatttcagaacgatagattatactctgttggaaataggacccctcccattgcaagtctttgttggaatctctataaatgcgaatcaatcttactggcactttgcatgccgaagctatggtctgggataatcaatgtttagatacagtttagcaaagcttggccagtggccatcaaaacagaatgttgcataacatctgataattgtcaactatagaataaggggatgtttggtttttagagactaatttttagtccattcattttagtctttatgtttgtcaatttagaaactaaaatggagggaataaaaattagtctctat

SEQ ID NO: 1877 - DNA, 771 bp, Zea Mays
acgccgcctctaaccctccacagtccctctcgccttccccttcacaagtcacagtcacagcacatctcgcggcggctgcgtcggcggcgacagaggcaggcggcggaggcagcgtcagccatggtgcacgtgagcttctatcgcaactatggtaagactttcaagaaaccaaggcgtccttatgagaaggagcgtcttgatgctgagctgaaattggtgggtgagtatggcctgagatgcaagcgtgaactgtgccgtgtgcagtatgccctcagccgcatccgaaatgctgcaagggagctgctcacccttgatgagaagaaccccgccgtatccttgaggaccattgtcttcaagaatggcatggcaaagtccatccatcatgcgtgtgctcatcaggcagcgccacattagagttgggaggcaacttgtcaacatcccctcattcatggtgaaacttgactcagagaagcacattgacttctcccttaccagcccgctcggtggtggcgaacctggaagggtgaagagaaagaaccaaaagaaggcttctggtggaggcggtgatgatgaggaggaagagtgatcgtgtgatgctaactctttgttttgttagagcctaattttgctggctttgataggacctaattttgttacatgaaaacaaaagttggctgtcgagtttttctctctctctgaaattgcaatttaaattcttgagaactgcaattgtcgactctcgttaccgaagttttaaatgtggaggtttct

SEQ ID NO: 1878 - DNA, 865 bp, Zea Mays
acgccgcctctaaccctccacagtccctctcgccttccccttcacaagtcacagtcacagcacatctcgcggcggctgcgtcggcggcgacagaggcaggcggcggaggcagcgtcagccatggtgcacatggtaagactttcaagaaaccaaggcgtccttatgagaaggagcgtcttgatgctgagctgaaattggtgggtgagtatggcctgagatgcaagcgtgaactgtgccgtgtgcagtatgccctcagccgcatccgaaatgctgcaagggagctgctcacccttgatgagaagaaccccgccgtatccttgagggtgaggcactcctgcgccgcatgaaccgatatggtcttctcagtgagggccagaacaagcttgattacatgcttgcactcactgttgagaacttcctgcagcgccgccttcagaccattgtcttcaagaatggcatggcaaagtccatccatcatgcgtgtgctcatcaggcagcgccacattagagttgggaggcaacttgtcaacatcccctcattcatggtgaaacttgactcagagaagcacattgacttctcccttaccagcccgctcggtggtggcgaacctggaagggtgaagagaaagaaccaaaagaaggcttctggtggaggcggtgatgatgaggaggaagagtgatcgtgtgatgctaactctttgttttgttagagcctaattttgctggctttgataggacctaattttgttacatgaaaacaaaagttggctgtcgagtttttctctctctctgaaattgcaatttaaattcttgagaactgcaattgtcgactctcgttaccgaagttttaaatgtggaggtttct

SEQ ID NO: 1879 - DNA, 2100 bp, Zea Mays
gcacccgcgaacccgcccctccgtccttaacgggtcaggtctttcagacggcctcctcctaacctgacccagtgacccgacccgcagaaaaaatccagtcagcgaagggttcctctgaccgggcgaggctctcatggcggcggctgaccccgagacggcggcggcgctgcggggggaggtcgccgcgctgcggatgcgcgtacaggagctggaggcagagaatcagaggctggcaaggattgcttcgacctgtacctgcggattcaagtgtttcaaaggtgtcgcctaggtggccaggcgtacccagcttgccttgtgaaatagtgatgccttgtcgcctaggcgtccaggagggcagtgttggatccattactgcacatcataatgtgaaatttcatcaaaatagcactatggagaaagatttgagctctccatttgatcacacagtaatatccaatgcaaatgaaatgcagtgcaacagaaatgcagatgacaatggtttacctgaggattcaagcaagcatactaaaagaacaggtcgcaaggtgggcattttaagtcactgcccaaagcgactagttgctctcaaagtcatgtatttcggccagagattctatggtttttcttctgaaggtaacattgaaccaacagttgagtctgagatatttaaagcactggaaagagcaaaactgatggttgccaataggaaagaatcatgctactcgaggtgtggaagaactgacaaaggagtttctgctactggacaggtgatttctttatatctgcgatcgaacataaaggatgttgggggggacatgttagatgaaagatccgaaattgattatgtgaaggtattgaatagaattcttccaagagatatacgtgtactgggttggtgtcctgttccagcagattttcatgcaagattcacctgtttgagccgggaatataaatacttattttggaaaggggacctggatatattggaaatgcagaaagctgcatccaaattcattggagaacacgactttaggaatttttgtaagatggatgcagcaaatgtccaacaatgatgagctgtgttccatgacgatcaagggtagcgcttttctgtggcaccaagttcgctgcatggtagctgtgttatttctaataggtcaaggccttgagtcaccatccgtagttgattcactattggatattatgaaaacatctaggaaacctcaatataaaatggcgccagagcttccattgattttgcaatcttgtctatttgataaagccaactttatgtgttcagcagatgccagccggtctctgactgagcacttaaatgatgaatatcgtcaccatatgctccaagctgaaatatttcacatagcgtcatcctgtttaccttttccagaaccaaattcatcagaaacgcctcagaagaagaggaaccatattcctctcctgtcacgagagacagagccttcttacgaggagcgcatatcgaaagtcaaagcgaagctggctgataatctcaagtagagccaccgttttcaattgttacaccaatacttggaagagaacttatggaactgtagaaggtttcttccaaaagcctatatggcaccccatctcttggtgactgtcgttcgctacaggatgacggcaaagctttatttagcgctggtcggtgtcagtgtcactcatatggttgttagagctcatgctcagggatttctgaatgctgaggccttggatcttctcgctcccaaggccacgggcaggaaatcacaaacgggagaagttctatggtgtaacacccttgtacttgcacagttttacagcaaatcaaatgatagcagagtagcaggaagtaccatgttttaattcctctttctgatcaatggacttttaggaccaatttggaggcaaaaccagagagtttctctcccatcaagaattaaatgccttgtacaaatgacaccccacgcaaagatcacaagggaatttaagtttcaaactagcccttaggggatttctcaaataaagctatgctgcccattctgagttctgactgcattgtccgagtatttgtacgatgctatctac

SEQ ID NO: 1880 - DNA, 1938 bp, Zea Mays
ctcctcctaacctgacccagtgacccgacccgcagaaaaaatccagtcagcgaagggttcctctgaccgggcgaggctctcatggcggcggctgaccccgagacggcggcggcgctgcggggggaggtcgccgcgctgcggatgcgcgtacaggagctggaggcagagaatcagaggctggcaaggattgcttcgacctgtacctgcggattcaaggagggcagtgttggatccattactgcacatcataatgtgaaatttcatcaaaatagcactatggagaaagatttgagctctccatttgatcacacagtaatatccaatgcaaatgaaatgcagtgcaacagaaatgcagatgacaatggtttacctgaggattcaagcaagcatactaaaagaacaggtcgcaaggtgggcattttaagtcactgcccaaagcgactagttgctctcaaagtcatgtatttcggccagagattctatggtttttcttctgaaggtaacattgaaccaacagttgagtctgagatatttaaagcactggaaagagcaaaactgatggttgccaataggaaagaatcatgctactcgaggtgtggaagaactgacaaaggagtttctgctactggacaggtgatttctttatatctgcgatcgaacataaaggatgttgggggggacatgttagatgaaagatccgaattcttccaagagatatacgtgtactgggttggtgtcctgttccagcagattttcatgcaagattcacctgtttgagccgggaatataaatacttattttggaaaggggacctggatatattggaaatgcagaaagctgcatccaaattcattggagaacacgactttaggaatttttgtaagatggatgcagcaaatgtccaacaatgatgagctgtgttccatgacgatcaagggtagcgcttttctgtggcaccaagttcgctgcatggtagctgtgttatttctaataggtcaaggccttgagtcaccatccgtagttgattcactattggatattatgaaaacatctaggaaacctcaatataaaatggcgccagagcttccattgattttgcaatcttgtctatttgataaagccaactttatgtgttcagcagatgccagccggtctctgactgagcacttaaatgatgaatatcgtcaccatatgctccaagctgaaatatttcacatagcgtcatcctgtttaccttttccagaaccaaattcatcagaaacgcctcagaagaagaggaaccatattcctctcctgtcacgagagacagagccttcttacgaggagcgcatatcgaaagtcaaagcgaagctggctgataatctcaagtagagccaccgttttcaattgttacaccaatacttggaagagaacttatggaactgtagaaggtttcttccaaaagcctatatggcaccccatctcttggtgactgtcgttcgctacaggatgacggcaaagctttatttagcgctggtcggtgtcagtgtcactcatatggttgttagagctcatgctcagggatttctgaatgctgaggccttggatcttctcgctcccaaggccacgggcaggaaatcacaaacgggagaagttctatggtgtaacacccttgtacttgcacagttttacagcaaatcaaatgatagcagagtagcaggaagtaccatgttttaattcctctttctgatcaatggacttttaggaccaatttggaggcaaaaccagagagtttctctcccatcaagaattaaatgccttgtacaaatgacaccccacgcaaagatcacaagggaatttaagtttcaaactagcccttaggggatttctcaaataaagctatgctgcccattctgagttctgactgcattgtccgagtatttgtacgatgctatctac

SEQ ID NO: 1881 - DNA, 1917 bp, Zea Mays
gacccgcagaaaaaatccagtcagcgaagggttcctctgaccgggcgaggctctcatggcggcggctgaccccgagacggcggcggcgctgcggggggaggtcgccgcgctgcggatgcgcgtacaggagctggaggcagagaatcagaggctggcaaggattgcttcgacctgtacctgcggattcaaggagggcagtgttggatccattactgcacatcataatgtgaaatttcatcaaaatagcactatggagaaagatttgagctctccatttgatcacacagtaatatccaatgcaaatgaaatgcagtgcaacagaaatgcagatgacaatggtttacctgaggattcaagcaagcatactaaaagaacaggtcgcaaggtgggcattttaagtcactgcccaaagcgactagttgctctcaaagtcatgtatttcggccagagattctatggtttttcttctgaaggtaacattgaaccaacagttgagtctgagatatttaaagcactggaaagagcaaaactgatggttgccaataggaaagaatcatgctactcgaggtgtggaagaactgacaaaggagtttctgctactggacaggtgatttctttatatctgcgatcgaacataaaggatgttgggggggacatgttagatgaaagatccgaaattgattatgtgaaggtattgaatagaattcttccaagagatatacgtgtactgggttggtgtcctgttccagcagattttcatgcaagattcacctgtttgagccgggaatataaatacttattttggaaaggggacctggatatattggaaatgcagaaagctgcatccaaattcattggagaacacgactttaggaatttttgtaagatggatgcagcaaatgtccaacaatgatgagctgtgttccatgacgatcaagggtagcgcttttctgtggcaccaagttcgctgcatggtagctgtgttatttctaataggtagttgattcactattggatattatgaaaacatctaggaaacctcaatataaaatggcgccagagcttccattgattttgcaatcttgtctatttgataaagccaactttatgtgttcagcagatgccagccggtctctgactgagcacttaaatgatgaatatcgtcaccatatgctccaagctgaaatatttcacatagcgtcatcctgtttaccttttccagaaccaaattcatcagaaacgcctcagaagaagaggaaccatattcctctcctgtcacgagagacagagccttcttacgaggagcgcatatcgaaagtcaaagcgaagctggctgataatctcaagtagagccaccgttttcaattgttacaccaatacttggaagagaacttatggaactgtagaaggtttcttccaaaagcctatatggcaccccatctcttggtgactgtcgttcgctacaggatgacggcaaagctttatttagcgctggtcggtgtcagtgtcactcatatggttgttagagctcatgctcagggatttctgaatgctgaggccttggatcttctcgctcccaaggccacgggcaggaaatcacaaacgggagaagttctatggtgtaacacccttgtacttgcacagttttacagcaaatcaaatgatagcagagtagcaggaagtaccatgttttaattcctctttctgatcaatggacttttaggaccaatttggaggcaaaaccagagagtttctctcccatcaagaattaaatgccttgtacaaatgacaccccacgcaaagatcacaagggaatttaagtttcaaactagcccttaggggatttctcaaataaagctatgctgcccattctgagttctgactgcattgtccgagtatttgtacgatgctatctac

SEQ ID NO: 1882 - DNA, 2074 bp, Zea Mays
aaaaaatccagtcagcgaagggttcctctgaccgggcgaggctctcatggcggcggctgaccccgagacggcggcggcgctgcggggggaggtcgccgcgctgcggatgcgcgtacaggagctggaggcagagaatcagaggctggcaaggattgcttcgacctgtacctgcggattcaagggcagtgtttcaaaggtgtcgcctaggtggccaggcgtacccagcttgccttgtgaaatagtgatgccttgtcgcctaggcgtccaggagggcagtgttggatccattactgcacatcataatgtgaaatttcatcaaaatagcactatggagaaagatttgagctctccatttgatcacacagtaatatccaatgcaaatgaaatgcagtgcaacagaaatgcagatgacaatggtttacctgaggattcaagcaagcatactaaaagaacaggtcgcaaggtgggcattttaagtcactgcccaaagcgactagttgctctcaaagtcatgtatttcggccagagattctatggtttttcttctgaaggtaacattgaaccaacagttgagtctgagatatttaaagcactggaaagagcaaaactgatggttgccaataggaaagaatcatgctactcgaggtgtggaagaactgacaaaggagtttctgctactggacaggtgatttctttatatctgcgatcgaacataaaggatgttgggggggacatgttagatgaaagatccgaaattgattatgtgaaggtattgaatagaattcttccaagagatatacgtgtactgggttggtgtcctgttccagcagattttcatgcaagattcacctgtttgagccgggaatataaatacttattttggaaaggggacctggatatattggaaatgcagaaagctgcatccaaattcattggagaacacgactttaggaatttttgtaagatggatgcagcaaatgtgagtaactacaggcggcacattacagaatttactatttctgcatgtgacagaaggtccaacaatgatgagctgtgttccatgacgatcaagggtagcgcttttctgtggcaccaagttcgctgcatggtagctgtgttatttctaataggtcaaggccttgagtcaccatccgtagttgattcactattggatattatgaaaacatctaggaaacctcaatataaaatggcgccagagcttccattgattttgcaatcttgtctatttgataaagccaactttatgtgttcagcagatgccagccggtctctgactgagcacttaaatgatgaatatcgtcaccatatgctccaagctgaaatatttcacatagcgtcatcctgtttaccttttccagaaccaaattcatcagaaacgcctcagaagaagaggaaccatattcctctcctgtcacgagagacagagccttcttacgaggagcgcatatcgaaagtcaaagcgaagctggctgataatctcaagtagagccaccgttttcaattgttacaccaatacttggaagagaacttatggaactgtagaaggtttcttccaaaagcctatatggcaccccatctcttggtgactgtcgttcgctacaggatgacggcaaagctttatttagcgctggtcggtgtcagtgtcactcatatggttgttagagctcatgctcagggatttctgaatgctgaggccttggatcttctcgctcccaaggccacgggcaggaaatcacaaacgggagaagttctatggtgtaacacccttgtacttgcacagttttacagcaaatcaaatgatagcagagtagcaggaagtaccatgttttaattcctctttctgatcaatggacttttaggaccaatttggaggcaaaaccagagagtttctctcccatcaagaattaaatgccttgtacaaatgacaccccacgcaaagatcacaagggaatttaagtttcaaactagcccttaggggatttctcaaataaagctatgctgcccattctgagttctgactgcattgtccgagtatttgtacgatgctatctac

SEQ ID NO: 1883 - DNA, 1973 bp, Zea Mays
aaaaaatccagtcagcgaagggttcctctgaccgggcgaggctctcatggcggcggctgaccccgagacggcggcggcgctgcggggggaggtcgccgcgctgcggatgcgcgtacaggagctggaggcagagaatcagaggctggcaaggattgcttcgacctgtacctgcggattcaagggcagtgtttcaaaggtgtcgcctaggtggccaggcgtacccagcttgccttgtgaaatagtgatgccttgtcgcctaggcgtccaggagggcagtgttggatccattactgcacatcataatgtgaaatttcatcaaaatagcactatggagaaagatttgagctctccatttgatcacacagtaatatccaatgcaaatgaaatgcagtgcaacagaaatgcagatgacaatggtttacctgaggattcaagcaagcatactaaaagaacagattctatggtttttcttctgaaggtaacattgaaccaacagttgagtctgagatatttaaagcactggaaagagcaaaactgatggttgccaataggaaagaatcatgctactcgaggtgtggaagaactgacaaaggagtttctgctactggacaggtgatttctttatatctgcgatcgaacataaaggatgttgggggggacatgttagatgaaagatccgaattcttccaagagatatacgtgtactgggttggtgtcctgttccagcagattttcatgcaagattcacctgtttgagccgggaatataaatacttattttggaaaggggacctggatatattggaaatgcagaaagctgcatccaaattcattggagaacacgactttaggaatttttgtaagatggatgcagcaaatgtgagtaactacaggcggcacattacagaatttactatttctgcatgtgacagaaggtccaacaatgatgagctgtgttccatgacgatcaagggtagcgcttttctgtggcaccaagttcgctgcatggtagctgtgttatttctaataggtcaaggccttgagtcaccatccgtagttgattcactattggatattatgaaaacatctaggaaacctcaatataaaatggcgccagagcttccattgattttgcaatcttgtctatttgataaagccaactttatgtgttcagcagatgccagccggtctctgactgagcacttaaatgatgaatatcgtcaccatatgctccaagctgaaatatttcacatagcgtcatcctgtttaccttttccagaaccaaattcatcagaaacgcctcagaagaagaggaaccatattcctctcctgtcacgagagacagagccttcttacgaggagcgcatatcgaaagtcaaagcgaagctggctgataatctcaagtagagccaccgttttcaattgttacaccaatacttggaagagaacttatggaactgtagaaggtttcttccaaaagcctatatggcaccccatctcttggtgactgtcgttcgctacaggatgacggcaaagctttatttagcgctggtcggtgtcagtgtcactcatatggttgttagagctcatgctcagggatttctgaatgctgaggccttggatcttctcgctcccaaggccacgggcaggaaatcacaaacgggagaagttctatggtgtaacacccttgtacttgcacagttttacagcaaatcaaatgatagcagagtagcaggaagtaccatgttttaattcctctttctgatcaatggacttttaggaccaatttggaggcaaaaccagagagtttctctcccatcaagaattaaatgccttgtacaaatgacaccccacgcaaagatcacaagggaatttaagtttcaaactagcccttaggggatttctcaaataaagctatgctgcccattctgagttctgactgcattgtccgagtatttgtacgatgctatctac

SEQ ID NO: 1884 - DNA, 3400 bp, Zea Mays
gtcagcgaagggttcctctgaccgggcgaggctctcatggcggcggctgaccccgagacggcggcggcgctgcggggggaggtcgccgcgctgcggatgcgcgtacaggagctggaggcagagaatcagaggctggcaaggattgcttcgacctgtacctgcggattcaagctgcagcagcccgaatagccagctttaattcgaagcgaacaacctgtatgattcagtcagctccagaagatgcaattgccactgttgtttatgagagctaattagagcatctccaagagaggttttaaatgtgaccctattttaatatagggctcggaaccataaaacacccttccaacaatggccatattttataaaatttcaccaaacgattatatggcttggtctcttgggtcctaaatatagtaccctatatactgaagccctattctcattaactctctccaaccattagtttcctaataccatgatttatttcctaaatagtattgtttaaggcctgactgttggaggacaaaattgttttgaggccctaaacaatctaaacacggtcctatttcaaaatttaggactattttagagtttattgttggagatgctcttagaacttatctttctggcatcgaccaaaacttttttaaggttgtttctctgcctataaattgttgcgacatgataatctttgttatagcatgtgctgacatgaattacagggagaattgagaacatgtaatggttgtttgctgccagagaatacatgctaacagaaagtttccatccatttagaattatatgctaacagaaagtttccatccatttagaattatattaaattagtgtccttaatattggctgtcaccatgactatgtgaatgcgaatttctatatgtttatggcattatggcaatcgccaacactattatatgcatattcatatatatatatgtgtggaaatcaagtgcgatgcatcatccactcaaggttcaaaaaagtttagattaattcgtttgcatatgtaggattgtatcttgatgttgatacctttccttaaagcaagtcaataccctgcatatcatgtaccgtagggcagtgtttcaaaggtgtcgcctaggtggccaggcgtacccagcttgccttgtgaaatagtgatgccttgtcgcctaggcgtccaggagggcagtgttggatccattactgcacatcataatgtgaaatttcatcaaaatagcactatggagaaagatttgagctctccatttgatcacacagtaatatccaatgcaaatgaaatgcagtgcaacagaaatgcagatgacaatggtttacctgaggattcaagcaagcatactaaaagaacagattctatggtttttcttctgaaggtaacattgaaccaacagttgagtctgagatatttaaagcactggaaagagcaaaactgatggttgccaataggaaagaatcatgctactcgaggtgtggaagaactgacaaaggagtttctgctactggacaggtgatttctttatatctgcgatcgaacataaaggatgttgggggggacatgttagatgaaagatccgaaattgattatgtgaaggtattgaatagaattcttccaagagatatacgtgtactgggttggtgtcctgttccagcagattttcatgcaagattcacctgtttgagccgggaatataaatacttattttggaaaggggacctggatatattggaaatgcagaaagctgcatccaaattcattggagaacacgactttaggaatttttgtaagatggatgcagcaaatgtccaacaatgatgagctgtgttccatgacgatcaagggtagcgcttttctgtggcaccaagttcgctgcatggtagctgtgttatttctaataggtcaaggccttgagtcaccatccgtagttgattcactattggatattatgaaaacatctaggaaacctcaatataaaatggcgccagagcttccattgattttgcaatcttgtctatttgataaagccaactttatgtgttcagcagatgccagccggtctctgactgagcacttaaatgatgaatatcgtcaccatatgctccaagctgaaatatttcacatagcgtcatcctgtttaccttttccagaaccaaattcatcagaaacgcctcagaagaagaggaaccatattcctctcctgtcacgagagacagagccttcttacgaggagcgcatatcgaaagtcaaagcgaagctggctgataatctcaagtagagccaccgttttcaattgttacaccaatacttggaagagaacttatggaactgtagaaggtttcttccaaaagcctatatgtttatgacgtgcgctttttttatggcaaaattggatctgttaacatgtggagatggaaattacccggaaacatgagcttagcgtggattttaccattttgaggtgttagaaaagcgtgctgcctattttagactagatatacagactaaaacatatggagccccacatttcgggtattgtcaagttgtgcgtttcactttcaaaatagtgtaagggccttgtgttttttttcttcttctgaatttgttgtaaaatagtctagcatcccttgcaaagagggggtaatgttgttgtcacatgatggtgtgtaccaaagtgtagtaaagcatcccttgcaaagagggggtggtagtgtcctgtatgtttttttaagcaaatgtgacaaactatataagaaatgaatatttcatgtgagttatgtatttccagccgtattatttaggttacttgcattcatatttaagcagcttacaaggaatgcacgttactctgagatcagaatcatttaagtgtccatctaccctttccttgcttacagggcaccccatctcttggtgactgtcgttcgctacaggatgacggcaaagctttatttagcgctggtcggtgtcagtgtcactcatatggttgttagagctcatgctcagggatttctgaatgctgaggccttggatcttctcgctcccaaggccacgggcaggaaatcacaaacgggagaagttctatggtgtaacacccttgtacttgcacagttttacagcaaatcaaatgatagcagagtagcaggaagtaccatgttttaattcctctttctgatcaatggacttttaggaccaatttggaggcaaaaccagagagtttctctcccatcaagaattaaatgccttgtacaaatgacaccccacgcaaagatcacaagggaatttaagtttcaaactagcccttaggggatttctcaaataaagctatgctgcccattctgagttctgactgcattgtccgagtatttgtacgatgctatctac

SEQ ID NO: 1885 - DNA, 1921 bp, Zea Mays
gtcagcgaagggttcctctgaccgggcgaggctctcatggcggcggctgaccccgagacggcggcggcgctgcggggggaggtcgccgcgctgcggatgcgcgtacaggagctggaggcagagaatcagaggctggcaaggattgcttcgacctgtacctgcggattcaaggagggcagtgttggatccattactgcacatcataatgtgaaatttcatcaaaatagcactatggagaaagatttgagctctccatttgatcacacagtaatatccaatgcaaatgaaatgcagtgcaacagaaatgcagatgacaatggtttacctgaggattcaagcaagcatactaaaagaacaggtcgcaaggtgggcattttaagtcactgcccaaagcgactagttgctctcaaagtcatgtatttcggccagagattctatggtttttcttctgaaggtaacattgaaccaacagttgagtctgagatatttaaagcactggaaagagcaaaactgatggttgccaataggaaagaatcatgctactcgaggtgtggaagaactgacaaaggagtttctgctactggacaggtgatttctttatatctgcgatcgaacataaaggatgttgggggggacatgttagatgaaagatccgaaattgattatgtgaaggtattgaatagaattcttccaagagatatacgtgtactgggttggtgtcctgttccagcagattttcatgcaagattcacctgtttgagccgggaatataaatacttattttggaaaggggacctggatatattggaaatgcagaaagctgcatccaaattcattggagaacacgactttaggaatttttgtaagatggatgcagcaaatgtccaacaatgatgagctgtgttccatgacgatcaagggtagcgcttttctgtggcaccaagttcgctgcatggtagctgtgttatttctaataggtcaaggccttgagtcaccatccgtagttgattcactattggatattatgaaaacatctaggaaacctcaatataaaatggcgccagagcttccattgattttgcaatcttgtctatttgataaagccaactttatgtgttcagcagatgccagccggtctctgactgagcacttaaatgatgaatatcgtcaccatatgctccaagctgaaatatttcacatagcgtcatcctgtttaccttttccagaaccaaattcatcagaaacgcctcagaagaagaggaaccatattcctctcctgtcacgagagacagagccttcttacgaggagcgcatatcgaaagtcaaagcgaagctggctgataatctcaagtagagccaccgttttcaattgttacaccaatacttggaagagaacttatggaactgtagaaggtttcttccaaaagcctatatggcaccccatctcttggtgactgtcgttcgctacaggatgacggcaaagctttatttagcgctggtcggtgtcagtgtcactcatatggttgttagagctcatgctcagggatttctgaatgctgaggccttggatcttctcgctcccaaggccacgggcaggaaatcacaaacgggagaagttctatggtgtaacacccttgtacttgcacagttttacagcaaatcaaatgatagcagagtagcaggaagtaccatgttttaattcctctttctgatcaatggacttttaggaccaatttggaggcaaaaccagagagtttctctcccatcaagaattaaatgccttgtacaaatgacaccccacgcaaagatcacaagggaatttaagtttcaaactagcccttaggggatttctcaaataaagctatgctgcccattctgagttctgactgcattgtccgagtatttgtacgatgctatctac

SEQ ID NO: 1886 - DNA, 2051 bp, Zea Mays
gtcagcgaagggttcctctgaccgggcgaggctctcatggcggcggctgaccccgagacggcggcggcgctgcggggggaggtcgccgcgctgcggatgcgcgtacaggagctggaggcagagaatcagaggctggcaaggattgcttcgacctgtacctgcggattcaaggattgtatcttgatgttgatacctttccttaaagcaagtcaataccctgcatatcatgtaccgtagggcagtgtttcaaaggtgtcgcctaggtggccaggcgtacccagcttgccttgtgaaatagtgatgccttgtcgcctaggcgtccaggagggcagtgttggatccattactgcacatcataatgtgaaatttcatcaaaatagcactatggagaaagatttgagctctccatttgatcacacagtaatatccaatgcaaatgaaatgcagtgcaacagaaatgcagatgacaatggtttacctgaggattcaagcaagcatactaaaagaacaggtcgcaaggtgggcattttaagtcactgcccaaagcgactagttgctctcaaagtcatgtatttcggccagagattctatggtttttcttctgaaggtaacattgaaccaacagttgagtctgagatatttaaagcactggaaagagcaaaactgatggttgccaataggaaagaatcatgctactcgaggtgtggaagaactgacaaaggagtttctgctactggacaggtgatttctttatatctgcgatcgaacataaaggatgttgggggggacatgttagatgaaagatccgaaattgattatgtgaaggtattgaatagaattcttccaagagatatacgtgtactgggttggtgtcctgttccagcagattttcatgcaagattcacctgtttgagccgggaatataaatacttattttggaaaggggacctggatatattggaaatgcagaaagctgcatccaaattcattggagaacacgactttaggaatttttgtaagatggatgcagcaaatgtccaacaatgatgagctgtgttccatgacgatcaagggtagcgcttttctgtggcaccaagttcgctgcatggtagctgtgttatttctaataggtagttgattcactattggatattatgaaaacatctaggaaacctcaatataaaatggcgccagagcttccattgattttgcaatcttgtctatttgataaagccaactttatgtgttcagcagatgccagccggtctctgactgagcacttaaatgatgaatatcgtcaccatatgctccaagctgaaatatttcacatagcgtcatcctgtttaccttttccagaaccaaattcatcagaaacgcctcagaagaagaggaaccatattcctctcctgtcacgagagacagagccttcttacgaggagcgcatatcgaaagtcaaagcgaagctggctgataatctcaagtagagccaccgttttcaattgttacaccaatacttggaagagaacttatggaactgtagaaggtttcttccaaaagcctatatggcaccccatctcttggtgactgtcgttcgctacaggatgacggcaaagctttatttagcgctggtcggtgtcagtgtcactcatatggttgttagagctcatgctcagggatttctgaatgctgaggccttggatcttctcgctcccaaggccacgggcaggaaatcacaaacgggagaagttctatggtgtaacacccttgtacttgcacagttttacagcaaatcaaatgatagcagagtagcaggaagtaccatgttttaattcctctttctgatcaatggacttttaggaccaatttggaggcaaaaccagagagtttctctcccatcaagaattaaatgccttgtacaaatgacaccccacgcaaagatcacaagggaatttaagtttcaaactagcccttaggggatttctcaaataaagctatgctgcccattctgagttctgactgcattgtccgagtatttgtacgatgctatctac

SEQ ID NO: 1887 - DNA, 2008 bp, Zea Mays
gtcagcgaagggttcctctgaccgggcgaggctctcatggcggcggctgaccccgagacggcggcggcgctgcggggggaggtcgccgcgctgcggatgcgcgtacaggagctggaggcagagaatcagaggctggcaaggattgcttcgacctgtacctgcggattcaagggcagtgtttcaaaggtgtcgcctaggtggccaggcgtacccagcttgccttgtgaaatagtgatgccttgtcgcctaggcgtccaggagggcagtgttggatccattactgcacatcataatgtgaaatttcatcaaaatagcactatggagaaagatttgagctctccatttgatcacacagtaatatccaatgcaaatgaaatgcagtgcaacagaaatgcagatgacaatggtttacctgaggattcaagcaagcatactaaaagaacaggtcgcaaggtgggcattttaagtcactgcccaaagcgactagttgctctcaaagtcatgtatttcggccagagattctatggtttttcttctgaaggtaacattgaaccaacagttgagtctgagatatttaaagcactggaaagagcaaaactgatggttgccaataggaaagaatcatgctactcgaggtgtggaagaactgacaaaggagtttctgctactggacaggtgatttctttatatctgcgatcgaacataaaggatgttgggggggacatgttagatgaaagatccgaaattgattatgtgaaggtattgaatagaattcttccaagagatatacgtgtactgggttggtgtcctgttccagcagattttcatgcaagattcacctgtttgagccgggaatataaatacttattttggaaaggggacctggatatattggaaatgcagaaagctgcatccaaattcattggagaacacgactttaggaatttttgtaagatggatgcagcaaatgtccaacaatgatgagctgtgttccatgacgatcaagggtagcgcttttctgtggcaccaagttcgctgcatggtagctgtgttatttctaataggtcaaggccttgagtcaccatccgtagttgattcactattggatattatgaaaacatctaggaaacctcaatataaaatggcgccagagcttccattgattttgcaatcttgtctatttgataaagccaactttatgtgttcagcagatgccagccggtctctgactgagcacttaaatgatgaatatcgtcaccatatgctccaagctgaaatatttcacatagcgtcatcctgtttaccttttccagaaccaaattcatcagaaacgcctcagaagaagaggaaccatattcctctcctgtcacgagagacagagccttcttacgaggagcgcatatcgaaagtcaaagcgaagctggctgataatctcaagtagagccaccgttttcaattgttacaccaatacttggaagagaacttatggaactgtagaaggtttcttccaaaagcctatatggcaccccatctcttggtgactgtcgttcgctacaggatgacggcaaagctttatttagcgctggtcggtgtcagtgtcactcatatggttgttagagctcatgctcagggatttctgaatgctgaggccttggatcttctcgctcccaaggccacgggcaggaaatcacaaacgggagaagttctatggtgtaacacccttgtacttgcacagttttacagcaaatcaaatgatagcagagtagcaggaagtaccatgttttaattcctctttctgatcaatggacttttaggaccaatttggaggcaaaaccagagagtttctctcccatcaagaattaaatgccttgtacaaatgacaccccacgcaaagatcacaagggaatttaagtttcaaactagcccttaggggatttctcaaataaagctatgctgcccattctgagttctgactgcattgtccgagtatttgtacgatgctatctac

SEQ ID NO: 1888 - DNA, 1180 bp, Zea Mays
  misc_feature (1179)..(1180): n is a, c, g, or t
cgcatggttcttctgaatccaggtcacatgtcaggtttgcatggataaggagagcctgaaggaatacattctatgcgaatataaccgtgatgctgactcctaccggtcagaaattcacgatttcctccatcgtcacatttacattttgttcatgttctccaccagcactggactgtcattattttgtagcgcatgttgcaaaatagactctcattgcagtgcctgatctgaatgaataaacatgacccacaccagaactttaaatcctttttggaggaagctcttattttttccctcaaacaccaggagagctgcatatctttaggctgtctccagcaaggttctctaaatttcgtcctctaaagaaatattctttgtcctttacagcatcctctaaaaaattttgtcctctatatcttcttcatctccggcaacatcctctaaaaccggtcctctatatctacagttttaacataatccatatattattaataaaacaaatatccgtgatcattgcatgcatattaatccgtatttatttacaaaattacgagacatttaaatactgcaaattattttttattcatattaataaatatgttgtacagctgcactcgcacagtggcacaattgcattttttctctttgttggatgctcgtccggtgactttcgcatcgcgctgccgcttttcctcactggccgagctcgtccgctgctgctcctcctcgatcgccatgcaccacgccgcagacgagctcctccgttcttctgctcctcgcctactgtcgcgctcgtgctcctccaggcggtccgccgcacaagctcgtccttgtccctggtgatttgctgcgcgggctgcttctcgtctttggcgatcggcgctggcgatcggcgcgtgtgctcctcctcgtccccgacgattcgattcactggacgggcgggctgcttctcgtcttcggcggcggccgatgtctattgtgttgcccacgctcattggccggatagcggacgcacaaccatccgccacaaatagcgtgcgcaaggaccatcctctactttaccggaacctttacatccttgttggacacgatacaggatgtttggttctctaaatttggcgtacaggacggtatagcggcccttgctggagcaagtcttatatattagagagaaaaaann

SEQ ID NO: 1889 - DNA, 3044 bp, Zea Mays
atatgaggtacagagaaggatggatccgacgtacccttgaccgggtgacgggtctggggtccgagggacccagactcatcatcccgggtatgattgtcagtgcggtggccgattggcccatcagcgcgtgatccggcaggttgtcgcgaaggagccgactcggtgccgagaacacccggctgggatgcggagttgacgcgcgcatcgcgctcgaagaacttgttgagtttggagatctccaggcggatgtcagacaccgaagattcgatctccggcttccatgcagtgaaggatcgatcaaattcagtggcagcttcctccagggcttggatgcgaacgttgcggttctcctcagccacagataaatcagtgaatctctgattcagaattgcgtcatggtcagcgaaacccttggcgatttccttggaaacttccgtccgcatcaatctcatcatctcctcgaacatggacttgaggttgggatccatggctcccaaccccttctgtcgacgagtatagtaacggtggtgctgctccagaccggaacgagggctttgataccaattgttaggagatgctaggagggaggaagaagacttggacaggaagaagagcagatggcagagtagataggcagagcgacagtctgtccagaattcttattacaagtctgatgccttttccctaatcaatattcccttatatctcaattacaactcacacaaactccctaagccgagtactaggccggcgcagcctggatccccttcgtgggcctgcattggatggttcttctgtcggacttgttacagcagtagtaacacaggccgtggcttttatcatcatcaatcacaagtaacaacagtatcgcaagtagtaaacatgaagcgcgaagcgggtcgatggaagcacgggggagccagctaaaccagtccatacaacaccacctctcaagtgacaagagtatcgcaagaacacagcaacagtggcgactgcacaagcacaaacgcacgcgcagccgcgctccacaagttaacttgaatcgtcacatacatagaaataggtcactcagcctagacggcagcagcagcagaaggaaaccctcagaagaggtagcagcagtagtaggcgagcaggggagccgccacggcagccaacagggcggtcgccgtcatcggaggagagctcgccgccgcggcgcgcggtgaagatgccgccgcgccaccgctcgatgaccccccggcggcggacggtgcaggtgctgcgaatgacaacagcttggtggtcagaaactcagaacccaccacagctttattacagttggatcataacagcaactgtattactgaacgcccatttcaggatggttccacgaacgaacaaaaccactccagtccatccactagtttggccaaaggtgtgtagtgtagtcaacatacattattccacaggcattaaagagaagaaaaaaaatgctggccgagtactcccgtgacttgccagtcagactgtgcccgtgacaactgtgccagagaaacggctgcaggtctccaggaattaagtaatgatacttttgcacggcgacccatggtctagtactgaaggacaggcgatgaaatgtttcatgttggaatgctaaacctagagtagcaagttatctccaacaacagaatccttacccatctcatatctcactctttatttcaaactctatattcaactctctactttaaactctggtcaatatattttacatgctcgagatggcctaataataatagtgccatcataacgaggctaactaggcaggcttcaaacagctctatgtcaccaaaatcctaggtgggaacatagagggagagaagaaagtgagtgcttatggctccctagaattctagggggagaaagagcttgcttgcgtgagttaaagatgactctttcttttttttctgtcaatctaaatgatgactctctctaacttaagagtcatagaagaataagctcactatatgtatcgggtattattattggctatggcaagagtacgaagccttttagttaattcttctattagccttgctctcagtcactcctctgctgaaggtaataaaatcgtctgattcagatgagctgcagggtcacccctctaacacactcggtcgtaccgatcatgcctagatctatttcaaacttcaacagaacgatcagctgaccacactctatcgctttctacagctcaactgaatcaggcgatggttaaagaaaccgaaccgttggctagcatacaggtttcttctcttcactcctatacataattctgtctatattgttttgtagcgcacatgccatgcaatcactcgcaaagatacaaaggtgattggaaataacagctgaggattctttgctggcaaacaaaaatgttgcggacccatagttatgccaaaggagcggaacaccacacatgcatgtggagatgttttgagcgtgttacagctcatcagcttcttttctagcagaagaaagacaaaacacatttatactcttgtgacagctaagaattctgttttttcttccattttttttaaaaaaacaaaaactttattcttggaaaacggacagctaaaaaattcagatcttgttttttcccagttgaagttattgtacagttctagcatatatttgttctgttcatacttgaagatctaaagttctaaacaggcgtaacactgcaaaaattcatagagcataatctaagtactaatatgtgccgattgttcctaaaaatcatagagtgtaataaaggcgcatgtcgttacacagagattagacggacgtaaaagaaaagacagtgaaactgatagtgaggcatagagttaccttcggttgggggaagcagggaaactgctcggggagaagcaaggatgaggaaaggctcgggtggtgctcactgttgcacttgctgaaggcggcgttggacgcgccgcacgcgccggggagcgccagcacgcgcttcatgtcgatgggaaagcccaggttactggagt

SEQ ID NO: 1890 - DNA, 3172 bp, Zea Mays
atatgaggtacagagaaggatggatccgacgtacccttgaccgggtgacgggtctggggtccgagggacccagactcatcatcccgggtatgattgtcagtgcggtggccgattggcccatcagcgcgtgatccggcaggttgtcgcgaaggagccgactcggtgccgagaacacccggctgggatgcggagttgacgcgcgcatcgcgctcgaagaacttgttgagtttggagatctccaggcggatgtcagacaccgaagattcgatctccggcttccatgcagtgaaggatcgatcaaattcagtggcagcttcctccagggcttggatgcgaacgttgcggttctcctcagccacagataaatcagtgaatctctgattcagaattgcgtcatggtcagcgaaacccttggcgatttccttggaaacttccgtccgcatcaatctcatcatctcctcgaacatggacttgaggttgggatccatggctcccaaccccttctgtcgacgagtatagtaacggtggtgctgctccagaccggaacgagggctttgataccaattgttaggagatgctaggagggaggaagaagacttggacaggaagaagagcagatggcagagtagataggcagagcgacagtctgtccagaattcttattacaagtctgatgccttttccctaatcaatattcccttatatctcaattacaactcacacaaactccctaagccgagtactaggccggcgcagcctggatccccttcgtgggcctgcattggatggttcttctgtcggacttgttacagcagtagtaacacaggccgtggcttttatcatcatcaatcacaagtaacaacagtatcgcaagtagtaaacatgaagcgcgaagcgggtcgatggaagcacgggggagccagctaaaccagtccatacaacaccacctctcaagtgacaagagtatcgcaagaacacagcaacagtggcgactgcacaagcacaaacgcacgcgcagccgcgctccacaagttaacttgaatcgtcacatacatagaaataggtcactcagcctagacggcagcagcagcagaaggaaaccctcagaagaggtagcagcagtagtaggcgagcaggggagccgccacggcagccaacagggcggtcgccgtcatcggaggagagctcgccgccgcggcgcgcggtgaagatgccgccgcgccaccgctcgatgaccccccggcggcggacggtgcaggtgctgcgaatgacaacagcttggtggtcagaaactcagaacccaccacagctttattacagttggatcataacagcaactgtattactgaacgcccatttcaggatggttccacgaacgaacaaaaccactccagtccatccactagtttggccaaaggtgtgtagtgtagtcaacatacattattccacaggcattaaagagaagaaaaaaaatgctggccgagtactcccgtgacttgccagtcagactgtgcccgtgacaactgtgccagagaaacggctgcaggtctccaggaattaagtaatgatacttttgcacggcgacccatggtctagtactgaaggacaggcgatgaaatgtttcatgttggaatgctaaacctagagtagcaagttatctccaacaacagaatccttacccatctcatatctcactctttatttcaaactctatattcaactctctactttaaactctggtcaatatattttacatgctcgagatggcctaataataatagtgccatcataacgaggctaactaggcaggcttcaaacagctctatgtcaccaaaatcctaggtgggaacatagagggagagaagaaagtgagtgcttatggctccctagaattctagggggagaaagagcttgcttgcgtgagttaaagatgactctttcttttttttctgtcaatctaaatgatgactctctctaacttaagagtcatagaagaataagctcactatatgtatcgggtattattattggctatggcaagagtacgaagccttttagttaattcttctattagccttgctctcagtcactcctctgctgaaggtaataaaatcgtctgattcagatgagctgcagggtcacccctctaacacactcggtcgtaccgatcatgcctagatctatttcaaacttcaacagaacgatcagctgaccacactctatcgctttctacagctcaactgaatcaggcgatggttaaagaaaccgaaccgttggctagcatacaggtttcttctcttcactcctatacataattctgtctatattgttttgtagcgcacatgccatgcaatcactcgcaaagatacaaaggtgattggaaataacagctgaggattctttgctggcaaacaaaaatgttgcggacccatagttatgccaaaggagcggaacaccacacatgcatgtggagatgttttgagcgtgttacagctcatcagcttcttttctagcagaagaaagacaaaacacatttatactcttgtgacagctaagaattctgttttttcttccattttttttaaaaaaacaaaaactttattcttggaaaacggacagctaaaaaattcagatcttgttttttcccagttgaagttattgtacagttctagcatatatttgttctgttcatacttgaagatctaaagttctaaacaggcgtaacactgcaaaaattcatagagcataatctaagtactaatatgtgccgattgttcctaaaaatcatagagtgtaataaaggcgcatgtcgttacacagagattagacggacgtaaaagaaaagacagtgaaactgatagtgaggcatagagttaccttcggttgggggaagcgcggaaactgcaagcaaaagagtgggtgtaaggaaattttttggaggagatggcacagtactaagtttttttttttttgggggggggggggggggggggacacatgatgagatatgacggaatttaagagggaaactgctcggggagaagcaaggatgaggaaaggctcgggtggtgctcactgttgcacttgctgaaggcggcgttggacgcgccgcacgcgccggggagcgccagcacgcgcttcatgtcgatgggaaagcccaggttactggagt

SEQ ID NO: 1891 - DNA, 606 bp, Zea Mays
agaagagcagatggcagagtagataggcagagcgacagtctgtccagaattcttattacaagtctgatgccttttccctaatcaatattcccttatatctcaattacaactcacacaaactccctaagccgagtactaggccggcgcagcctggatccccttcgtgggcctgcattggatggttcttctgtcggacttgttacagcagtagtaacacaggccgtggcttttatcatcatcaatcacaagtaacaacagtatcgcaagtagtaaacatgaagcgcgaagcgggtcgatggaagcacgggggagccagctaaaccagtccatacaacaccacctctcaagtgacaagagtatcgcaagaacacagcaacagtggcgactgcacaagcacaaacgcacgcgcagccgcgctccacaagttaacttgaatcgtcacatacatagaaataggtcactcagcctagacggcagcagcagcagaaggaaaccctcagaagaggtagcagcagtagtaggcgagcaggggagccgccacggcagccaacagggcggtcgccgtcatcggaggagagctcgccccgcccccgcggcggaggcggc

SEQ ID NO: 1892 - DNA, 688 bp, Zea Mays
tcatcaaagaatcaatgagcagagttcaaagaattaggtagcgggcctctcccaaaaggtgcctcgtaagcccaaaatacgttttgagattcgcatattctcgcgatgggagcggaggaagcagagggtactcccccgccgctgcccgccaccggcgagcccgcaaccacggcaagggcgcagccaatatctgcagcacaattcctctcctggaagcagcgcaaggatgcagaggtagccgcaaggaaagctgaagcagctgagaagcgagctgatgatatcgcttcgggagcggcgcagatgaacggccgcgagctgttccaacatgagccctgggtgttcgacaacaacatttactgagatcgtgtcgggctactgttcctgcattagtccaagctccagcggtggtttcattttgtactgctatatcagctttgcgaaactgtggattttatttcaccgtttctaagattattctctcaataggtaattgaacttgtttcaaatacgttttgccaaatctttgtgcagtcaccgaatggtatctagtgtcgctattctttttctaaaactcttacaaacaaagagtattggtcggaagagaattctcgatcttcagattatcgttgttttcatctttcagttatcctattgtgaagtctgatgcaagctatagggcaaagttgtg

SEQ ID NO: 1893 - DNA, 574 bp, Zea Mays
cttaccctaacttgcttgggactaaaaggttgtttttgttgttgttgattatcaggtactaggaactaggaagttacaacctccattggctaactttttctacacccacatgatgcagaggtagccgcaaggaaagctgaagcagctgagaagcgagctgatgatatcgcttcgggagcggcgcagatgaacggccgcgagctgttccaacatgagccctgggtgttcgacaacaacatttactgagatcgtgtcgggctactgttcctgcattagtccaagctccagcggtggtttcattttgtactgctatatcagctttgcgaaactgtggattttatttcaccgtttctaagattattctctcaataggtaattgaacttgtttcaaatacgttttgccaaatctttgtgcagtcaccgaatggtatctagtgtcgctattctttttctaaaactcttacaaacaaagagtattggtcggaagagaattctcgatcttcagattatcgttgttttcatctttcagttatcctattgtgaagtctgatgcaagctatagggcaaagttgtg

SEQ ID NO: 1894 - DNA, 486 bp, Zea Mays
attcattctgtcatgtgtatcaggatgcagaggtagccgcaaggaaagctgaagcagctgagaagcgagctgatgatatcgcttcgggagcggcgcagatgaacggccgcgagctgttccaacatgagccctgggtgttcgacaacaacatttactgagatcgtgtcgggctactgttcctgcattagtccaagctccagcggtggtttcattttgtactgctatatcagctttgcgaaactgtggattttatttcaccgtttctaagattattctctcaataggtaattgaacttgtttcaaatacgttttgccaaatctttgtgcagtcaccgaatggtatctagtgtcgctattctttttctaaaactcttacaaacaaagagtattggtcggaagagaattctcgatcttcagattatcgttgttttcatctttcagttatcctattgtgaagtctgatgcaagctatagggcaaagttgtg

SEQ ID NO: 1895 - DNA, 858 bp, Zea Mays
ctcaggagacggtatgtcctaatttaggattcctctgaggcggtcgttatgtttctcgttataagtgagggtgagcgcccacttgtaaacatcccataattgcttgctttccatttcgcacctcgaatgggttttgatggcgagttgattggcggatcacgagtcgggagggagtcgtgctacgttggattaggggtgcccttgcttccatcgtccgagaggcatcaccctccatggagtcgttgtggccaggcccgctggctcctcttcccctcccttgggaatcccaggagagtcatgacaccttttcgctcggtgcaagaggccagtgagactgaggctagagtgattcgagctcagctcgctgaatccgattgtcgcatggctgataggtgggttaggttgcagagtacgtcaaggcctgtgattcgtccttgatggagtgcctagacagtgtcatgtgctgcgttcgggatattgttgactttgacgtacatcgaggggctgctgtggcactactcgtcgagggagcttcggtggggccgcactcttcgggacatcatcgcccccctcgtccttgtcagatgaggggactgatggacctcctggagggctatgataaggcggccagccgtgtcatgaaccggttgtttgtagatggcgtcgtgtgcagtgctcactgagttgtgatgtcgctgctgaataaaattagtttttatttttctcatgttgtcttttctgactcacttgagattatgttcgtggggacctaggcactctgcccgttgatttgtagtccgcgcccatagtcctgcccttatacaatatttatcctactttaaatatgcacgttttccg

SEQ ID NO: 1896 - DNA, 2598 bp, Zea Mays
gggaaacatatccatcgctcccaaaaaaaaaaaatactgttggattctgcttcaggctcagccgcccaacgccccaaccctaccctgccttttgttcttccgttccatcgccaccagcctgcgcggaaccccccaccctcacgactgggccggccgtcgctaacgccttcggtgccccttcgccggcgacgagcaccaccagtcatcatgtcatcatatcctgttctaaacaaccgaccaatcgatcagtggagagttactgatctgaaggatgagctccgtaaaaggaagcttcctgttaaaggtttgaaagaggaactcgtcaagagactctctgactccattcagagtgaaagagaagctgacgaagctgatgaggatgtgggagtgaatgtggatgatcagttgcctgatgccaatgctattgaggaaaatacagttactgttacagaagttcatcaggaaactgtggttgatgtcactcatcaagttgaagttcctacaaccgaagttggtcaagaatccataatttctcccactagaggcccccccagtgttgatgttgaagaggcctcaacaaccaaaggaaaagtacctgaatcagttgctcgaggaaatttgacatttgaagaagtgcaagtgcatactaaaagtactaatgagcctcttcatgagaagaccacagatgttgacaccaatgatgcagtcgatgtgaattcagacttgatccctgctgaagtcaagtttggtgctacagaagcaagcaaaattgaagaacaggattttcccccagcgcctgtagatgacttaacttcagattctactggtcctttgggtactgatgttgtcacagctgcaacttcagttagcgacgaaggggagaaactggcacccaaggatgcttcgggtaacaaggtgtcaatgcatgatgaagagcagaataattctgataccatgaacgaggactgcaagcccatcatatcacaatcaaataatcagaactagagattcagccgaagatggtcgaaccatcatccggcattactccattaggtggagatttgcagccattggatgatgacaaagagctggttaagaaccagacatctttggaagacatagattccacagataatgtggactcatacaagaaagatagtcctgaaggtggatctccagagaaattaaatctagacaggagttcaggtgatgaatcaatggaggaggatactgtggaaattaaacaagatgagtccaatatgaaatctgatgatctcggaggaaagaatgagtttaactcagaagatgtgaaagaggtgatcctccctgattctgttgttgaggcttccaaggaggctatggctgaagaaaagtcagcagcttcaacagaaaagaggaaacttgaagctgaagaaggtgttgcaagcactgaaccaatcaagcgacaacgtcggtggactgcagatattgccaaagtttcagggagacaagcattgagtcaaactggtcctgaaactcctaaggaaagttttcagcctgctttcaaacgatcttttgggaggtctgattcaacagccagtgtagattctcctaaggagcggattgtaccaccttccgagaaacctcccacaacttctttgagaattgaccgatttgtacgcccatttaccctgaaagctgtgcaggagtttcttggtaaaactggatctgtacaagacttctggatggaccatatcaagactcattgctatgttacattttcttcggtggatgaagctgtggctactagggatgctgtttacaacctacagtggcccccaaacaatggcaataagttggttgccgagtttgttgatcctcaggaagtgaagctcaaggtcgaccctcctcccccgccagctgctcctgttagcccagctgctgccacaagggcacctcctgttcaacatactcagacaaatcaaagtgtgccacgccaggctgctgcaccaaaggaggaactgccacctccacctccccctccccttgctaagccccctatggctgacctgacgcctttaggaagagagaggcttccacccactccaaaaaagccggagcctcctgtcgtgacacttgacgatctctttaagaagacacagtcctctccgaggatctattatcttcctttatcagaagaggaggtggcagccaagctcgccgcacagggcaaaggaaaaaagggataggaggtgttagcttccattttcggctagcttggagtttgttgcggaacatggcgtgcggtggtcacagcagctgacacgtgctactgctgtggcgaaagagttgtagccttgtagggctgttctgtggaaaaaggacactagtgtaggagcagcagcttgtatttcctaatgagattgttagttttgattgggtctccgagtagagtgtgtgctgaagttatttgatctacatgaagtgttgaggtacttagtttaatttatgctgccaggtactgtaaaactgaaagatactggttctagttttgagtctatggagaatactgttacaccgtctcttattttagtcttcgccttggttgctgaccgtgaa

SEQ ID NO: 1897 - DNA, 2612 bp, Zea Mays
aacatatccatcgctcccaaaaaaaaaaaatactgttggattctgcttcaggctcagccgcccaacgccccaaccctaccctgccttttgttcttccgttccatcgccaccagcctgcgcggaaccccccaccctcacgactgggccggccgtcgctaacgccttcggtgccccttcgccggcgacgagcaccaccagtcatcatgtcatcatatcctgttctaaacaaccgaccaatcgatcagtggagagttactgatctgaaggatgagctccgtaaaaggaagcttcctgttaaaggtttgaaagaggaactcgtcaagagactctctgactccattcagagtgaaagagaagctgacgaagctgatgaggatgtgggagtgaatgtggatgatcagttgcctgatgccaatgctattgaggaaaatacagttactgttacagaagttcatcaggaaactgtggttgatgtcactcatcaagttgaagttcctacaaccgaagttggtcaagaatccataatttctcccactagaggcccccccagtgttgatgttgaagaggcctcaacaaccaaaggaaaagtacctgaatcagttgctcgaggaaatttgacatttgaagaagtgcaagtgcatactaaaagtactaatgagcctcttcatgagaagaccacagatgttgacaccaatgatgcagtcgatgtgaattcagacttgatccctgctgaagtcaagtttggtgctacagaagcaagcaaaattgaagaacaggattttcccccagcgcctgtagatgacttaacttcagattctactggtcctttgggtactgatgttgtcacagctgcaacttcagctgcaccagttagcgacgaaggggagaaactggcacccaaggatgcttcgggtaacaaggtgtcaatgcatgatgaagagcagaataattctgataccatgaacgaggactgcaagcccatcatatcacaatcaaataatcaggtacccgagaactagagattcagccgaagatggtcgaaccatcatccggcattactccattaggtggagatttgcagccattggatgatgacaaagagctggttaagaaccagacatctttggaagacatagattccacagataatgtggactcatacaagaaagatagtcctgaaggtggatctccagagaaattaaatctagacaggagttcaggtgatgaatcaatggaggaggatactgtggaaattaaacaagatgagtccaatatgaaatctgatgatctcggaggaaagaatgagtttaactcagaagatgtgaaagaggtgatcctccctgattctgttgttgaggcttccaaggaggctatggctgaagaaaagtcagcagcttcaacagaaaagaggaaacttgaagctgaagaaggtgttgcaagcactgaaccaatcaagcgacaacgtcggtggactgcagatattgccaaagtttcagggagacaagcattgagtcaaactggtcctgaaactcctaaggaaagttttcagcctgctttcaaacgatcttttgggaggtctgattcaacagccagtgtagattctcctaaggagcggattgtaccaccttccgagaaacctcccacaacttctttgagaattgaccgatttgtacgcccatttaccctgaaagctgtgcaggagtttcttggtaaaactggatctgtacaagacttctggatggaccatatcaagactcattgctatgttacattttcttcggtggatgaagctgtggctactagggatgctgtttacaacctacagtggcccccaaacaatggcaataagttggttgccgagtttgttgatcctcaggaagtgaagctcaaggtcgaccctcctcccccgccagctgctcctgttagcccagctgctgccacaagggcacctcctgttcaacatactcagacaaatcaaagtgtgccacgccaggctgctgcaccaaaggaggaactgccacctccacctccccctccccttgctaagccccctatggctgacctgacgcctttaggaagagagaggcttccacccactccaaaaaagccggagcctcctgtcgtgacacttgacgatctctttaagaagacacagtcctctccgaggatctattatcttcctttatcagaagaggaggtggcagccaagctcgccgcacagggcaaaggaaaaaagggataggaggtgttagcttccattttcggctagcttggagtttgttgcggaacatggcgtgcggtggtcacagcagctgacacgtgctactgctgtggcgaaagagttgtagccttgtagggctgttctgtggaaaaaggacactagtgtaggagcagcagcttgtatttcctaatgagattgttagttttgattgggtctccgagtagagtgtgtgctgaagttatttgatctacatgaagtgttgaggtacttagtttaatttatgctgccaggtactgtaaaactgaaagatactggttctagttttgagtctatggagaatactgttacaccgtctcttattttagtcttcgccttggttgctgaccgtgaa

SEQ ID NO: 1898 - DNA, 2554 bp, Zea Mays
aaaaaaatactgttggattctgcttcaggctcagccgcccaacgccccaaccctaccctgccttttgttcttccgttccatcgccaccagcctgcgcggaaccccccaccctcacgactgggccggccgtcgctaacgccttcggtgccccttcgccggcgacgagcaccaccagtcatcatgtcatcatatcctgttctaaacaaccgaccaatcgatcagtggagagttactgatctgaaggatgagctccgtaaaaggaagcttcctgttaaaggtttgaaagaggaactcgtcaagagactctctgactccattcagagtgaaagagaagctgacgaagctgatgaggatgtgggagtgaatgtggatgatcagttgcctgatgccaatgctattgaggaaaatacagttactgttacagaagttcatcaggaaactgtggttgatgtcactcatcaagttgaagttcctacaaccgaagttggtcaagaatccataatttctcccactagaggcccccccagtgttgatgttgaagaggcctcaacaaccaaaggaaaagtacctgaatcagttgctcgaggaaatttgacatttgaagaagtgcaagtgcatactaaaagtactaatgagcctcttcatgagaagaccacagatgttgacaccaatgatgcagtcgatgtgaattcagacttgatccctgctgaagtcaagtttggtgctacagaagcaagcaaaattgaagaacaggattttcccccagcgcctgtagatgacttaacttcagattctactggtcctttgggtactgatgttgtcacagctgcaacttcaggtgctggccctatggatactgatgttttcatagctacaacatcagatgctggtcctatggatactgatgttgtcacagctgcaccagttagcgacgaaggggagaaactggcacccaaggatgcttcgggtaacaaggtgtcaatgcatgatgaagagcagaataattctgataccatgaacgaggactgcaagcccatcatatcacaatcaaataatcagacatctttggaagacatagattccacagataatgtggactcatacaagaaagatagtcctgaaggtggatctccagagaaattaaatctagacaggagttcaggtgatgaatcaatggaggaggatactgtggaaattaaacaagatgagtccaatatgaaatctgatgatctcggaggaaagaatgagtttaactcagaagatgtgaaagaggtgatcctccctgattctgttgttgaggcttccaaggaggctatggctgaagaaaagtcagcagcttcaacagaaaagaggaaacttgaagctgaagaaggtgttgcaagcactgaaccaatcaagcgacaacgtcggtggactgcagatattgccaaagtttcagggagacaagcattgagtcaaactggtcctgaaactcctaaggaaagttttcagcctgctttcaaacgatcttttgggaggtctgattcaacagccagtgtagattctcctaaggagcggattgtaccaccttccgagaaacctcccacaacttctttgagaattgaccgatttgtacgcccatttaccctgaaagctgtgcaggagtttcttggtaaaactggatctgtacaagacttctggatggaccatatcaagactcattgctatgttacattttcttcggtggatgaagctgtggctactagggatgctgtttacaacctacagtggcccccaaacaatggcaataagttggttgccgagtttgttgatcctcaggaagtgaagctcaaggtcgaccctcctcccccgccagctgctcctgttagcccagctgctgccacaagggcacctcctgttcaacatactcagacaaatcaaagtgtgccacgccaggctgctgcaccaaaggaggaactgccacctccacctccccctccccttgctaagccccctatggctgacctgacgcctttaggaagagagaggcttccacccactccaaaaaagccggagcctcctgtcgtgacacttgacgatctctttaagaagacacagtcctctccgaggatctattatcttcctttatcagaagaggaggtggcagccaagctcgccgcacagggcaaaggaaaaaagggataggaggtgttagcttccattttcggctagcttggagtttgttgcggaacatggcgtgcggtggtcacagcagctgacacgtgctactgctgtggcgaaagagttgtagccttgtagggctgttctgtggaaaaaggacactagtgtaggagcagcagcttgtatttcctaatgagattgttagttttgattgggtctccgagtagagtgtgtgctgaagttatttgatctacatgaagtgttgaggtacttagtttaatttatgctgccaggtactgtaaaactgaaagatactggttctagttttgagtctatggagaatactgttacaccgtctcttattttagtcttcgccttggttgctgaccgtgaa

SEQ ID NO: 1899 - DNA, 2271 bp, Zea Mays
aaccctaccctgccttttgttcttccgttccatcgccaccagcctgcgcggaaccccccaccctcacgactgggccggccgtcgctaacgccttcggtgccccttcgccggcgacgagcaccaccagtcatcatgtcatcatatcctgttctaaacaaccgaccaatcgatcagtggagagttactgatctgaaggatgagctccgtaaaaggaagcttcctgttaaaggtttgaaagaggaactcgtcaagagactctctgactccattcagagtgaaagagaagctgacgaagctgatgaggatgtgggagtgaatgtggatgatcagttgcctgatgccaatgctattgaggaaaatacagttactgttacagaagttcatcaggaaactgtggttgatgtcactcatcaagttgaagttcctacaaccgaagttggtcaagaatccataatttctcccactagaggcccccccagtgttgatgttgaagaggcctcaacaaccaaaggaaaagtacctgaatcagttgctcgaggaaatttgacatttgaagaagtgcaagtgcatactaaaagtactaatgagcctcttcatgagaagaccacagatgttgacaccaatgatgcagtcgatgtgaattcagacttgatccctgctgaagtcaagtttggtgctacagaagcaagcaaaattgaagaacaggattttcccccagcgcctgtagatgacttaacttcagattctactggtcctttgggtactgatgttgtcacagctgcaacttcagttagcgacgaaggggagaaactggcacccaaggatgcttcgggtaacaaggtgtcaatgcatgatgaagagcagaataattctgataccatgaacgaggactgcaagcccatcatatcacaatcaaataatcaggtacccgaggcttccaaggaggctatggctgaagaaaagtcagcagcttcaacagaaaagaggaaacttgaagctgaagaaggtgttgcaagcactgaaccaatcaagcgacaacgtcggtggactgcagatattgccaaagtttcagggagacaagcattgagtcaaactggtcctgaaactcctaaggaaagttttcagcctgctttcaaacgatcttttgggaggtctgattcaacagccagtgtagattctcctaaggagcggattgtaccaccttccgagaaacctcccacaacttctttgagaattgaccgatttgtacgcccatttaccctgaaagctgtgcaggagtttcttggtaaaactggatctgtacaagacttctggatggaccatatcaagactcattgctatgttacattttcttcggtggatgaagctgtggctactagggatgctgtttacaacctacagtggcccccaaacaatggcaataagttggttgccgagtttgttgatcctcaggaagtgaagctcaaggtcgaccctcctcccccgccagctgctcctgttagcccagctgctgccacaagggcacctcctgttcaacatactcagacaaatcaaagtgtgccacgccaggctgctgcaccaaaggaggaactgccacctccacctccccctccccttgctaagccccctatggctgacctgacgcctttaggaagagagaggcttccacccactccaaaaaagccggagcctcctgtcgtgacacttgacgatctctttaagaagacacagtcctctccgaggatctattatcttcctttatcagaagaggaggtggcagccaagctcgccgcacagggcaaaggaaaaaagggataggaggtgttagcttccattttcggctagcttggagtttgttgcggtatgcttaagttctgttgaaatgtgctttactagtccttttttgtccaaataattaatggatacgaatctgccctctttcaggaacatggcgtgcggtggtcacagcagctgacacgtgctactgctgtggcgaaagagttgtagccttgtagggctgttctgtggaaaaaggacactagtgtaggagcagcagcttgtatttcctaatgagattgttagttttgattgggtctccgagtagagtgtgtgctgaagttatttgatctacatgaagtgttgaggtacttagtttaatttatgctgccaggtactgtaaaactgaaagatactggttctagttttgagtctatggagaatactgttacaccgtctcttattttagtcttcgccttggttgctgaccgtgaa

SEQ ID NO: 1900 - DNA, 2552 bp, Zea Mays
aaccctaccctgccttttgttcttccgttccatcgccaccagcctgcgcggaaccccccaccctcacgactgggccggccgtcgctaacgccttcggtgccccttcgccggcgacgagcaccaccagtcatcatgtcatcatatcctgttctaaacaaccgaccaatcgatcagtggagagttactgatctgaaggatgagctccgtaaaaggaagcttcctgttaaaggtttgaaagaggaactcgtcaagagactctctgactccattcagagtgaaagagaagctgacgaagctgatgaggatgtgggagtgaatgtggatgatcagttgcctgatgccaatgctattgaggaaaatacagttactgttacagaagttcatcaggaaactgtggttgatgtcactcatcaagttgaagttcctacaaccgaagttggtcaagaatccataatttctcccactagaggcccccccagtgttgatgttgaagaggcctcaacaaccaaaggaaaagtacctgaatcagttgctcgaggaaatttgacatttgaagaagtgcaagtgcatactaaaagtactaatgagcctcttcatgagaagaccacagatgttgacaccaatgatgcagtcgatgtgaattcagacttgatccctgctgaagtcaagtttggtgctacagaagcaagcaaaattgaagaacaggattttcccccagcgcctgtagatgacttaacttcagattctactggtcctttgggtactgatgttgtcacagctgcaacttcagttagcgacgaaggggagaaactggcacccaaggatgcttcgggtaacaaggtgtcaatgcatgatgaagagcagaataattctgataccatgaacgaggactgcaagcccatcatatcacaatcaaataatcaggtggagatttgcagccattggatgatgacaaagagctggttaagaaccagacatctttggaagacatagattccacagataatgtggactcatacaagaaagatagtcctgaaggtggatctccagagaaattaaatctagacaggagttcaggtgatgaatcaatggaggaggatactgtggaaattaaacaagatgagtccaatatgaaatctgatgatctcggaggaaagaatgagtttaactcagaagatgtgaaagaggtgatcctccctgattctgttgttgaggcttccaaggaggctatggctgaagaaaagtcagcagcttcaacagaaaagaggaaacttgaagctgaagaaggtgttgcaagcactgaaccaatcaagcgacaacgtcggtggactgcagatattgccaaagtttcagggagacaagcattgagtcaaactggtcctgaaactcctaaggaaagttttcagcctgctttcaaacgatcttttgggaggtctgattcaacagccagtgtagattctcctaaggagcggattgtaccaccttccgagaaacctcccacaacttctttgagaattgaccgatttgtacgcccatttaccctgaaagctgtgcaggagtttcttggtaaaactggatctgtacaagacttctggatggaccatatcaagactcattgctatgttacattttcttcggtggatgaagctgtggctactagggatgctgtttacaacctacagtggcccccaaacaatggcaataagttggttgccgagtttgttgatcctcaggaagtgaagctcaaggtcgaccctcctcccccgccagctgctcctgttagcccagctgctgccacaagggcacctcctgttcaacatactcagacaaatcaaagtgtgccacgccaggctgctgcaccaaaggaggaactgccacctccacctccccctccccttgctaagccccctatggctgacctgacgcctttaggaagagagaggcttccacccactccaaaaaagccggagcctcctgtcgtgacacttgacgatctctttaagaagacacagtcctctccgaggatctattatcttcctttatcagaagaggaggtggcagccaagctcgccgcacagggcaaaggaaaaaagggataggaggtgttagcttccattttcggctagcttggagtttgttgcggtatgcttaagttctgttgaaatgtgctttactagtccttttttgtccaaataattaatggatacgaatctgccctctttcaggaacatggcgtgcggtggtcacagcagctgacacgtgctactgctgtggcgaaagagttgtagccttgtagggctgttctgtggaaaaaggacactagtgtaggagcagcagcttgtatttcctaatgagattgttagttttgattgggtctccgagtagagtgtgtgctgaagttatttgatctacatgaagtgttgaggtacttagtttaatttatgctgccaggtactgtaaaactgaaagatactggttctagttttgagtctatggagaatactgttacaccgtctcttattttagtcttcgccttggttgctgaccgtgaa

SEQ ID NO: 1901 - DNA, 1979 bp, Zea Mays
aagaagtgcaagtgcatactaaaagtactaatgagcctcttcatgagaagaccacagatgttgacaccaatgatgcagtcgatgtgaattcagacttgatccctgctgaagtcaagtttggtgctacagaagcaagcaaaattgaagaacaggattttcccccagcgcctgtagatgacttaacttcagattctactggtcctttgggtactgatgttgtcacagctgcaacttcagttagcgacgaaggggagaaactggcacccaaggatgcttcgggtaacaaggtgtcaatgcatgatgaagagcagaataattctgataccatgaacgaggactgcaagcccatcatatcacaatcaaataatcaggtacccgagaactagagattcagccgaagatggtcgaaccatcatccggcattactccattaggtggagatttgcagccattggatgatgacaaagagctggttaagaaccagacatctttggaagacatagattccacagataatgtggactcatacaagaaagatagtcctgaaggtggatctccagagaaattaaatctagacaggagttcaggtgatgaatcaatggaggaggatactgtggaaattaaacaagatgagtccaatatgaaatctgatgatctcggaggaaagaatgagtttaactcagaagatgtgaaagaggtgatcctccctgattctgttgttgaggcttccaaggaggctatggctgaagaaaagtcagcagcttcaacagaaaagaggaaacttgaagctgaagaaggtgttgcaagcactgaaccaatcaagcgacaacgtcggtggactgcagatattgccaaagtttcagggagacaagcattgagtcaaactggtcctgaaactcctaaggaaagttttcagcctgctttcaaacgatcttttgggaggtctgattcaacagccagtgtagattctcctaaggagcggattgtaccaccttccgagaaacctcccacaacttctttgagaattgaccgatttgtacgcccatttaccctgaaagctgtgcaggagtttcttggtaaaactggatctgtacaagacttctggatggaccatatcaagactcattgctatgttacattttcttcggtggatgaagctgtggctactagggatgctgtttacaacctacagtggcccccaaacaatggcaataagttggttgccgagtttgttgatcctcaggaagtgaagctcaaggtcgaccctcctcccccgccagctgctcctgttagcccagctgctgccacaagggcacctcctgttcaacatactcagacaaatcaaagtgtgccacgccaggctgctgcaccaaaggaggaactgccacctccacctccccctccccttgctaagccccctatggctgacctgacgcctttaggaagagagaggcttccacccactccaaaaaagccggagcctcctgtcgtgacacttgacgatctctttaagaagacacagtcctctccgaggatctattatcttcctttatcagaagaggaggtggcagccaagctcgccgcacagggcaaaggaaaaaagggataggaggtgttagcttccattttcggctagcttggagtttgttgcggaacatggcgtgcggtggtcacagcagctgacacgtgctactgctgtggcgaaagagttgtagccttgtagggctgttctgtggaaaaaggacactagtgtaggagcagcagcttgtatttcctaatgagattgttagttttgattgggtctccgagtagagtgtgtgctgaagttatttgatctacatgaagtgttgaggtacttagtttaatttatgctgccaggtactgtaaaactgaaagatactggttctagttttgagtctatggagaatactgttacaccgtctcttattttagtcttcgccttggttgctgaccgtgaa

SEQ ID NO: 1902 - DNA, 1841 bp, Zea Mays
gcacgaatcaatcatcaaacaaagcccaaatatgctactggattgaactaaagggcataagcccgtggatcatgtgaaagggctacatttcaatctctcagacactagacactacctatctactccaagatccgcggcggcgtgctggcctactctaagatccgccggcgcgtcgtggcggctcctccgcgtcccgcctccgaggccgcgggcggcgtcaggctgatcggggtggcgcgcggcgccggggagcgccccatcgtattcgtgcctctcaagaggttcgcggacgcaggtcggaccactgccgcgcccttcctcttcctgccggccgccgcactcccgccagcgccgtactacttactacctgcatactgtattctgtagtagtatgaaaaggtaaaggcggcgtactgctatagtatctctgcagaatgttcggaggaggagtacaccaactgaaagaggtttaggaaagttgcaccgtggatctagaattctagatgcattagtgtagcctacagtagccctgtacacacataaaggcatttttcttataaaattgtctcgcaaaatgggatttttttgtgctaattatagggtgctttagcgccacctgggatttttttgtgctaattatatgcagcttccatagaccaccacaggcattcccgcatgcagttcgctctgaatgcctcctttcattctattactatccctgaacgacgacccatctcagggaaatagccattaaatgatagcagccttttttaaagtatggcttggtttgcgatgttattatggttcgaaaagttgctctattttagtctcatttattttataaattgcagtactaaactgttttagtctatagttcctttttagatgactaaaagggattaaacaaaaaagacacccgtaaattaatcagtcgttaaacagtgctagtactatgcatttcatcgcgtaaattaatcaattgaatggtttcaattggtgattttgcagcctaggccatggagggggtatcatcagctccagaaatggacgaggctatctcaactgaccaatcaagcagatcaacaaaaagaagggctaaagtgtgggatcatgttgattcagagctaatagatgggaaagagaaggcggtttgcaaatactgtaaggcccacttatcttctgctgcgggtaaaggctaaggagttccttggtgcttccggtgacaagcgaaaggaagtcaattaactctgaatcagtggttctgctgcaaggttacacacaacattttattgaatggaaagaggacactcggtgaccacaagatcatcagatgatcatttgttgagctctggaactaaatcctctccgcaggtggtaaccaggcgggttcccatccgagttccgaggtcactgtaatgctaaattgtcaagttcagttatctgaattcagtttgagttataattctcatcaagcatcaatgtcaccaactgtgtagaaatactgaattttagcatggagcgtctttataaacattttagcatggagcagtttctcatcgatcatggctgtcaagttctatttctctacacagttgcactttgtggttgttttctatcatttgtttgtgagcccatggattttactaatttattagcttgtggtggtgcttgcttgtatatgaaggcccttggattggcccgtggatttttaaaaggatcgaggcggattaggatgtcggggcattaaaaaacggattgaattgagttgtatcaaatcaatttggatttaagtagggctgggttcactttttaaacttataggattggagtggggttggggc

SEQ ID NO: 1903 - DNA, 1049 bp, Zea Mays
cgtggatcatgtgaaagggctacatttcaatctctcagacactagacactacctatctactccaagatccgcggcggcgtgctggcctactctaagatccgccggcgcgtcgtggcggctcctccgcgtcccgcctccgaggccgcgggcggcgtcaggctgatcggggtggcgcgcggcgccggggagcgccccatcgtattcgtgcctctcaagcctaggccatggagggggtatcatcagctccagaaatggacgaggctatctcaactgaccaatcaagcagatcaacaaaaagaagggctaaagtgtgggatcatgttgattcagagctaatagatgggaaagagaaggcggtttgcaaatactgtaaggcccacttatcttctgctgcgggtaaaggctaaggagttccttggtgcttccggtgacaagcgaaaggaagtcaattaactctgaatcagtggttctgctgcaaggttacacacaacattttattgaatggaaagaggacactcggtgaccacaagatcatcagatgatcatttgttgagctctggaactaaatcctctccgcaggtggtaaccaggcgggttcccatccgagttccgaggtcactgtaatgctaaattgtcaagttcagttatctgaattcagtttgagttataattctcatcaagcatcaatgtcaccaactgtgtagaaatactgaattttagcatggagcgtctttataaacattttagcatggagcagtttctcatcgatcatggctgtcaagttctatttctctacacagttgcactttgtggttgttttctatcatttgtttgtgagcccatggattttactaatttattagcttgtggtggtgcttgcttgtatatgaaggcccttggattggcccgtggatttttaaaaggatcgaggcggattaggatgtcggggcattaaaaaacggattgaattgagttgtatcaaatcaatttggatttaagtagggctgggttcactttttaaacttataggattggagtggggttggggc

SEQ ID NO: 1904 - DNA, 999 bp, Zea Mays
gaaagggctacatttcaatctctcagacactagacactacctatctactccaagatccgcggcggcgtgctggcctactctaagatccgccggcgcgtcgtggcggctcctccgcgtcccgcctccgaggccgcgggcggcgtcaggctgatcggggtggcgcgcggcgccggggagcgccccatcgtattcgtgcctctcaaggccatggagggggtatcatcagctccagaaatggacgaggctatctcaactgaccaatcaagcagatcaacaaaaagaagggctaaagtgtgggatcatgttgattcagagctaatagatgggaaagagaaggcggtttgcaaatactgctaaggagttccttggtgcttccggtgacaagcgaaaggaagtcaattaactctgaatcagtggttctgctgcaaggttacacacaacattttattgaatggaaagaggacactcggtgaccacaagatcatcagatgatcatttgttgagctctggaactaaatcctctccgcaggtggtaaccaggcgggttcccatccgagttccgaggtcactgtaatgctaaattgtcaagttcagttatctgaattcagtttgagttataattctcatcaagcatcaatgtcaccaactgtgtagaaatactgaattttagcatggagcgtctttataaacattttagcatggagcagtttctcatcgatcatggctgtcaagttctatttctctacacagttgcactttgtggttgttttctatcatttgtttgtgagcccatggattttactaatttattagcttgtggtggtgcttgcttgtatatgaaggcccttggattggcccgtggatttttaaaaggatcgaggcggattaggatgtcggggcattaaaaaacggattgaattgagttgtatcaaatcaatttggatttaagtagggctgggttcactttttaaacttataggattggagtggggttggggc

SEQ ID NO: 1905 - DNA, 2056 bp, Zea Mays
gaaagggctacatttcaatctctcagacactagacactacctatctactccaagatccgcggcggcgtgctggcctactctaagatccgccggcgcgtcgtggcggctcctccgcgtcccgcctccgaggccgcgggcggcgtcaggctgatcggggtggcgcgcggcgccggggagcgccccatcgtattcgtgcctctcaagaggttcgcggacgcaggtcggaccactgccgcgcccttcctcttcctgccggccgccgcactcccgccagcgccgtactacttactacctgcatactgtattctgtagtagtatgaaaaggtaaaggcggcgtactgctatagtatctctgcagaatgttcggaggaggagtacaccaactgaaagaggtttaggaaagttgcaccgtggatctagaattctagatgcattagtgtagcctacagtagccctgtacacacataaaggcatttttcttataaaattgtctcgcaaaatgggatttttttgtgctaattatagggtgctttagcgccacctgggatttttttgtgctaattatatgcagcttccatagaccaccacaggcattcccgcatgcagttcgctctgaatgcctcctttcattctattactatccctgaacgacgacccatctcagggaaatagccattaaatgatagcagccttttttaaagtatggcttggtttgcgatgttattatggttcgaaaagttgctctattttagtctcatttattttataaattgcagtactaaactgttttagtctatagttcctttttagatgactaaaagggattaaacaaaaaagacacccgtaaattaatcagtcgttaaacagtgctagtactatgcatttcatcgcgtaaattaatcaattgaatggtttcaattggtgattttgcagcctaggccatggagggggtatcatcagctccagaaatggacgaggctatctcaactgaccaatcaagcagatcaacaaaaagaagggctaaagtgtgggatcatgttgattcagagctaatagatgggaaagagaaggcggtttgcaaatactgtaaggcccacttatcttctgctgcgggtaaagcacatttcattagtgaagattttgagttgcacaaaaagattattgcattcaagaagatttccttcccacatacatcttatgctgtgcaagatggtattacctcttgtttgctagagtggggattggttggtgatttgtttaccctgactttggataatgctagtgtaaacaatagagcaatgaaagatatgcgagatgctttgggcagccagatgtttttcagtggtgaacacctccatgtgaggtgttcttctcatgtgctcaacatcatggttcaagctggactaaaggctaaggagttccttggtgcttccggtgacaagcgaaaggaagtcaattaactctgaatcagtggttctgctgcaaggttacacacaacattttattgaatggaaagaggacactcggtgaccacaagatcatcagatgatcatttgttgagctctggaactaaatcctctccgcaggtggtaaccaggcgggttcccatccgagttccgaggtcactgtaatgctaaattgtcaagttcagttatctgaattcagtttgagttataattctcatcaagcatcaatgtcaccaactgtgtagaaatactgaattttagcatggagcgtctttataaacattttagcatggagcagtttctcatcgatcatggctgtcaagttctatttctctacacagttgcactttgtggttgttttctatcatttgtttgtgagcccatggattttactaatttattagcttgtggtggtgcttgcttgtatatgaaggcccttggattggcccgtggatttttaaaaggatcgaggcggattaggatgtcggggcattaaaaaacggattgaattgagttgtatcaaatcaatttggatttaagtagggctgggttcactttttaaacttataggattggagtggggttggggc

SEQ ID NO: 1906 - DNA, 1733 bp, Zea Mays
gaaagggctacatttcaatctctcagacactagacactacctatctactccaagatccgcggcggcgtgctggcctactctaagatccgccggcgcgtcgtggcggctcctccgcgtcccgcctccgaggccgcgggcggcgtcaggctgatcggggtggcgcgcggcgccggggagcgccccatcgtattcgtgcctctcaagaggttcgcggacgcaggtcggaccactgccgcgcccttcctcttcctgccggccgccgcactcccgccagcgccgtactacttactacctgcatactgtattctgtagtagtatgaaaaggtaaaggcggcgtactgctatagtatctctgcagaatgttcggaggaggagtacaccaactgaaagaggtttaggaaagttgcaccgtggatctagaattctagatgcattagtgtagcctacagtagccctgtacacacataaaggcatttttcttataaaattgtctcgcaaaatgggatttttttgtgctaattatagggtgctttagcgccacctgggatttttttgtgctaattatatgcagcttccatagaccaccacaggcattcccgcatgcagttcgctctgaatgcctcctttcattctattactatccctgaacgacgacccatctcagggaaatagccattaaatgatagcagccttttttaaagtatggcttggtttgcgatgttattatggttcgaaaagttgctctattttagtctcatttattttataaattgcagtactaaactgttttagtctatagttcctttttagatgactaaaagggattaaacaaaaaagacacccgtaaattaatcagtcgttaaacagtgctagtactatgcatttcatcgcgtaaattaatcaattgaatggtttcaattggtgattttgcagcctaggccatggagggggtatcatcagctccagaaatggacgaggctatctcaactgaccaatcaagcagatcaacaaaaagaagggctaaagtgtgggatcatgttgattcagagctaatagatgggaaagagaaggcggtttgcaaatactgctaaggagttccttggtgcttccggtgacaagcgaaaggaagtcaattaactctgaatcagtggttctgctgcaaggttacacacaacattttattgaatggaaagaggacactcggtgaccacaagatcatcagatgatcatttgttgagctctggaactaaatcctctccgcaggtggtaaccaggcgggttcccatccgagttccgaggtcactgtaatgctaaattgtcaagttcagttatctgaattcagtttgagttataattctcatcaagcatcaatgtcaccaactgtgtagaaatactgaattttagcatggagcgtctttataaacattttagcatggagcagtttctcatcgatcatggctgtcaagttctatttctctacacagttgcactttgtggttgttttctatcatttgtttgtgagcccatggattttactaatttattagcttgtggtggtgcttgcttgtatatgaaggcccttggattggcccgtggatttttaaaaggatcgaggcggattaggatgtcggggcattaaaaaacggattgaattgagttgtatcaaatcaatttggatttaagtagggctgggttcactttttaaacttataggattggagtggggttggggc

SEQ ID NO: 1907 - DNA, 2580 bp, Zea Mays
gaaagggctacatttcaatctctcagacactagacactacctatctactccaagatccgcggcggcgtgctggcctactctaagatccgccggcgcgtcgtggcggctcctccgcgtcccgcctccgaggccgcgggcggcgtcaggctgatcggggtggcgcgcggcgccggggagcgccccatcgtattcgtgcctctcaagaggttcgcggacgcaggtcggaccactgccgcgcccttcctcttcctgccggccgccgcactcccgccagcgccgtactacttactacctgcatactgtattctgtagtagtatgaaaaggtaaaggcggcgtactgctatagtatctctgcagaatgttcggaggaggagtacaccaactgaaagaggtttaggaaagttgcaccgtggatctagaattctagatgcattagtgtagcctacagtagccctgtacacacataaaggcatttttcttataaaattgtctcgcaaaatgggatttttttgtgctaattatagggtgctttagcgccacctgggatttttttgtgctaattatatgcagcttccatagaccaccacaggcattcccgcatgcagttcgctctgaatgcctcctttcattctattactatccctgaacgacgacccatctcagggaaatagccattaaatgatagcagccttttttaaagtatggcttggtttgcgatgttattatggttcgaaaagttgctctattttagtctcatttattttataaattgcagtactaaactgttttagtctatagttcctttttagatgactaaaagggattaaacaaaaaagacacccgtaaattaatcagtcgttaaacagtgctagtactatgcatttcatcgcgtaaattaatcaattgaatggtttcaattggtgattttgcagcctaggccatggagggggtatcatcagctccagaaatggacgaggctatctcaactgaccaatcaagcagatcaacaaaaagaagggctaaagtgtgggatcatgttgattcagagctaatagatgggaaagagaaggcggtttgcaaatactgtaaggcccacttatcttctgctgcgggtaaagcacatttcattagtgaagattttgagttgcacaaaaagattattgcattcaagaagatttccttcccacatacatcttatgctgtgcaagatggtattacctcttgtttgctagagtggggattggttggtgatttgtttaccctgactttggataatgctagtgtaaacaatagagcaatgaaagatatgcgagatgctttgggcagccagatgtttttcagtggtgaacacctccatgtgaggtgttcttctcatgtgctcaacatcatggttcaagctggactaaaggtcgttccaaatgcagaatatcattagcattatatagtttatcttttgtcttaatcaccaaagatgtttttcagaatatcattagcagccagatgtttttgtcttaatctcaacatcattttcttaatcaccaaagttttatcttttgtctgttcttctctaatatccatgcatctaaataagccctaatagtatctctcattctcttgttactattagtatttaaacttattactattagtatttaagcgtgaataattatcattagcatttaagttacattttataaaccaaacgacacctaaagtgctccgtcatagttggctacttgccagccgattatttagcacgcaagccatgctcgatggatacaatagtatatgaccaatatagatgacctacgtacatgtgttctatgcttcagcaagcataatatgtttcttgccttcgcatcaactcaagtgtgtgatgatatgttgctgtctagtactaactctgaatcaattaactctgaatttgtccaggctaaggagttccttggtgcttccggtgacaagcgaaaggaagtcaattaactctgaatcagtggttctgctgcaaggttacacacaacattttattgaatggaaagaggacactcggtgaccacaagatcatcagatgatcatttgttgagctctggaactaaatcctctccgcaggtggtaaccaggcgggttcccatccgagttccgaggtcactgtaatgctaaattgtcaagttcagttatctgaattcagtttgagttataattctcatcaagcatcaatgtcaccaactgtgtagaaatactgaattttagcatggagcgtctttataaacattttagcatggagcagtttctcatcgatcatggctgtcaagttctatttctctacacagttgcactttgtggttgttttctatcatttgtttgtgagcccatggattttactaatttattagcttgtggtggtgcttgcttgtatatgaaggcccttggattggcccgtggatttttaaaaggatcgaggcggattaggatgtcggggcattaaaaaacggattgaattgagttgtatcaaatcaatttggatttaagtagggctgggttcactttttaaacttataggattggagtggggttggggc

SEQ ID NO: 1908 - DNA, 4643 bp, Zea Mays
aaaaattacatcccacaacacatccggtgaccacaacagtactactacgcgcacaggtaggcatataagcagatttaaacaccaaccggtgggcaatgtggtactaactttgacctgcaaaccatgaagacaaagacacatgcgccatatgaggcccatctgccaatttgtacgaggcccatctcccatgacaaatgaaaaccctaatctccagcaccccggcggcctccagcgctcccgctccttgctcgcctccacccgcggccaccaccgccctgcggcccccgccgcttgccagcctccaccgcgccgcgagtcgcgccgttcctgcaccggctggtcctggagcacgggaggacgagcatgtactggttcggccccagccccaaggtgaccatcgtcgactcggacctggccgaggacgtgttgtccaacaagttcggccacttcgagaagctcaaggtcctggcgctgtccaagatgctgggctccggcgtggccagccacgagggcgagaagtgggtcaagcaccggaggatcctcaaccctgcgttccatcttgagaagctcaagcgcatgtgccggcgttttctacgtgctgcgaggagctggtgagcaggtgggcggcggagtcccttggctccgacagctcgtgcgagctggacgtctggccggagctgcagaacctgacgggagacgtcatttctcgcaccgcgttcagcagcagctacagcgaagggagaaggatcttccagctacaggccgagcaagcttcgcttgtcatgaccaacattcggaagatcatgatcctcggctacatgtacttgcctaccgcgaacaataggaagatgcgcaggaacaacagggaggtggagtcaatcctgcgagagataatcgggaagaggatccaggcaaggtgggtctactgctggagacaaacatgagagacgacatggggatgacgatcgaagacgtgatcgaggagtgcaaggtgttctacttcgccgggatggagaccacgtcggtgctgctcacgtggacgatggtggtgctcagcatggacccggagtggcaggaccgcgcgagggaggaggtgacggctctgttcggcagggacggcaagcccgagtacgacggcctaagccgcctcaaagtcgtgaccatggtgctctacgaggtgctccggctgtacccgccggccacctccgtcgtccggcaaacgtacaaggagatggaggtcggaggcgtcacctaccccgcgcgacgtgatcctggagctgcctgtgctgctcatccaccacgacccggacatctggggaggcgacgcgcgcgagttcaggcccgacaggttctccgagggcgtgtccagggcctccaaggaccccggcgcgttcctcccgttcggctggggcccgcgcatctgcatcggccagaacttcgcgctgctggaggccaagatggcgctctgcatgatcctccagcggttcgagttcgggctcgcgccatcctacgctcatgcgccgcataccgtgataaccttgcatcctatgcacggtgcgcagcttaagctcagagcaatatgatcttgacacgatgggtgtcccatcattgatgccattgttatgtataaccttacaattcagataggcactcggccctgttaatgtctgaaataagtatcttcgcgttggcattttgtaatgtgcttttcacgtaccattggtgctttattgccttttgtatataaacatgtggatatatgtaactcgtacattacacaaacaaacacaaacacaccagagccagagctatagggtggagctataaaccgtggctctacttttgtacacaaaattggctccacatgttcttccaatcctgcaactgcgtttttcgcatccccgtttgattgcaagaatgggattgctaagcaagctaagatttcaatggcatattccttcatacataggccattgagcgacgaggcacaccgcgtcagcactcccgtggtggtcacttgcaatgaccagagacgggaggtcttcgttgcccagaacatcgctaacaagaaaattgaccgcaccgttgcattcgacaaggtgctaggtccaaagtctcaacagcaggacgtcttcaaccatgctgttgtgccacttgtcagcgaggttgacggttataattgcacaatatttgcatatggccagactggaactggcaaaacgtacacaatggaaggaggaggggacaaagcactgaatgctgacctcccgactgatgccggtgtcattccaagtgttgttaagcgcatatttgacatcctcgaggcacagagtgcagagtacaacatgaaggtttcttttcttgagttgtacaatgcggagctcactgatcttctagctctacaatgagattgcaagaacgggactgctaagcaagataagatttcaatggcctattccttcatacataggccattgaaccggaaaattttgtcggtattcggtaactataggatcatgtggttgttggtcgagttggaccaattatgctggctcatttgttggatgttttgacaagtcgattctagcttccttatgatctatgttagatttggtaatgcataccagttagtaaagcatttacgatgtacattgttatacatagagctttacatcgcaaaaattatcagtttccctcagttacgatatgcatttagtatttatcgtattttgaaaattaataacctattatactatgataggcttgacttcacgtttatctaaataacttagtgcgatgatgcttgaaaacttatcttccattttgccagatcaatgaataaaaggattattcatatcaatgtccatgcaccttctcagaaaatccttttgtgatgttggtgttggattcctggacctgtactggtacatatgctaagtcatccacaaatctgacccagaattgtaccgttctttttatagccatgtttggtacttgtttgagtgctccatagttcgcaagtttgttttgttatgatgtattttgacatttgaatctcagacatgcttaggaactactgatttgaatttatgggctaacagttccagtatttcaaatagaaagtatgctatatcaaataagttgatgatacttttggtactggagaatgaagttagactgcatttgatattagaagtctgtttgtctgattgcagttgattataaagaagctagagctgatattagaagtctgatattagaagtctgtttgtctgattgcagttgattataaagaagctagagcttccagtcaagtttgatattagaagtcttcttttgcttttacattttgttttttatgatcttgatcttagaagcagggttttggtaccagcttaactaattttctgaagttttatgttcttactttaattataactagatgattgcaataagatatcatgaggcgcgccgaggagaacaggggcctcctctccgcctcctccttcgacaggcagctgctgcggaaggaggtggtgaggagggtcaaggccgcggtggcgggacgtgagtgaagtgagctttgtcgagcctatatgtggaggtcggtcgtgaagctgggactaggacaagggcgagctgaaggctagaagctgtaaatgcacccttcaagagtcttcataggccaagtctctacataggtgttgacaaaaagggaaattcatgacaatgcgtttatatgagattgtccaatatcgaaaccaagaatacatggggggcaactgtattcgatttttgtttctctttcgtggagtattactgaaatatatgcttccagtgttgaagtttccaaattaaatgttatctctgtacaaagtgtgcaggctcggttataggaattttataaagaaaatgacaaatatacatgtacgaacttcaaatatttcctgtgcatggaaggaaacagtgggcgatgaaagcagggaatttgggaggtacatgcgacagagagaagagcaagagaagcaggaagcggagttgttcactcgggctcctgtaaccaaacatgataagcagatcgagaagcgcataaggagacaacttcatgggctaggaggcttaactgacgattttggccttgggatgaacatgctgttgggaggagacaaggaagatgatggcggttcaagaaagtcgcatggcaaaagcggaaaccgaaagaagcacctgaagaacagcaagaagaggatgaggcattagccctagacccacactgttgtagcacttcaatatactgatagagcctagaagacggttcaagcaagccacacgaaaagtgaagccggagaaaataccaagaagccaagtagagaaaaaaagctttggttcctgtcgtattatttctgaaacacaaaacttgatctgagcgactgatcgtgagctaatgtaacagtatgaattatatggcttgaacatggtaggtgtaaaatgttttgttcatcggtagagtattccagatgtgatcggcttaacagtatgaattatatagaactatgtgagccaatgtaacagtatgaattatataagttatcaagatattacatgccctcattgcaatgcacgggcactgacttgttatgata

SEQ ID NO: 1909 - DNA, 3651 bp, Zea Mays
ccatctgccaatttgtacgaggcccatctcccatgacaaatgaaaaccctaatctccagcaccccggcggcctccagcgctcccgctccttgctcgcctccacccgcggccaccaccgccctgcggcccccgccgcttgccagcctccaccgcgccgcgagtcgcgccgttcctgcaccggctggtcctggagcacgggaggacgagcatgtactggttcggccccagccccaaggtgaccatcgtcgactcggacctggccgaggacgtgttgtccaacaagttcggccacttcgagaagctcaaggtcctggcgctgtccaagatgctgggctccggcgtggccagccacgagggcgagaagtgggtcaagcaccggaggatcctcaaccctgcgttccatcttgagaagctcaagcgcatgtgccggcgttttctacgtgctgcgaggagctggtgagcaggtgggcggcggagtcccttggctccgacagctcgtgcgagctggacgtctggccggagctgcagaacctgacgggagacgtcatttctcgcaccgcgttcagcagcagctacagcgaagggagaaggatcttccagctacaggccgagcaagcttcgcttgtcatgaccaacattcggaagatcatgatcctcggctacatgtacttgcctaccgcgaacaataggaagatgcgcaggaacaacagggaggtggagtcaatcctgcgagagataatcgggaagaggatccaggcaaggtgggtctactgctggagacaaacatgagagacgacatggggatgacgatcgaagacgtgatcgaggagtgcaaggtgttctacttcgccgggatggagaccacgtcggtgctgctcacgtggacgatggtggtgctcagcatggacccggagtggcaggaccgcgcgagggaggaggtgacggctctgttcggcagggacggcaagcccgagtacgacggcctaagccgcctcaaagtcgtgaccatggtgctctacgaggtgctccggctgtacccgccggccacctccgtcgtccggcaaacgtacaaggagatggagctgcctgtgctgctcatccaccacgacccggacatctggggaggcgacgcgcgcgagttcaggcccgacaggttctccgagggcgtgtccagggcctccaaggaccccggcgcgttcctcccgttcggctggggcccgcgcatctgcatcggccagaacttcgcgctgctggaggccaagatggcgctctgcatgatcctccagcggttcgagttcgggctcgcgccatcctacgctcatgcgccgcataccgtgataaccttgcatcctatgcacggtgcgcagcttaagctcagagcaatatgatcttgacacgatgggtgtcccatcattgatgccattgttatgtataaccttacaattcagataggcactcggccctgttaatgtctgaaataagtatcttcgcgttggcattttgtaatgtgcttttcacgtaccattggtgctttattgccttttgtatataaacatgtggatatatgtaactcgtacattacacaaacaaacacaaacacaccagagccagagctatagggtggagctataaaccgtggctctacttttgtacacaaaattggctccacatgttcttccaatcctgcaactgcgtttttcgcatccccgtttgattgcaagaatgggattgctaagcaagctaagatttcaatggcatattccttcatacataggccattgagcgacgaggcacaccgcgtcagcactcccgtggtggtcacttgcaatgaccagagacgggaggtcttcgttgcccagaacatcgctaacaagaaaattgaccgcaccgttgcattcgacaaggtgctaggtccaaagtctcaacagcaggacgtcttcaaccatgctgttgtgccacttgtcagcgaggttgacggttataattgcacaatatttgcatatggccagactggaactggcaaaacgtacacaatggaaggaggaggggacaaagcactgaatgctgacctcccgactgatgccggtgtcattccaagtgttgttaagcgcatatttgacatcctcgaggcacagagtgcagagtacaacatgaaggtttcttttcttgagttgtacaatgcggagctcactgatcttctagctctacaatgagattgcaagaacgggactgctaagcaagataagatttcaatggcctattccttcatacataggccattgaaccggaaaattttgtcggtattcggtaactataggatcatgtggttgttggtcgagttggaccaattatgctggctcatttgttggatgttttgacaagtcgattctagcttccttatgatctatgttagatttggtaatgcataccagttagtaaagcatttacgatgtacattgttatacatagagctttacatcgcaaaaattatcagtttccctcagttacgatatgcatttagtatttatcgtattttgaaaattaataacctattatactatgataggcttgacttcacgtttatctaaataacttagtgcgatgatgcttgaaaacttatcttccattttgccagatcaatgaataaaaggattattcatatcaatgtccatgcaccttctcagaaaatccttttgtgatgttggtgttggattcctggacctgtactggtacatatgctaagtcatccacaaatctgacccagaattgtaccgttctttttatagccatgtttggtacttgtttgagtgctccatagttcgcaagtttgttttgttatgatgtattttgacatttgaatctcagacatgcttaggaactactgatttgaatttatgggctaacagttccagtatttcaaatagaaagtatgctatatcaaataagttgatgatacttttggtactggagaatgaagttagactgcatttgatattagaagtctgtttgtctgattgcagttgattataaagaagctagagctgatattagaagtctgatattagaagtctgtttgtctgattgcagttgattataaagaagctagagcttccagtcaagtttgatattagaagtcttcttttgcttttacattttgttttttatgatcttgatcttagaagcagggttttggtaccagcttaactaattttctgaagttttatgttcttactttaattataactagatgattgcaataagatatcatgaggcgcgccgaggagaacaggggcctcctctccgcctcctccttcgacaggcagctgctgcggaaggaggtggtgaggagggtcaaggccgcggtggcgggacgtgagtgaagtgagctttgtcgagcctatatgtggaggtcggtcgtgaagctgggactaggacaagggcgagctgaaggctagaagcttgcatggaaggaaacagtgggcgatgaaagcagggaatttgggaggtacatgcgacagagagaagagcaagagaagcaggaagcggagttgttcactcgggctcctgtaaccaaacatgataagcagatcgagaagcgcataaggagacaacttcatggcttgtcttaatatccaacgtacaccaccatct

SEQ ID NO: 1910 - DNA, 3659 bp, Zea Mays
ccatctgccaatttgtacgaggcccatctcccatgacaaatgaaaaccctaatctccagcaccccggcggcctccagcgctcccgctccttgctcgcctccacccgcggccaccaccgccctgcggcccccgccgcttgccagcctccaccgcgccgcgagtcgcgccgttcctgcaccggctggtcctggagcacgggaggacgagcatgtactggttcggccccagccccaaggtgaccatcgtcgactcggacctggccgaggacgtgttgtccaacaagttcggccacttcgagaagctcaaggtcctggcgctgtccaagatgctgggctccggcgtggccagccacgagggcgagaagtgggtcaagcaccggaggatcctcaaccctgcgttccatcttgagaagctcaagcgcatgtgccggcgttttctacgtgctgcgaggagctggtgagcaggtgggcggcggagtcccttggctccgacagctcgtgcgagctggacgtctggccggagctgcagaacctgacgggagacgtcatttctcgcaccgcgttcagcagcagctacagcgaagggagaaggatcttccagctacaggccgagcaagcttcgcttgtcatgaccaacattcggaagatcatgatcctcggctacatgtacttgcctaccgcgaacaataggaagatgcgcaggaacaacagggaggtggagtcaatcctgcgagagataatcgggaagaggatccaggcaaggtgggtctactgctggagacaaacatgagagacgacatggggatgacgatcgaagacgtgatcgaggagtgcaaggtgttctacttcgccgggatggagaccacgtcggtgctgctcacgtggacgatggtggtgctcagcatggacccggagtggcaggaccgcgcgagggaggaggtgacggctctgttcggcagggacggcaagcccgagtacgacggcctaagccgcctcaaagtcgtgaccatggtgctctacgaggtgctccggctgtacccgccggccacctccgtcgtccggcaaacgtacaaggagatggaggtcggaggcgtcacctaccccgcgcgacgtgatcctggagctgcctgtgctgctcatccaccacgacccggacatctggggaggcgacgcgcgcgagttcaggcccgacaggttctccgagggcgtgtccagggcctccaaggaccccggcgcgttcctcccgttcggctggggcccgcgcatctgcatcggccagaacttcgcgctgctggaggccaagatggcgctctgcatgatcctccagcggttcgagttcgggctcgcgccatcctacgctcatgcgccgcataccgtgataaccttgcatcctatgcacggtgcgcagcttaagctcagagcaatatgatcttgacacgatgggtgtcccatcattgatgccattgttatgtataaccttacaattcagataggcactcggccctgttaatgtctgaaataagtatcttcgcgttggcattttgtaatgtgcttttcacgtaccattggtgctttattgccttttgtatataaacatgtggatatatgtaactcgtacattacacaaacaaacacaaacacaccagagccagagctatagggtggagctataaaccgtggctctacttttgtacacaaaattggctccacatgttcttccaatcctgcaactgcgtttttcgcatccccgtttgattgcaagaatgggattgctaagcaagctaagatttcaatggcatattccttcatacataggccattgagcgacgaggcacaccgcgtcagcactcccgtggtggtcacttgcaatgaccagagacgggaggtcttcgttgcccagaacatcgctaacaagaaaattgaccgcaccgttgcattcgacaaggtgctaggtccaaagtctcaacagcaggacgtcttcaaccatgctgttgtgccacttgtcagcgaggttgacggttataattgcacaatatttgcatatggccagactggaactggcaaaacgtacacaatggaaggaggaggggacaaagcactgaatgctgacctcccgactgatgccggtgtcattccaagtgttgttaagcgcatatttgacatcctcgaggcacagagtgcagagtacaacatgaaggtttcttttcttgagttgtacaatgcggagctcactgatcttctagctctacaatgagattgcaagaacgggactgctaagcaagataagatttcaatggcctattccttcatacataggccattgaaccggaaaattttgtcggtattcggtaactataggatcatgtggttgttggtcgagttggaccaattatgctggctcatttgttggatgttttgacaagtcgattctagcttccttatgatctatgttagatttgatgattgcaataagatatcatgaggcgcgccgaggagaacaggggcctcctctccgcctcctccttcgacaggcagctgctgcggaaggaggtggtgaggagggtcaaggccgcggtggcgggacgtgagtgaagtgagctttgtcgagcctatatgtggaggtcggtcgtgaagctgggactaggacaagggcgagctgaaggctagaagctgtaaatgcacccttcaagagtcttcataggccaagtctctacataggtgttgacaaaaagggaaattcatgacaatgcgtttatatgagattgtccaatatcgaaaccaagaatacatggggggcaactgtattcgatttttgtttctctttcgtggagtattactgaaatatatgcttccagtgttgaagtttccaaattaaatgttatctctgtacaaagtgtgcaggctcggttataggaattttataaagaaaatgacaaatatacatgtacgaacttcaaatatttcctgtgcatggaaggaaacagtgggcgatgaaagcagggaatttgggaggtacatgcgacagagagaagagcaagagaagcaggaagcggagttgttcactcgggctcctgtaaccaaacatgataagcagatcgagaagcgcataaggagacaacttcatgggctaggaggcttaactgacgattttggccttgggatgaacatgctgttgggaggagacaaggaagatgatggcggttcaagaaagtcgcatggcaaaagcggaaaccgaaagaagcacctgaagaacagcaagaagaggatgaggcattagccctagacccacactgttgtagcacttcaatatactgatagagcctagaagacggttcaagcaagccacacgaaaagtgaagccggagaaaataccaagaagccaagtagagaaaaaaagctttggttcctgtcgtattatttctgaaacacaaaacttgatctgagcgactgatcgtgagctaatgtaacagtatgaattatatggcttgaacatggtaggtgtaaaatgttttgttcatcggtagagtattccagatgtgatcggcttaacagtatgaattatatagaactatgtgagccaatgtaacagtatgaattatataagttatcaagatattacatgccctcattgcaatgcacgggcactgacttgttatgata

SEQ ID NO: 1911 - DNA, 4022 bp, Zea Mays
ccatctgccaatttgtacgaggcccatctcccatgacaaatgaaaaccctaatctccagcaccccggcggcctccagcgctcccgctccttgctcgcctccacccgcggccaccaccgccctgcggcccccgccgcttgccagcctccaccgcgccgcgagtcgcgccgttcctgcaccggctggtcctggagcacgggaggacgagcatgtactggttcggccccagccccaaggtgaccatcgtcgactcggacctggccgaggacgtgttgtccaacaagttcggccacttcgagaagctcaaggtcctggcgctgtccaagatgctgggctccggcgtggccagccacgagggcgagaagtgggtcaagcaccggaggatcctcaaccctgcgttccatcttgagaagctcaagcgcatgtgccggcgttttctacgtgctgcgaggagctggtgagcaggtgggcggcggagtcccttggctccgacagctcgtgcgagctggacgtctggccggagctgcagaacctgacgggagacgtcatttctcgcaccgcgttcagcagcagctacagcgaagggagaaggatcttccagctacaggccgagcaagcttcgcttgtcatgaccaacattcggaagatcatgatcctcggctacatgtacttgcctaccgcgaacaataggaagatgcgcaggaacaacagggaggtggagtcaatcctgcgagagataatcgggaagaggatccaggcaaggtgggtctactgctggagacaaacatgagagacgacatggggatgacgatcgaagacgtgatcgaggagtgcaaggtgttctacttcgccgggatggagaccacgtcggtgctgctcacgtggacgatggtggtgctcagcatggacccggagtggcaggaccgcgcgagggaggaggtgacggctctgttcggcagggacggcaagcccgagtacgacggcctaagccgcctcaaagtcgtgaccatggtgctctacgaggtgctccggctgtacccgccggccacctccgtcgtccggcaaacgtacaaggagatggaggtcggaggcgtcacctaccccgcgcgacgtgatcctggagctgcctgtgctgctcatccaccacgacccggacatctggggaggcgacgcgcgcgagttcaggcccgacaggttctccgagggcgtgtccagggcctccaaggaccccggcgcgttcctcccgttcggctggggcccgcgcatctgcatcggccagaacttcgcgctgctggaggccaagatggcgctctgcatgatcctccagcggttcgagttcgggctcgcgccatcctacgctcatgcgccgcataccgtgataaccttgcatcctatgcacggtgcgcagcttaagctcagagcaatatgatcttgacacgatgggtgtcccatcattgatgccattgttatgtataaccttacaattcagataggcactcggccctgttaatgtctgaaataagtatcttcgcgttggcattttgtaatgtgcttttcacgtaccattggtgctttattgccttttgtatataaacatgtggatatatgtaactcgtacattacacaaacaaacacaaacacaccagagccagagctatagggtggagctataaaccgtggctctacttttgtacacaaaattggctccacatgttcttccaatcctgcaactgcgtttttcgcatccccgtttgattgcaagaatgggattgctaagcaagctaagatttcaatggcatattccttcatacataggccattgagcgacgaggcacaccgcgtcagcactcccgtggtggtcacttgcaatgaccagagacgggaggtcttcgttgcccagaacatcgctaacaagaaaattgaccgcaccgttgcattcgacaaggtgctaggtccaaagtctcaacagcaggacgtcttcaaccatgctgttgtgccacttgtcagcgaggttgacggttataattgcacaatatttgcatatggccagactggaactggcaaaacgtacacaatggaaggaggaggggacaaagcactgaatgctgacctcccgactgatgccggtgtcattccaagtgttgttaagcgcatatttgacatcctcgaggcacagagtgcagagtacaacatgaaggtttcttttcttgagttgtacaatgcggagctcactgatcttctagctctacaatgagattgcaagaacgggactgctaagcaagataagatttcaatggcctattccttcatacataggccattgaaccggaaaattttgtcggtattcggtaactataggatcatgtggttgttggtcgagttggaccaattatgctggctcatttgttggatgttttgacaagtcgattctagcttccttatgatctatgttagatttgatcaatgaataaaaggattattcatatcaatgtccatgcaccttctcagaaaatccttttgtgatgttggtgttggattcctggacctgtactggtacatatgctaagtcatccacaaatctgacccagaattgtaccgttctttttatagccatgtttggtacttgtttgagtgctccatagttcgcaagtttgttttgttatgatgtattttgacatttgaatctcagacatgcttaggaactactgatttgaatttatgggctaacagttccagtatttcaaatagaaagtatgctatatcaaataagttgatgatacttttggtactggagaatgaagttagactgcatttgatattagaagtctgtttgtctgattgcagttgattataaagaagctagagctgatattagaagtctgatattagaagtctgtttgtctgattgcagttgattataaagaagctagagcttccagtcaagtttgatattagaagtcttcttttgcttttacattttgttttttatgatcttgatcttagaagcagggttttggtaccagcttaactaattttctgaagttttatgttcttactttaattataactagatgattgcaataagatatcatgaggcgcgccgaggagaacaggggcctcctctccgcctcctccttcgacaggcagctgctgcggaaggaggtggtgaggagggtcaaggccgcggtggcgggacgtgagtgaagtgagctttgtcgagcctatatgtggaggtcggtcgtgaagctgggactaggacaagggcgagctgaaggctagaagctgtaaatgcacccttcaagagtcttcataggccaagtctctacatagtgcatggaaggaaacagtgggcgatgaaagcagggaatttgggaggtacatgcgacagagagaagagcaagagaagcaggaagcggagttgttcactcgggctcctgtaaccaaacatgataagcagatcgagaagcgcataaggagacaacttcatgggctaggaggcttaactgacgattttggccttgggatgaacatgctgttgggaggagacaaggaagatgatggcggttcaagaaagtcgcatggcaaaagcggaaaccgaaagaagcacctgaagaacagcaagaagaggatgaggcattagccctagacccacactgttgtagcacttcaatatactgatagagcctagaagacggttcaagcaagccacacgaaaagtgaagccggagaaaataccaagaagccaagtagagaaaaaaagctttggttcctgtcgtattatttctgaaacacaaaacttgatctgagcgactgatcgtgagctaatgtaacagtatgaattatatggcttgaacatggtaggtgtaaaatgttttgttcatcggtagagtattccagatgtgatcggcttaacagtatgaattatatagaactatgtgagccaatgtaacagtatgaattatataagttatcaagatattacatgccctcattgcaatgcacgggcactgacttgttatgata

SEQ ID NO: 1912 - DNA, 4271 bp, Zea Mays
ccatctgccaatttgtacgaggcccatctcccatgacaaatgaaaaccctaatctccagcaccccggcggcctccagcgctcccgctccttgctcgcctccacccgcggccaccaccgccctgcggcccccgccgcttgccagcctccaccgcgccgcgagtcgcgccgttcctgcaccggctggtcctggagcacgggaggacgagcatgtactggttcggccccagccccaaggtgaccatcgtcgactcggacctggccgaggacgtgttgtccaacaagttcggccacttcgagaagctcaaggtcctggcgctgtccaagatgctgggctccggcgtggccagccacgagggcgagaagtgggtcaagcaccggaggatcctcaaccctgcgttccatcttgagaagctcaagcgcatgtgccggcgttttctacgtgctgcgaggagctggtgagcaggtgggcggcggagtcccttggctccgacagctcgtgcgagctggacgtctggccggagctgcagaacctgacgggagacgtcatttctcgcaccgcgttcagcagcagctacagcgaagggagaaggatcttccagctacaggccgagcaagcttcgcttgtcatgaccaacattcggaagatcatgatcctcggctacatgtacttgcctaccgcgaacaataggaagatgcgcaggaacaacagggaggtggagtcaatcctgcgagagataatcgggaagaggatccaggcaaggtgggtctactgctggagacaaacatgagagacgacatggggatgacgatcgaagacgtgatcgaggagtgcaaggtgttctacttcgccgggatggagaccacgtcggtgctgctcacgtggacgatggtggtgctcagcatggacccggagtggcaggaccgcgcgagggaggaggtgacggctctgttcggcagggacggcaagcccgagtacgacggcctaagccgcctcaaagtcgtgaccatggtgctctacgaggtgctccggctgtacccgccggccacctccgtcgtccggcaaacgtacaaggagatggaggtcggaggcgtcacctaccccgcgcgacgtgatcctggagctgcctgtgctgctcatccaccacgacccggacatctggggaggcgacgcgcgcgagttcaggcccgacaggttctccgagggcgtgtccagggcctccaaggaccccggcgcgttcctcccgttcggctggggcccgcgcatctgcatcggccagaacttcgcgctgctggaggccaagatggcgctctgcatgatcctccagcggttcgagttcgggctcgcgccatcctacgctcatgcgccgcataccgtgataaccttgcatcctatgcacggtgcgcagcttaagctcagagcaatatgatcttgacacgatgggtgtcccatcattgatgccattgttatgtataaccttacaattcagataggcactcggccctgttaatgtctgaaataagtatcttcgcgttggcattttgtaatgtgcttttcacgtaccattggtgctttattgccttttgtatataaacatgtggatatatgtaactcgtacattacacaaacaaacacaaacacaccagagccagagctatagggtggagctataaaccgtggctctacttttgtacacaaaattggctccacatgttcttccaatcctgcaactgcgtttttcgcatccccgtttgattgcaagaatgggattgctaagcaagctaagatttcaatggcatattccttcatacataggccattgagcgacgaggcacaccgcgtcagcactcccgtggtggtcacttgcaatgaccagagacgggaggtcttcgttgcccagaacatcgctaacaagaaaattgaccgcaccgttgcattcgacaaggtgctaggtccaaagtctcaacagcaggacgtcttcaaccatgctgttgtgccacttgtcagcgaggttgacggttataattgcacaatatttgcatatggccagactggaactggcaaaacgtacacaatggaaggaggaggggacaaagcactgaatgctgacctcccgactgatgccggtgtcattccaagtgttgttaagcgcatatttgacatcctcgaggcacagagtgcagagtacaacatgaaggtttcttttcttgagttgtacaatgcggagctcactgatcttctagctctacaatgagattgcaagaacgggactgctaagcaagataagatttcaatggcctattccttcatacataggccattgaaccggaaaattttgtcggtattcggtaactataggatcatgtggttgttggtcgagttggaccaattatgctggctcatttgttggatgttttgacaagtcgattctagcttccttatgatctatgttagatttgatcaatgaataaaaggattattcatatcaatgtccatgcaccttctcagaaaatccttttgtgatgttggtgttggattcctggacctgtactggtacatatgctaagtcatccacaaatctgacccagaattgtaccgttctttttatagccatgtttggtacttgtttgagtgctccatagttcgcaagtttgttttgttatgatgtattttgacatttgaatctcagacatgcttaggaactactgatttgaatttatgggctaacagttccagtatttcaaatagaaagtatgctatatcaaataagttgatgatacttttggtactggagaatgaagttagactgcatttgatattagaagtctgtttgtctgattgcagttgattataaagaagctagagctgatattagaagtctgatattagaagtctgtttgtctgattgcagttgattataaagaagctagagcttccagtcaagtttgatattagaagtcttcttttgcttttacattttgttttttatgatcttgatcttagaagcagggttttggtaccagcttaactaattttctgaagttttatgttcttactttaattataactagatgattgcaataagatatcatgaggcgcgccgaggagaacaggggcctcctctccgcctcctccttcgacaggcagctgctgcggaaggaggtggtgaggagggtcaaggccgcggtggcgggacgtgagtgaagtgagctttgtcgagcctatatgtggaggtcggtcgtgaagctgggactaggacaagggcgagctgaaggctagaagctgtaaatgcacccttcaagagtcttcataggccaagtctctacataggtgttgacaaaaagggaaattcatgacaatgcgtttatatgagattgtccaatatcgaaaccaagaatacatggggggcaactgtattcgatttttgtttctctttcgtggagtattactgaaatatatgcttccagtgttgaagtttccaaattaaatgttatctctgtacaaagtgtgcaggctcggttataggaattttataaagaaaatgacaaatatacatgtacgaacttcaaatatttcctgtgcatggaaggaaacagtgggcgatgaaagcagggaatttgggaggtacatgcgacagagagaagagcaagagaagcaggaagcggagttgttcactcgggctcctgtaaccaaacatgataagcagatcgagaagcgcataaggagacaacttcatgggctaggaggcttaactgacgattttggccttgggatgaacatgctgttgggaggagacaaggaagatgatggcggttcaagaaagtcgcatggcaaaagcggaaaccgaaagaagcacctgaagaacagcaagaagaggatgaggcattagccctagacccacactgttgtagcacttcaatatactgatagagcctagaagacggttcaagcaagccacacgaaaagtgaagccggagaaaataccaagaagccaagtagagaaaaaaagctttggttcctgtcgtattatttctgaaacacaaaacttgatctgagcgactgatcgtgagctaatgtaacagtatgaattatatggcttgaacatggtaggtgtaaaatgttttgttcatcggtagagtattccagatgtgatcggcttaacagtatgaattatatagaactatgtgagccaatgtaacagtatgaattatataagttatcaagatattacatgccctcattgcaatgcacgggcactgacttgttatgata

SEQ ID NO: 1913 - DNA, 4758 bp, Zea Mays
ccatctgccaatttgtacgaggcccatctcccatgacaaatgaaaaccctaatctccagcaccccggcggcctccagcgctcccgctccttgctcgcctccacccgcggccaccaccgccctgcggcccccgccgcttgccagcctccaccgcgccgcgagtcgcgccgttcctgcaccggctggtcctggagcacgggaggacgagcatgtactggttcggccccagccccaaggtgaccatcgtcgactcggacctggccgaggacgtgttgtccaacaagttcggccacttcgagaagctcaaggtcctggcgctgtccaagatgctgggctccggcgtggccagccacgagggcgagaagtgggtcaagcaccggaggatcctcaaccctgcgttccatcttgagaagctcaagcgcatgtgccggcgttttctacgtgctgcgaggagctggtgagcaggtgggcggcggagtcccttggctccgacagctcgtgcgagctggacgtctggccggagctgcagaacctgacgggagacgtcatttctcgcaccgcgttcagcagcagctacagcgaagggagaaggatcttccagctacaggccgagcaagcttcgcttgtcatgaccaacattcggaagatcatgatcctcggctacatgtacttgcctaccgcgaacaataggaagatgcgcaggaacaacagggaggtggagtcaatcctgcgagagataatcgggaagaggatccaggcaaggtgggtctactgctggagacaaacatgagagacgacatggggatgacgatcgaagacgtgatcgaggagtgcaaggtgttctacttcgccgggatggagaccacgtcggtgctgctcacgtggacgatggtggtgctcagcatggacccggagtggcaggaccgcgcgagggaggaggtgacggctctgttcggcagggacggcaagcccgagtacgacggcctaagccgcctcaaagtcgtgaccatggtgctctacgaggtgctccggctgtacccgccggccacctccgtcgtccggcaaacgtacaaggagatggaggtcggaggcgtcacctaccccgcgcgacgtgatcctggagctgcctgtgctgctcatccaccacgacccggacatctggggaggcgacgcgcgcgagttcaggcccgacaggttctccgagggcgtgtccagggcctccaaggaccccggcgcgttcctcccgttcggctggggcccgcgcatctgcatcggccagaacttcgcgctgctggaggccaagatggcgctctgcatgatcctccagcggttcgagttcgggctcgcgccatcctacgctcatgcgccgcataccgtgataaccttgcatcctatgcacggtgcgcagcttaagctcagagcaatatgatcttgacacgatgggtgtcccatcattgatgccattgttatgtataaccttacaattcagataggcactcggccctgttaatgtctgaaataagtatcttcgcgttggcattttgtaatgtgcttttcacgtaccattggtgctttattgccttttgtatataaacatgtggatatatgtaactcgtacattacacaaacaaacacaaacacaccagagccagagctatagggtggagctataaaccgtggctctacttttgtacacaaaattggctccacatgttcttccaatcctgcaactgcgtttttcgcatccccgtttgattgcaagaatgggattgctaagcaagctaagatttcaatggcatattccttcatacataggccattgagcgacgaggcacaccgcgtcagcactcccgtggtggtcacttgcaatgaccagagacgggaggtcttcgttgcccagaacatcgctaacaagaaaattgaccgcaccgttgcattcgacaaggtgctaggtccaaagtctcaacagcaggacgtcttcaaccatgctgttgtgccacttgtcagcgaggttgacggttataattgcacaatatttgcatatggccagactggaactggcaaaacgtacacaatggaaggaggaggggacaaagcactgaatgctgacctcccgactgatgccggtgtcattccaagtgttgttaagcgcatatttgacatcctcgaggcacagagtgcagagtacaacatgaaggtttcttttcttgagttgtacaatgcggagctcactgatcttctagctctacaatgagattgcaagaacgggactgctaagcaagataagatttcaatggcctattccttcatacataggccattgaaccggaaaattttgtcggtattcggtaactataggatcatgtggttgttggtcgagttggaccaattatgctggctcatttgttggatgttttgacaagtcgattctagcttccttatgatctatgttagatttggtaatgcataccagttagtaaagcatttacgatgtacattgttatacatagagctttacatcgcaaaaattatcagtttccctcagttacgatatgcatttagtatttatcgtattttgaaaattaataacctattatactatgataggcttgacttcacgtttatctaaataacttagtgcgatgatgcttgaaaacttatcttccattttgccagatcaatgaataaaaggattattcatatcaatgtccatgcaccttctcagaaaatccttttgtgatgttggtgttggattcctggacctgtactggtacatatgctaagtcatccacaaatctgacccagaattgtaccgttctttttatagccatgtttggtacttgtttgagtgctccatagttcgcaagtttgttttgttatgatgtattttgacatttgaatctcagacatgcttaggaactactgatttgaatttatgggctaacagttccagtatttcaaatagaaagtatgctatatcaaataagttgatgatacttttggtactggagaatgaagttagactgcatttgatattagaagtctgtttgtctgattgcagttgattataaagaagctagagctgatattagaagtctgatattagaagtctgtttgtctgattgcagttgattataaagaagctagagcttccagtcaagtttgatattagaagtcttcttttgcttttacattttgttttttatgatcttgatcttagaagcagggttttggtaccagcttaactaattttctgaagttttatgttcttactttaattataactagatgattgcaataagatatcatgaggcgcgccgaggagaacaggggcctcctctccgcctcctccttcgacaggcagctgctgcggaaggaggtggtgaggagggtcaaggccgcggtggcgggacgtgagtgaagtgagctttgtcgagcctatatgtggaggtcggtcgtgaagctgggactaggacaagggcgagctgaaggctagaagctgtaaatgcacccttcaagagtcttcataggccaagtctctacataggtgttgacaaaaagggaaattcatgacaatgcgtttatatgagattgtccaatatcgaaaccaagaatacatggggggcaactgtattcgatttttgtttctctttcgtggagtattactgaaatatatgcttccagtgttgaagtttccaaattaaatgttatctctgtacaaagtgtgcaggctcggttataggaattttataaagaaaatgacaaatatacatgtacgaacttcaaatatttcctggtactaacctctctgctctgagatgacatgttcttttgctgttatgaaatcaaatatttcttcatgatctcttataatctgtcaaatgatgtttgcccagtggcaatagaaaacccttatattaaagagataatcgatgatgatgcggacagacctaaagatgtttgctcaacttttgctatgaatttattagtaggatgtcttggatatagagtaagcaagttatgtgttgtttattttcatgctaaatgatctttctggaacttacagtgcatggaaggaaacagtgggcgatgaaagcagggaatttgggaggtacatgcgacagagagaagagcaagagaagcaggaagcggagttgttcactcgggctcctgtaaccaaacatgataagcagatcgagaagcgcataaggagacaacttcatgggctaggaggcttaactgacgattttggccttgggatgaacatgctgttgggaggagacaaggaagatgatggcggttcaagaaagtcgcatggcaaaagcggaaaccgaaagaagcacctgaagaacagcaagaagaggatgaggcattagccctagacccacactgttgtagcacttcaatatactgatagagcctagaagacggttcaagcaagccacacgaaaagtgaagccggagaaaataccaagaagccaagtagagaaaaaaagctttggttcctgtcgtattatttctgaaacacaaaacttgatctgagcgactgatcgtgagctaatgtaacagtatgaattatatggcttgaacatggtaggtgtaaaatgttttgttcatcggtagagtattccagatgtgatcggcttaacagtatgaattatatagaactatgtgagccaatgtaacagtatgaattatataagttatcaagatattacatgccctcattgcaatgcacgggcactgacttgttatgata

SEQ ID NO: 1914 - DNA, 3970 bp, Zea Mays
ccatctgccaatttgtacgaggcccatctcccatgacaaatgaaaaccctaatctccagcaccccggcggcctccagcgctcccgctccttgctcgcctccacccgcggccaccaccgccctgcggcccccgccgcttgccagcctccaccgcgccgcgagtcgcgccgttcctgcaccggctggtcctggagcacgggaggacgagcatgtactggttcggccccagccccaaggtgaccatcgtcgactcggacctggccgaggacgtgttgtccaacaagttcggccacttcgagaagctcaaggtcctggcgctgtccaagatgctgggctccggcgtggccagccacgagggcgagaagtgggtcaagcaccggaggatcctcaaccctgcgttccatcttgagaagctcaagcgcatgtgccggcgttttctacgtgctgcgaggagctggtgagcaggtgggcggcggagtcccttggctccgacagctcgtgcgagctggacgtctggccggagctgcagaacctgacgggagacgtcatttctcgcaccgcgttcagcagcagctacagcgaagggagaaggatcttccagctacaggccgagcaagcttcgcttgtcatgaccaacattcggaagatcatgatcctcggctacatgtacttgcctaccgcgaacaataggaagatgcgcaggaacaacagggaggtggagtcaatcctgcgagagataatcgggaagaggatccaggcaaggtgggtctactgctggagacaaacatgagagacgacatggggatgacgatcgaagacgtgatcgaggagtgcaaggtgttctacttcgccgggatggagaccacgtcggtgctgctcacgtggacgatggtggtgctcagcatggacccggagtggcaggaccgcgcgagggaggaggtgacggctctgttcggcagggacggcaagcccgagtacgacggcctaagccgcctcaaagtcgtgaccatggtgctctacgaggtgctccggctgtacccgccggccacctccgtcgtccggcaaacgtacaaggagatggaggtcggaggcgtcacctaccccgcgcgacgtgatcctggagctgcctgtgctgctcatccaccacgacccggacatctggggaggcgacgcgcgcgagttcaggcccgacaggttctccgagggcgtgtccagggcctccaaggaccccggcgcgttcctcccgttcggctggggcccgcgcatctgcatcggccagaacttcgcgctgctggaggccaagatggcgctctgcatgatcctccagcggttcgagttcgggctcgcgccatcctacgctcatgcgccgcataccgtgataaccttgcatcctatgcacggtgcgcagcttaagctcagagcaatatgatcttgacacgatgggtgtcccatcattgatgccattgttatgtataaccttacaattcagataggcactcggccctgttaatgtctgaaataagtatcttcgcgttggcattttgtaatgtgcttttcacgtaccattggtgctttattgccttttgtatataaacatgtggatatatgtaactcgtacattacacaaacaaacacaaacacaccagagccagagctatagggtggagctataaaccgtggctctacttttgtacacaaaattggctccacatgttcttccaatcctgcaactgcgtttttcgcatccccgtttgattgcaagaatgggattgctaagcaagctaagatttcaatggcatattccttcatacataggccattgagcgacgaggcacaccgcgtcagcactcccgtggtggtcacttgcaatgaccagagacgggaggtcttcgttgcccagaacatcgctaacaagaaaattgaccgcaccgttgcattcgacaaggtgctaggtccaaagtctcaacagcaggacgtcttcaaccatgctgttgtgccacttgtcagcgaggttgacggttataattgcacaatatttgcatatggccagactggaactggcaaaacgtacacaatggaaggaggaggggacaaagcactgaatgctgacctcccgactgatgccggtgtcattccaagtgttgttaagcgcatatttgacatcctcgaggcacagagtgcagagtacaacatgaaggtttcttttcttgagttgtacaatgcggagctcactgatcttctagctctacaatgagattgcaagaacgggactgctaagcaagataagatttcaatggcctattccttcatacataggccattgaaccggaaaattttgtcggtattcggtaactataggatcatgtggttgttggtcgagttggaccaattatgctggctcatttgttggatgttttgacaagtcgattctagcttccttatgatctatgttagatttggtaatgcataccagttagtaaagcatttacgatgtacattgttatacatagagctttacatcgcaaaaattatcagtttccctcagttacgatatgcatttagtatttatcgtattttgaaaattaataacctattatactatgataggcttgacttcacgtttatctaaataacttagtgcgatgatgcttgaaaacttatcttccattttgccagatcaatgaataaaaggattattcatatcaatgtccatgcaccttctcagaaaatccttttgtgatgttggtgttggattcctggacctgtactgatgattgcaataagatatcatgaggcgcgccgaggagaacaggggcctcctctccgcctcctccttcgacaggcagctgctgcggaaggaggtggtgaggagggtcaaggccgcggtggcgggacgtgagtgaagtgagctttgtcgagcctatatgtggaggtcggtcgtgaagctgggactaggacaagggcgagctgaaggctagaagctgtaaatgcacccttcaagagtcttcataggccaagtctctacataggtgttgacaaaaagggaaattcatgacaatgcgtttatatgagattgtccaatatcgaaaccaagaatacatggggggcaactgtattcgatttttgtttctctttcgtggagtattactgaaatatatgcttccagtgttgaagtttccaaattaaatgttatctctgtacaaagtgtgcaggctcggttataggaattttataaagaaaatgacaaatatacatgtacgaacttcaaatatttcctgtgcatggaaggaaacagtgggcgatgaaagcagggaatttgggaggtacatgcgacagagagaagagcaagagaagcaggaagcggagttgttcactcgggctcctgtaaccaaacatgataagcagatcgagaagcgcataaggagacaacttcatgggctaggaggcttaactgacgattttggccttgggatgaacatgctgttgggaggagacaaggaagatgatggcggttcaagaaagtcgcatggcaaaagcggaaaccgaaagaagcacctgaagaacagcaagaagaggatgaggcattagccctagacccacactgttgtagcacttcaatatactgatagagcctagaagacggttcaagcaagccacacgaaaagtgaagccggagaaaataccaagaagccaagtagagaaaaaaagctttggttcctgtcgtattatttctgaaacacaaaacttgatctgagcgactgatcgtgagctaatgtaacagtatgaattatatggcttgaacatggtaggtgtaaaatgttttgttcatcggtagagtattccagatgtgatcggcttaacagtatgaattatatagaactatgtgagccaatgtaacagtatgaattatataagttatcaagatattacatgccctcattgcaatgcacgggcactgacttgttatgata

SEQ ID NO: 1915 - DNA, 3831 bp, Zea Mays
gtacgaggcccatctcccatgacaaatgaaaaccctaatctccagcaccccggcggcctccagcgctcccgctccttgctcgcctccacccgcggccaccaccgccctgcggcccccgccgcttgccagcctccaccgcgccgcgagtcgcgccgttcctgcaccggctggtcctggagcacgggaggacgagcatgtactggttcggccccagccccaaggtgaccatcgtcgactcggacctggccgaggacgtgttgtccaacaagttcggccacttcgagaagctcaaggtcctggcgctgtccaagatgctgggctccggcgtggccagccacgagggcgagaagtgggtcaagcaccggaggatcctcaaccctgcgttccatcttgagaagctcaagcgcatgtgccggcgttttctacgtgctgcgaggagctggtgagcaggtgggcggcggagtcccttggctccgacagctcgtgcgagctggacgtctggccggagctgcagaacctgacgggagacgtcatttctcgcaccgcgttcagcagcagctacagcgaagggagaaggatcttccagctacaggccgagcaagcttcgcttgtcatgaccaacattcggaagatcatgatcctcggctacatgtacttgcctaccgcgaacaataggaagatgcgcaggaacaacagggaggtggagtcaatcctgcgagagataatcgggaagaggatccaggcaaggtgggtctactgctggagacaaacatgagagacgacatggggatgacgatcgaagacgtgatcgaggagtgcaaggtgttctacttcgccgggatggagaccacgtcggtgctgctcacgtggacgatggtggtgctcagcatggacccggagtggcaggaccgcgcgagggaggaggtgacggctctgttcggcagggacggcaagcccgagtacgacggcctaagccgcctcaaagtcgtgaccatggtgctctacgaggtgctccggctgtacccgccggccacctccgtcgtccggcaaacgtacaaggagatggagctgcctgtgctgctcatccaccacgacccggacatctggggaggcgacgcgcgcgagttcaggcccgacaggttctccgagggcgtgtccagggcctccaaggaccccggcgcgttcctcccgttcggctggggcccgcgcatctgcatcggccagaacttcgcgctgctggaggccaagatggcgctctgcatgatcctccagcggttcgagttcgggctcgcgccatcctacgctcatgcgccgcataccgtgataaccttgcatcctatgcacgattgcaagaatgggattgctaagcaagctaagatttcaatggcatattccttcatacataggccattgagcgacgaggcacaccgcgtcagcactcccgtggtggtcacttgcaatgaccagagacgggaggtcttcgttgcccagaacatcgctaacaagaaaattgaccgcaccgttgcattcgacaaggtgctaggtccaaagtctcaacagcaggacgtcttcaaccatgctgttgtgccacttgtcagcgaggttgacggttataattgcacaatatttgcatatggccagactggaactggcaaaacgtacacaatggaaggaggaggggacaaagcactgaatgctgacctcccgactgatgccggtgtcattccaagtgttgttaagcgcatatttgacatcctcgaggcacagagtgcagagtacaacatgaaggtttcttttcttgagttgtacaatgcggagctcactgatcttctagctctacaatgagattgcaagaacgggactgctaagcaagataagatttcaatggcctattccttcatacataggccattgaaccggaaaattttgtcggtattcggtaactataggatcatgtggttgttggtcgagttggaccaattatgctggctcatttgttggatgttttgacaagtcgattctagcttccttatgatctatgttagatttggtaatgcataccagttagtaaagcatttacgatgtacattgttatacatagagctttacatcgcaaaaattatcagtttccctcagttacgatatgcatttagtatttatcgtattttgaaaattaataacctattatactatgataggcttgacttcacgtttatctaaataacttagtgcgatgatgcttgaaaacttatcttccattttgccagatcaatgaataaaaggattattcatatcaatgtccatgcaccttctcagaaaatccttttgtgatgttggtgttggattcctggacctgtactggtacatatgctaagtcatccacaaatctgacccagaattgtaccgttctttttatagccatgtttggtacttgtttgagtgctccatagttcgcaagtttgttttgttatgatgtattttgacatttgaatctcagacatgcttaggaactactgatttgaatttatgggctaacagttccagtatttcaaatagaaagtatgctatatcaaataagttgatgatacttttggtactggagaatgaagttagactgcatttgatattagaagtctgtttgtctgattgcagttgattataaagaagctagagctgatattagaagtctgatattagaagtctgtttgtctgattgcagttgattataaagaagctagagcttccagtcaagtttgatattagaagtcttcttttgcttttacattttgttttttatgatcttgatcttagaagcagggttttggtaccagcttaactaattttctgaagttttatgttcttactttaattataactagatgattgcaataagatatcatgaggcgcgccgaggagaacaggggcctcctctccgcctcctccttcgacaggcagctgctgcggaaggaggtggtgaggagggtcaaggccgcggtggcgggacgtgagtgaagtgagctttgtcgagcctatatgtggaggtcggtcgtgaagctgggactaggacaagggcgagctgaaggctagaagctgtaaatgcacccttcaagagtcttcataggccaagtctctacatagtgcatggaaggaaacagtgggcgatgaaagcagggaatttgggaggtacatgcgacagagagaagagcaagagaagcaggaagcggagttgttcactcgggctcctgtaaccaaacatgataagcagatcgagaagcgcataaggagacaacttcatgggctaggaggcttaactgacgattttggccttgggatgaacatgctgttgggaggagacaaggaagatgatggcggttcaagaaagtcgcatggcaaaagcggaaaccgaaagaagcacctgaagaacagcaagaagaggatgaggcattagccctagacccacactgttgtagcacttcaatatactgatagagcctagaagacggttcaagcaagccacacgaaaagtgaagccggagaaaataccaagaagccaagtagagaaaaaaagctttggttcctgtcgtattatttctgaaacacaaaacttgatctgagcgactgatcgtgagctaatgtaacagtatgaattatatggcttgaacatggtaggtgtaaaatgttttgttcatcggtagagtattccagatgtgatcggcttaacagtatgaattatatagaactatgtgagccaatgtaacagtatgaattatataagttatcaagatattacatgccctcattgcaatgcacgggcactgacttgttatgata

SEQ ID NO: 1916 - DNA, 3785 bp, Zea Mays
gtacgaggcccatctcccatgacaaatgaaaaccctaatctccagcaccccggcggcctccagcgctcccgctccttgctcgcctccacccgcggccaccaccgccctgcggcccccgccgcttgccagcctccaccgcgccgcgagtcgcgccgttcctgcaccggctggtcctggagcacgggaggacgagcatgtactggttcggccccagccccaaggtgaccatcgtcgactcggacctggccgaggacgtgttgtccaacaagttcggccacttcgagaagctcaaggtcctggcgctgtccaagatgctgggctccggcgtggccagccacgagggcgagaagtgggtcaagcaccggaggatcctcaaccctgcgttccatcttgagaagctcaagcgcatgtgccggcgttttctacgtgctgcgaggagctggtgagcaggtgggcggcggagtcccttggctccgacagctcgtgcgagctggacgtctggccggagctgcagaacctgacgggagacgtcatttctcgcaccgcgttcagcagcagctacagcgaagggagaaggatcttccagctacaggccgagcaagcttcgcttgtcatgaccaacattcggaagatcatgatcctcggctacatgtacttgcctaccgcgaacaataggaagatgcgcaggaacaacagggaggtggagtcaatcctgcgagagataatcgggaagaggatccaggcaaggtgggtctactgctggagacaaacatgagagacgacatggggatgacgatcgaagacgtgatcgaggagtgcaaggtgttctacttcgccgggatggagaccacgtcggtgctgctcacgtggacgatggtggtgctcagcatggacccggagtggcaggaccgcgcgagggaggaggtgacggctctgttcggcagggacggcaagcccgagtacgacggcctaagccgcctcaaagtcgtgaccatggtgctctacgaggtgctccggctgtacccgccggccacctccgtcgtccggcaaacgtacaaggagatggagctgcctgtgctgctcatccaccacgacccggacatctggggaggcgacgcgcgcgagttcaggcccgacaggttctccgagggcgtgtccagggcctccaaggaccccggcgcgttcctcccgttcggctggggcccgcgcatctgcatcggccagaacttcgcgctgctggaggccaagatggcgctctgcatgatcctccagcggttcgagttcgggctcgcgccatcctacgctcatgcgccgcataccgtgataaccttgcatcctatgcacgattgcaagaatgggattgctaagcaagctaagatttcaatggcatattccttcatacataggccattgagcgacgaggcacaccgcgtcagcactcccgtggtggtcacttgcaatgaccagagacgggaggtcttcgttgcccagaacatcgctaacaagaaaattgaccgcaccgttgcattcgacaaggtgctaggtccaaagtctcaacagcaggacgtcttcaaccatgctgttgtgccacttgtcagcgaggttgacggttataattgcacaatatttgcatatggccagactggaactggcaaaacgtacacaatggaaggaggaggggacaaagcactgaatgctgacctcccgactgatgccggtgtcattccaagtgttgttaagcgcatatttgacatcctcgaggcacagagtgcagagtacaacatgaaggtttcttttcttgagttgtacaatgcggagctcactgatcttctagctctacaatgagattgcaagaacgggactgctaagcaagataagatttcaatggcctattccttcatacataggccattgaaccggaaaattttgtcggtattcggtaactataggatcatgtggttgttggtcgagttggaccaattatgctggctcatttgttggatgttttgacaagtcgattctagcttccttatgatctatgttagatttggtaatgcataccagttagtaaagcatttacgatgtacattgttatacatagagctttacatcgcaaaaattatcagtttccctcagttacgatatgcatttagtatttatcgtattttgaaaattaataacctattatactatgataggcttgacttcacgtttatctaaataacttagtgcgatgatgcttgaaaacttatcttccattttgccagatcaatgaataaaaggattattcatatcaatgtccatgcaccttctcagaaaatccttttgtgatgttggtgttggattcctggacctgtactggtacatatgctaagtcatccacaaatctgacccagaattgtaccgttctttttatagccatgtttggtacttgtttgagtgctccatagttcgcaagtttgttttgttatgatgtattttgacatttgaatctcagacatgcttaggaactactgatttgaatttatgggctaacagttccagtatttcaaatagaaagtatgctatatcaaataagttgatgatacttttggtactggagaatgaagttagactgcatttgatattagaagtctgtttgtctgattgcagttgattataaagaagctagagctgatattagaagtctgatattagaagtctgtttgtctgattgcagttgattataaagaagctagagcttccagtcaagtttgatattagaagtcttcttttgcttttacattttgttttttatgatcttgatcttagaagcagggttttggtaccagcttaactaattttctgaagttttatgttcttactttaattataactagatgattgcaataagatatcatgaggcgcgccgaggagaacaggggcctcctctccgcctcctccttcgacaggcagctgctgcggaaggaggtggtgaggagggtcaaggccgcggtggcgggacgtgagtgaagtgagctttgtcgagcctatatgtggaggtcggtcgtgaagctgggactaggacaagggcgagctgaaggctagaagcttgcatggaaggaaacagtgggcgatgaaagcagggaatttgggaggtacatgcgacagagagaagagcaagagaagcaggaagcggagttgttcactcgggctcctgtaaccaaacatgataagcagatcgagaagcgcataaggagacaacttcatgggctaggaggcttaactgacgattttggccttgggatgaacatgctgttgggaggagacaaggaagatgatggcggttcaagaaagtcgcatggcaaaagcggaaaccgaaagaagcacctgaagaacagcaagaagaggatgaggcattagccctagacccacactgttgtagcacttcaatatactgatagagcctagaagacggttcaagcaagccacacgaaaagtgaagccggagaaaataccaagaagccaagtagagaaaaaaagctttggttcctgtcgtattatttctgaaacacaaaacttgatctgagcgactgatcgtgagctaatgtaacagtatgaattatatggcttgaacatggtaggtgtaaaatgttttgttcatcggtagagtattccagatgtgatcggcttaacagtatgaattatatagaactatgtgagccaatgtaacagtatgaattatataagttatcaagatattacatgccctcattgcaatgcacgggcactgacttgttatgata

SEQ ID NO: 1917 - DNA, 4350 bp, Zea Mays
gtacgaggcccatctcccatgacaaatgaaaaccctaatctccagcaccccggcggcctccagcgctcccgctccttgctcgcctccacccgcggccaccaccgccctgcggcccccgccgcttgccagcctccaccgcgccgcgagtcgcgccgttcctgcaccggctggtcctggagcacgggaggacgagcatgtactggttcggccccagccccaaggtgaccatcgtcgactcggacctggccgaggacgtgttgtccaacaagttcggccacttcgagaagctcaaggtcctggcgctgtccaagatgctgggctccggcgtggccagccacgagggcgagaagtgggtcaagcaccggaggatcctcaaccctgcgttccatcttgagaagctcaagcgcatgtgccggcgttttctacgtgctgcgaggagctggtgagcaggtgggcggcggagtcccttggctccgacagctcgtgcgagctggacgtctggccggagctgcagaacctgacgggagacgtcatttctcgcaccgcgttcagcagcagctacagcgaagggagaaggatcttccagctacaggccgagcaagcttcgcttgtcatgaccaacattcggaagatcatgatcctcggctacatgtacttgcctaccgcgaacaataggaagatgcgcaggaacaacagggaggtggagtcaatcctgcgagagataatcgggaagaggatccaggcaaggtgggtctactgctggagacaaacatgagagacgacatggggatgacgatcgaagacgtgatcgaggagtgcaaggtgttctacttcgccgggatggagaccacgtcggtgctgctcacgtggacgatggtggtgctcagcatggacccggagtggcaggaccgcgcgagggaggaggtgacggctctgttcggcagggacggcaagcccgagtacgacggcctaagccgcctcaaagtcgtgaccatggtgctctacgaggtgctccggctgtacccgccggccacctccgtcgtccggcaaacgtacaaggagatggagctgcctgtgctgctcatccaccacgacccggacatctggggaggcgacgcgcgcgagttcaggcccgacaggttctccgagggcgtgtccagggcctccaaggaccccggcgcgttcctcccgttcggctggggcccgcgcatctgcatcggccagaacttcgcgctgctggaggccaagatggcgctctgcatgatcctccagcggttcgagttcgggctcgcgccatcctacgctcatgcgccgcataccgtgataaccttgcatcctatgcacgattgcaagaatgggattgctaagcaagctaagatttcaatggcatattccttcatacataggccattgagcgacgaggcacaccgcgtcagcactcccgtggtggtcacttgcaatgaccagagacgggaggtcttcgttgcccagaacatcgctaacaagaaaattgaccgcaccgttgcattcgacaaggtgctaggtccaaagtctcaacagcaggacgtcttcaaccatgctgttgtgccacttgtcagcgaggttgacggttataattgcacaatatttgcatatggccagactggaactggcaaaacgtacacaatggaaggaggaggggacaaagcactgaatgctgacctcccgactgatgccggtgtcattccaagtgttgttaagcgcatatttgacatcctcgaggcacagagtgcagagtacaacatgaaggtttcttttcttgagttgtacaatgcggagctcactgatcttctagctctacaatgagattgcaagaacgggactgctaagcaagataagatttcaatggcctattccttcatacataggccattgaaccggaaaattttgtcggtattcggtaactataggatcatgtggttgttggtcgagttggaccaattatgctggctcatttgttggatgttttgacaagtcgattctagcttccttatgatctatgttagatttggtaatgcataccagttagtaaagcatttacgatgtacattgttatacatagagctttacatcgcaaaaattatcagtttccctcagttacgatatgcatttagtatttatcgtattttgaaaattaataacctattatactatgataggcttgacttcacgtttatctaaataacttagtgcgatgatgcttgaaaacttatcttccattttgccagatcaatgaataaaaggattattcatatcaatgtccatgcaccttctcagaaaatccttttgtgatgttggtgttggattcctggacctgtactggtacatatgctaagtcatccacaaatctgacccagaattgtaccgttctttttatagccatgtttggtacttgtttgagtgctccatagttcgcaagtttgttttgttatgatgtattttgacatttgaatctcagacatgcttaggaactactgatttgaatttatgggctaacagttccagtatttcaaatagaaagtatgctatatcaaataagttgatgatacttttggtactggagaatgaagttagactgcatttgatattagaagtctgtttgtctgattgcagttgattataaagaagctagagctgatattagaagtctgatattagaagtctgtttgtctgattgcagttgattataaagaagctagagcttccagtcaagtttgatattagaagtcttcttttgcttttacattttgttttttatgatcttgatcttagaagcagggttttggtaccagcttaactaattttctgaagttttatgttcttactttaattataactagatgattgcaataagatatcatgaggcgcgccgaggagaacaggggcctcctctccgcctcctccttcgacaggcagctgctgcggaaggaggtggtgaggagggtcaaggccgcggtggcgggacgtgagtgaagtgagctttgtcgagcctatatgtggaggtcggtcgtgaagctgggactaggacaagggcgagctgaaggctagaagctgtaaatgcacccttcaagagtcttcataggccaagtctctacataggtgttgacaaaaagggaaattcatgacaatgcgtttatatgagattgtccaatatcgaaaccaagaatacatggggggcaactgtattcgatttttgtttctctttcgtggagtattactgaaatatatgcttccagtgttgaagtttccaaattaaatgttatctctgtacaaagtgtgcaggctcggttataggaattttataaagaaaatgacaaatatacatgtacgaacttcaaatatttcctggtactaacctctctgctctgagatgacatgttcttttgctgttatgaaatcaaatatttcttcatgatctcttataatctgtcaaatgatgtttgcccagtggcaatagaaaacccttatattaaagagataatcgatgatgatgcggacagacctaaagatgtttgctcaacttttgctatgaatttattagtaggatgtcttggatatagagtaagcaagttatgtgttgtttattttcatgctaaatgatctttctggaacttacagtgcatggaaggaaacagtgggcgatgaaagcagggaatttgggaggtacatgcgacagagagaagagcaagagaagcaggaagcggagttgttcactcgggctcctgtaaccaaacatgataagcagatcgagaagcgcataaggagacaacttcatgggctaggaggcttaactgacgattttggccttgggatgaacatgctgttgggaggagacaaggaagatgatggcggttcaagaaagtcgcatggcaaaagcggaaaccgaaagaagcacctgaagaacagcaagaagaggatgaggcattagccctagacccacactgttgtagcacttcaatatactgatagagcctagaagacggttcaagcaagccacacgaaaagtgaagccggagaaaataccaagaagccaagtagagaaaaaaagctttggttcctgtcgtattatttctgaaacacaaaacttgatctgagcgactgatcgtgagctaatgtaacagtatgaattatatggcttgaacatggtaggtgtaaaatgttttgttcatcggtagagtattccagatgtgatcggcttaacagtatgaattatatagaactatgtgagccaatgtaacagtatgaattatataagttatcaagatattacatgccctcattgcaatgcacgggcactgacttgttatgata

SEQ ID NO: 1918 - DNA, 3002 bp, Zea Mays
gtacgaggcccatctcccatgacaaatgaaaaccctaatctccagcaccccggcggcctccagcgctcccgctccttgctcgcctccacccgcggccaccaccgccctgcggcccccgccgcttgccagcctccaccgcgccgcgagtcgcgccgttcctgcaccggctggtcctggagcacgggaggacgagcatgtactggttcggccccagccccaaggtgaccatcgtcgactcggacctggccgaggacgtgttgtccaacaagttcggccacttcgagaagctcaaggtcctggcgctgtccaagatgctgggctccggcgtggccagccacgagggcgagaagtgggtcaagcaccggaggatcctcaaccctgcgttccatcttgagaagctcaagcgcatgtgccggcgttttctacgtgctgcgaggagctggtgagcaggtgggcggcggagtcccttggctccgacagctcgtgcgagctggacgtctggccggagctgcagaacctgacgggagacgtcatttctcgcaccgcgttcagcagcagctacagcgaagggagaaggatcttccagctacaggccgagcaagcttcgcttgtcatgaccaacattcggaagatcatgatcctcggctacatgtacttgcctaccgcgaacaataggaagatgcgcaggaacaacagggaggtggagtcaatcctgcgagagataatcgggaagaggatccaggcaaggtgggtctactgctggagacaaacatgagagacgacatggggatgacgatcgaagacgtgatcgaggagtgcaaggtgttctacttcgccgggatggagaccacgtcggtgctgctcacgtggacgatggtggtgctcagcatggacccggagtggcaggaccgcgcgagggaggaggtgacggctctgttcggcagggacggcaagcccgagtacgacggcctaagccgcctcaaagtcgtgaccatggtgctctacgaggtgctccggctgtacccgccggccacctccgtcgtccggcaaacgtacaaggagatggagctgcctgtgctgctcatccaccacgacccggacatctggggaggcgacgcgcgcgagttcaggcccgacaggttctccgagggcgtgtccagggcctccaaggaccccggcgcgttcctcccgttcggctggggcccgcgcatctgcatcggccagaacttcgcgctgctggaggccaagatggcgctctgcatgatcctccagcggttcgagttcgggctcgcgccatcctacgctcatgcgccgcataccgtgataaccttgcatcctatgcacgattgcaagaatgggattgctaagcaagctaagatttcaatggcatattccttcatacataggccattgagcgacgaggcacaccgcgtcagcactcccgtggtggtcacttgcaatgaccagagacgggaggtcttcgttgcccagaacatcgctaacaagaaaattgaccgcaccgttgcattcgacaaggtgctaggtccaaagtctcaacagcaggacgtcttcaaccatgctgttgtgccacttgtcagcgaggttgacggttataattgcacaatatttgcatatggccagactggaactggcaaaacgtacacaatggaaggaggaggggacaaagcactgaatgctgacctcccgactgatgccggtgtcattccaagtgttgttaagcgcatatttgacatcctcgaggcacagagtgcagagtacaacatgaaggtttcttttcttgagttgtacaatgcggagctcactgatcttctagctctacaatgagattgcaagaacgggactgctaagcaagataagatttcaatggcctattccttcatacataggccattgaaccggaaaattttgtcggtattcggtaactataggatcatgtggttgttggtcgagttggaccaattatgctggctcatttgttggatgttttgacaagtcgattctagcttccttatgatctatgttagatttgatgattgcaataagatatcatgaggcgcgccgaggagaacaggggcctcctctccgcctcctccttcgacaggcagctgctgcggaaggaggtggtgaggagggtcaaggccgcggtggcgggacgtgagtgaagtgagctttgtcgagcctatatgtggaggtcggtcgtgaagctgggactaggacaagggcgagctgaaggctagaagctgtaaatgcacccttcaagagtcttcataggccaagtctctacatagtgcatggaaggaaacagtgggcgatgaaagcagggaatttgggaggtacatgcgacagagagaagagcaagagaagcaggaagcggagttgttcactcgggctcctgtaaccaaacatgataagcagatcgagaagcgcataaggagacaacttcatgggctaggaggcttaactgacgattttggccttgggatgaacatgctgttgggaggagacaaggaagatgatggcggttcaagaaagtcgcatggcaaaagcggaaaccgaaagaagcacctgaagaacagcaagaagaggatgaggcattagccctagacccacactgttgtagcacttcaatatactgatagagcctagaagacggttcaagcaagccacacgaaaagtgaagccggagaaaataccaagaagccaagtagagaaaaaaagctttggttcctgtcgtattatttctgaaacacaaaacttgatctgagcgactgatcgtgagctaatgtaacagtatgaattatatggcttgaacatggtaggtgtaaaatgttttgttcatcggtagagtattccagatgtgatcggcttaacagtatgaattatatagaactatgtgagccaatgtaacagtatgaattatataagttatcaagatattacatgccctcattgcaatgcacgggcactgacttgttatgata

SEQ ID NO: 1919 - DNA, 3251 bp, Zea Mays
gtacgaggcccatctcccatgacaaatgaaaaccctaatctccagcaccccggcggcctccagcgctcccgctccttgctcgcctccacccgcggccaccaccgccctgcggcccccgccgcttgccagcctccaccgcgccgcgagtcgcgccgttcctgcaccggctggtcctggagcacgggaggacgagcatgtactggttcggccccagccccaaggtgaccatcgtcgactcggacctggccgaggacgtgttgtccaacaagttcggccacttcgagaagctcaaggtcctggcgctgtccaagatgctgggctccggcgtggccagccacgagggcgagaagtgggtcaagcaccggaggatcctcaaccctgcgttccatcttgagaagctcaagcgcatgtgccggcgttttctacgtgctgcgaggagctggtgagcaggtgggcggcggagtcccttggctccgacagctcgtgcgagctggacgtctggccggagctgcagaacctgacgggagacgtcatttctcgcaccgcgttcagcagcagctacagcgaagggagaaggatcttccagctacaggccgagcaagcttcgcttgtcatgaccaacattcggaagatcatgatcctcggctacatgtacttgcctaccgcgaacaataggaagatgcgcaggaacaacagggaggtggagtcaatcctgcgagagataatcgggaagaggatccaggcaaggtgggtctactgctggagacaaacatgagagacgacatggggatgacgatcgaagacgtgatcgaggagtgcaaggtgttctacttcgccgggatggagaccacgtcggtgctgctcacgtggacgatggtggtgctcagcatggacccggagtggcaggaccgcgcgagggaggaggtgacggctctgttcggcagggacggcaagcccgagtacgacggcctaagccgcctcaaagtcgtgaccatggtgctctacgaggtgctccggctgtacccgccggccacctccgtcgtccggcaaacgtacaaggagatggagctgcctgtgctgctcatccaccacgacccggacatctggggaggcgacgcgcgcgagttcaggcccgacaggttctccgagggcgtgtccagggcctccaaggaccccggcgcgttcctcccgttcggctggggcccgcgcatctgcatcggccagaacttcgcgctgctggaggccaagatggcgctctgcatgatcctccagcggttcgagttcgggctcgcgccatcctacgctcatgcgccgcataccgtgataaccttgcatcctatgcacgattgcaagaatgggattgctaagcaagctaagatttcaatggcatattccttcatacataggccattgagcgacgaggcacaccgcgtcagcactcccgtggtggtcacttgcaatgaccagagacgggaggtcttcgttgcccagaacatcgctaacaagaaaattgaccgcaccgttgcattcgacaaggtgctaggtccaaagtctcaacagcaggacgtcttcaaccatgctgttgtgccacttgtcagcgaggttgacggttataattgcacaatatttgcatatggccagactggaactggcaaaacgtacacaatggaaggaggaggggacaaagcactgaatgctgacctcccgactgatgccggtgtcattccaagtgttgttaagcgcatatttgacatcctcgaggcacagagtgcagagtacaacatgaaggtttcttttcttgagttgtacaatgcggagctcactgatcttctagctctacaatgagattgcaagaacgggactgctaagcaagataagatttcaatggcctattccttcatacataggccattgaaccggaaaattttgtcggtattcggtaactataggatcatgtggttgttggtcgagttggaccaattatgctggctcatttgttggatgttttgacaagtcgattctagcttccttatgatctatgttagatttgatgattgcaataagatatcatgaggcgcgccgaggagaacaggggcctcctctccgcctcctccttcgacaggcagctgctgcggaaggaggtggtgaggagggtcaaggccgcggtggcgggacgtgagtgaagtgagctttgtcgagcctatatgtggaggtcggtcgtgaagctgggactaggacaagggcgagctgaaggctagaagctgtaaatgcacccttcaagagtcttcataggccaagtctctacataggtgttgacaaaaagggaaattcatgacaatgcgtttatatgagattgtccaatatcgaaaccaagaatacatggggggcaactgtattcgatttttgtttctctttcgtggagtattactgaaatatatgcttccagtgttgaagtttccaaattaaatgttatctctgtacaaagtgtgcaggctcggttataggaattttataaagaaaatgacaaatatacatgtacgaacttcaaatatttcctgtgcatggaaggaaacagtgggcgatgaaagcagggaatttgggaggtacatgcgacagagagaagagcaagagaagcaggaagcggagttgttcactcgggctcctgtaaccaaacatgataagcagatcgagaagcgcataaggagacaacttcatgggctaggaggcttaactgacgattttggccttgggatgaacatgctgttgggaggagacaaggaagatgatggcggttcaagaaagtcgcatggcaaaagcggaaaccgaaagaagcacctgaagaacagcaagaagaggatgaggcattagccctagacccacactgttgtagcacttcaatatactgatagagcctagaagacggttcaagcaagccacacgaaaagtgaagccggagaaaataccaagaagccaagtagagaaaaaaagctttggttcctgtcgtattatttctgaaacacaaaacttgatctgagcgactgatcgtgagctaatgtaacagtatgaattatatggcttgaacatggtaggtgtaaaatgttttgttcatcggtagagtattccagatgtgatcggcttaacagtatgaattatatagaactatgtgagccaatgtaacagtatgaattatataagttatcaagatattacatgccctcattgcaatgcacgggcactgacttgttatgata

SEQ ID NO: 1920 - DNA, 3614 bp, Zea Mays
gtacgaggcccatctcccatgacaaatgaaaaccctaatctccagcaccccggcggcctccagcgctcccgctccttgctcgcctccacccgcggccaccaccgccctgcggcccccgccgcttgccagcctccaccgcgccgcgagtcgcgccgttcctgcaccggctggtcctggagcacgggaggacgagcatgtactggttcggccccagccccaaggtgaccatcgtcgactcggacctggccgaggacgtgttgtccaacaagttcggccacttcgagaagctcaaggtcctggcgctgtccaagatgctgggctccggcgtggccagccacgagggcgagaagtgggtcaagcaccggaggatcctcaaccctgcgttccatcttgagaagctcaagcgcatgtgccggcgttttctacgtgctgcgaggagctggtgagcaggtgggcggcggagtcccttggctccgacagctcgtgcgagctggacgtctggccggagctgcagaacctgacgggagacgtcatttctcgcaccgcgttcagcagcagctacagcgaagggagaaggatcttccagctacaggccgagcaagcttcgcttgtcatgaccaacattcggaagatcatgatcctcggctacatgtacttgcctaccgcgaacaataggaagatgcgcaggaacaacagggaggtggagtcaatcctgcgagagataatcgggaagaggatccaggcaaggtgggtctactgctggagacaaacatgagagacgacatggggatgacgatcgaagacgtgatcgaggagtgcaaggtgttctacttcgccgggatggagaccacgtcggtgctgctcacgtggacgatggtggtgctcagcatggacccggagtggcaggaccgcgcgagggaggaggtgacggctctgttcggcagggacggcaagcccgagtacgacggcctaagccgcctcaaagtcgtgaccatggtgctctacgaggtgctccggctgtacccgccggccacctccgtcgtccggcaaacgtacaaggagatggagctgcctgtgctgctcatccaccacgacccggacatctggggaggcgacgcgcgcgagttcaggcccgacaggttctccgagggcgtgtccagggcctccaaggaccccggcgcgttcctcccgttcggctggggcccgcgcatctgcatcggccagaacttcgcgctgctggaggccaagatggcgctctgcatgatcctccagcggttcgagttcgggctcgcgccatcctacgctcatgcgccgcataccgtgataaccttgcatcctatgcacgattgcaagaatgggattgctaagcaagctaagatttcaatggcatattccttcatacataggccattgagcgacgaggcacaccgcgtcagcactcccgtggtggtcacttgcaatgaccagagacgggaggtcttcgttgcccagaacatcgctaacaagaaaattgaccgcaccgttgcattcgacaaggtgctaggtccaaagtctcaacagcaggacgtcttcaaccatgctgttgtgccacttgtcagcgaggttgacggttataattgcacaatatttgcatatggccagactggaactggcaaaacgtacacaatggaaggaggaggggacaaagcactgaatgctgacctcccgactgatgccggtgtcattccaagtgttgttaagcgcatatttgacatcctcgaggcacagagtgcagagtacaacatgaaggtttcttttcttgagttgtacaatgcggagctcactgatcttctagctctacaatgagattgcaagaacgggactgctaagcaagataagatttcaatggcctattccttcatacataggccattgaaccggaaaattttgtcggtattcggtaactataggatcatgtggttgttggtcgagttggaccaattatgctggctcatttgttggatgttttgacaagtcgattctagcttccttatgatctatgttagatttgatcaatgaataaaaggattattcatatcaatgtccatgcaccttctcagaaaatccttttgtgatgttggtgttggattcctggacctgtactggtacatatgctaagtcatccacaaatctgacccagaattgtaccgttctttttatagccatgtttggtacttgtttgagtgctccatagttcgcaagtttgttttgttatgatgtattttgacatttgaatctcagacatgcttaggaactactgatttgaatttatgggctaacagttccagtatttcaaatagaaagtatgctatatcaaataagttgatgatacttttggtactggagaatgaagttagactgcatttgatattagaagtctgtttgtctgattgcagttgattataaagaagctagagctgatattagaagtctgatattagaagtctgtttgtctgattgcagttgattataaagaagctagagcttccagtcaagtttgatattagaagtcttcttttgcttttacattttgttttttatgatcttgatcttagaagcagggttttggtaccagcttaactaattttctgaagttttatgttcttactttaattataactagatgattgcaataagatatcatgaggcgcgccgaggagaacaggggcctcctctccgcctcctccttcgacaggcagctgctgcggaaggaggtggtgaggagggtcaaggccgcggtggcgggacgtgagtgaagtgagctttgtcgagcctatatgtggaggtcggtcgtgaagctgggactaggacaagggcgagctgaaggctagaagctgtaaatgcacccttcaagagtcttcataggccaagtctctacatagtgcatggaaggaaacagtgggcgatgaaagcagggaatttgggaggtacatgcgacagagagaagagcaagagaagcaggaagcggagttgttcactcgggctcctgtaaccaaacatgataagcagatcgagaagcgcataaggagacaacttcatgggctaggaggcttaactgacgattttggccttgggatgaacatgctgttgggaggagacaaggaagatgatggcggttcaagaaagtcgcatggcaaaagcggaaaccgaaagaagcacctgaagaacagcaagaagaggatgaggcattagccctagacccacactgttgtagcacttcaatatactgatagagcctagaagacggttcaagcaagccacacgaaaagtgaagccggagaaaataccaagaagccaagtagagaaaaaaagctttggttcctgtcgtattatttctgaaacacaaaacttgatctgagcgactgatcgtgagctaatgtaacagtatgaattatatggcttgaacatggtaggtgtaaaatgttttgttcatcggtagagtattccagatgtgatcggcttaacagtatgaattatatagaactatgtgagccaatgtaacagtatgaattatataagttatcaagatattacatgccctcattgcaatgcacgggcactgacttgttatgata

SEQ ID NO: 1921 - DNA, 1026 bp, Zea Mays
gtcggcggagctgcagacgaccagagggacccgttcaggctgcccacgaaggagaacatccggatggcgatgcactggctggtgcagggctgcagctacggcgactccctggtgttccacttctcgggcatcggcgcgcaggtggcggacgacgacggcgacgaggcggacgggtacgacgaggccatctgcccgctggacgcgttccagagcgggcccatcctggacgacgagatcaacgaggtcatcgtgcgcccgctggtgcacggcgccaggctgcacgccgtggtggacgcctgctacagcgccacggtcctggacctcccctaccagtgccgcatgtccaggaacgggttctggcagtgggaggacgagagcccgccgtcgggcgcctggaagggcaccagcggaggccacgccgtgctcatcagcggatacagcgagggcaaaggcaacttcgccatgatgcccgacgcccacgcgtcggtcgtcggggccatgacgcacagcttcgtccggacgctggagtgccagccgcgcggggtcacctacggccacctgctcagctccatgagggccatcatgaagaaccgcggcgggggctgcgatctgcagggggccatcggcgcacccatccgcaccgtcgccaacttcagcggcgtgcaggagcctaacctgtcctcttcggagacgtttgacatttaccgcaagcagttcgtcctgtagacaccaccacaccagggtttgcccctgccggccggccgcttgtaatgaattgccgtcgtatcagaataagaaattatctatcgaccatgatatgatatgatatatcaggaaagaaggaactattacccctcaatgtaataactaagcatgttcaatgtcctctttttattagagagagagacagagagaaaacgcggaatttgagacgtgtgcatgcagtttacgtgatcaataaagttacatagaaattattttatccacgtgcgatgcaagtggagcttctactacctaaccccaaat

SEQ ID NO: 1922 - DNA, 3568 bp, Zea Mays
gtttggatgtggatccaataccggcccatgatgaaataggtattcgtttaacctaggcctgttttcgaacccgatggaatccctgcgaaaccccatgtttcggacgtggaaacgacccacgaatgcgtagtcgtggaactcctcccggcctcctgggtatggaagcgacggcggcgacgcgcgattcagagtagcgacgacggcgacgcatggtccctcccgccacccgccaccatcgtcgacagcgaccttttccccgattgtacctgcaccggttagagttggagaagaccaacccccgccgtcttgggacccggtaccatccccgagaggtacttcttgggacccggtacccccattttttttgcaatgagtatggggttaatggagcgcattaggaagagaagacaggaggatgatgatgatatgatgatgttcttccttcccgcattacatttgttgcgttctagttctcttaaagggaggagggttaagaagcgacgacacacatccaagctaagtggcgaggagcatgttttagagttgcttgaagggcatgtcaagaactgccgagtagcattcagaatggaacctgaaatttttagagccctagccagctatcttaggaaggaaaggttggtacgtgacacaaggataaaagttgaggagaagctcggcttctttctatacatgataagccataacgcttcatttgaagatctgcaagaagagttcgggcatagtagtgacacattccaccatcatataaaacatttttttgacatagttgtcccttccctcgccaaacgatttttgaagcctccttctccaatgcaagtacattcgaaaattgaaaggaatcctaggttctatccttacttcaagaactgcatcggtgcaattgatggcactcatgtgcccattacaatttcacctgacaaagctgctccttttagaaacaggaaggggactctcagccaaaacgtgatggtagcttgtgatttcgacctaaatatcactttcatgtctactggatgggagggatccgctacagatgctagagttcttcgatctgcaatgaacaatggattccatgtacctccaggaaagttctatttggttgatggtgggtatgctaacaccacgtcattccttgcaccttatcgtggagttagataccatctaaaggaatatgggcaaggtcaccgtagacctcagaactacaaggagttatttaaccatcgccatgccatactgaggaatcatgttgaaaggactttgggggttgtgaagaagcgctttcccatcctaaaagctgccacatttcacaaaataaggaatcaagtgaagataccagtagcagctgttgtacttcacaatattattcggtcactcaaaggggatgaggaatggttagataatcaaccagataatatttcgccacaaaactttgttgatctaccggatggcgatcaaggcaacgatcaagtaaatgtccaaggaaatagaccatatgttgctctgttctacattttatttactgtcacattgttacctctcttaatatttggtttaatccatttctcattgtttagtatcctgaaacataatatcatctaactgttttcataatagaaattttctttgttcctttagttccaatttcagaatagaaatttcagctaactgttttcagcatagaaatttggtttaatactgtgttatataatattagttaacatgtttggaaggggttctccaagaatcaacatgctcttatcaaaaagtgcaacaaagaagccttctcctaaagctggtgatccaaaaaagcatggaggttctccaaaagagaaattaagagccgcttggaactcaactctagagaaaactcttgtggacctcttgcatgagcacaaaacagctgattataggggtcaaaatggatggacaacagaagcatggaacaaaattgtcaaggaatttcatcagagggaacaatatgtctatttcacaaagacacaaatacaagataaggaaagagagctgaaaagggactacaggttgctaaaggatgcaaagaatcaaagtggagctcattttgatgagaagatagggaggattacggctgacccagctttatggaaaaatatactaacttctcatcctaaggctaaaaagttccgcaacaagtcttttcctctatatgaggccttgggggagctttatgatgggcaaacagctgaagggacctacaactacacctccacccaacttccagatcttactcaagtaggaaatggagatgaatttctcaacatagaacatgaacaagatgaattggaagaaatcttgcctgcacatgaagaagatgatgtcaatgtagttaaggcaggagatgcaaccggtgaaaggcatgatccgacgccacagagaaggactactgctgcaagagggaacaatgaggaaacgaggacaaagaggcataaaaagggcgataacctagaaggaataatgggaagatacattgacatgagaatgaagcaagctgaggaagaagccacacatctagcaaaagagagggaggaaaaggaagtgagtcaagctgcagacttctcaatcaagaagtgcatatccattcttggtacaatggaagttacaaaggaggaaaaagcaaaagcctacaatgccttcaaagaccttgacaataggcaaattttcttgagtgcctacgatgatgatgctgagtctgcactgatttggttgagaaacgagatggcttagctgaaattacaacaaggactgcagagaaatccagaatcgcttccttttgatgagatactctactgtaacattggaaatctccattccattggccaacagccagttacctatttcagaactagatcattggataactgcattttgttcatgctttaaactgctttaaactgaaatacgttacagctagaactagatcagctgtacatgcttctgcattgaactacattttgttgaacgtggactgcattttgcaaaaaacatgaactttactatactagagtgaagcgaacatggactacattttgcaaaaaaaatatggacttcactgtactagtgtctaagcgaacatggactgcattttttaaaaaaaacatggacttcactatactagtgtggaagcgaacaattcacagctaatacatttgtatccatgtggtataagcgaatagtgaaaaataagccatgtattaaatcccagccgtaacgagaacacacatggtttatgtgacatgacatggattcactcaatcccgctgtgtattagatcctaatgtgtattaaatactagcaagccgaacaaggccttagggggtgtttgtttgagattataatctatccagattatataatctaacaacttttgaactaagagttagttcaaaaattgttggattatataatctagatgaattataatcccaaacaaacaccccttatagatgtccaataaacacgagacccgcaagcccggcacgaagctcgctgtttgggtccagttcgagtccgg

SEQ ID NO: 1923 - DNA, 3620 bp, Zea Mays
cttcattgctgaggatggattcctagttctctgcctcatgcctcatccatgctgagatcgagatcctagatccatgctcctttgtgtctgcaggctcgttactagcagatttttttggccctgtcatagcagagcatgtgcccccattttttgctttcctacagcagatggcagactctcagttacggtatttgcaagcgacagtgtgccctcagtttcctcctttgtagtaggcgttttcctctacttctccctggcaaacatttttcttggagttcggctgcccctcagctttttatctttttcttggaattgtacctgcaccggttagagttggagaagaccaacccccgccgtcttgggacccggtaccatccccgagaggtacttcttgggacccggtacccccattttttttgcaatgagtatggggttaatggagcgcattaggaagagaagacaggaggatgatgatgatatgatgatgttcttccttcccgcattacatttgttgcgttctagttctcttaaagggaggagggttaagaagcgacgacacacatccaagctaagtggcgaggagcatgttttagagttgcttgaagggcatgtcaagaactgccgagtagcattcagaatggaacctgaaatttttagagccctagccagctatcttaggaaggaaaggttggtacgtgacacaaggataaaagttgaggagaagctcggcttctttctatacatgataagccataacgcttcatttgaagatctgcaagaagagttcgggcatagtagtgacacattccaccatcatataaaacatttttttgacatagttgtcccttccctcgccaaacgatttttgaagcctccttctccaatgcaagtacattcgaaaattgaaaggaatcctaggttctatccttacttcaagaactgcatcggtgcaattgatggcactcatgtgcccattacaatttcacctgacaaagctgctccttttagaaacaggaaggggactctcagccaaaacgtgatggtagcttgtgatttcgacctaaatatcactttcatgtctactggatgggagggatccgctacagatgctagagttcttcgatctgcaatgaacaatggattccatgtacctccaggaaagttctatttggttgatggtgggtatgctaacaccacgtcattccttgcaccttatcgtggagttagataccatctaaaggaatatgggcaaggtcaccgtagacctcagaactacaaggagttatttaaccatcgccatgccatactgaggaatcatgttgaaaggactttgggggttgtgaagaagcgctttcccatcctaaaagctgccacatttcacaaaataaggaatcaagtgaagataccagtagcagctgttgtacttcacaatattattcggtcactcaaaggggatgaggaatggttagataatcaaccagataatatttcgccacaaaactttgttgatctaccggatggcgatcaaggcaacgatcaagtaaatgtccaaggaaatagaccatatgttgctctgttctacattttatttactgtcacattgttacctctcttaatatttggtttaatccatttctcattgtttagtatcctgaaacataatatcatctaactgttttcataatagaaattttctttgttcctttagttccaatttcagaatagaaatttcagctaactgttttcagcatagaaatttggtttaatactgtgttatataatattagttaacatgtttggaaggggttctccaagaatcaacatgctcttatcaaaaagtgcaacaaagaagccttctcctaaagctggtgatccaaaaaagcatggaggttctccaaaagagaaattaagagccgcttggaactcaactctagagaaaactcttgtggacctcttgcatgagcacaaaacagctgattataggggtcaaaatggatggacaacagaagcatggaacaaaattgtcaaggaatttcatcagagggaacaatatgtctatttcacaaagacacaaatacaagataaggaaagagagctgaaaagggactacaggttgctaaaggatgcaaagaatcaaagtggagctcattttgatgagaagatagggaggattacggctgacccagctttatggaaaaatatactaacttctcatcctaaggctaaaaagttccgcaacaagtcttttcctctatatgaggccttgggggagctttatgatgggcaaacagctgaagggacctacaactacacctccacccaacttccagatcttactcaagtaggaaatggagatgaatttctcaacatagaacatgaacaagatgaattggaagaaatcttgcctgcacatgaagaagatgatgtcaatgtagttaaggcaggagatgcaaccggtgaaaggcatgatccgacgccacagagaaggactactgctgcaagagggaacaatgaggaaacgaggacaaagaggcataaaaagggcgataacctagaaggaataatgggaagatacattgacatgagaatgaagcaagctgaggaagaagccacacatctagcaaaagagagggaggaaaaggaagtgagtcaagctgcagacttctcaatcaagaagtgcatatccattcttggtacaatggaagttacaaaggaggaaaaagcaaaagcctacaatgccttcaaagaccttgacaataggcaaattttcttgagtgcctacgatgatgatgctgagtctgcactgatttggttgagaaacgagatggcttagctgaaattacaacaaggactgcagagaaatccagaatcgcttccttttgatgagatactctactgtaacattggaaatctccattccattggccaacagccagttacctatttcagaactagatcattggataactgcattttgttcatgctttaaactgctttaaactgaaatacgttacagctagaactagatcagctgtacatgcttctgcattgaactacattttgttgaacgtggactgcattttgcaaaaaacatgaactttactatactagagtgaagcgaacatggactacattttgcaaaaaaaatatggacttcactgtactagtgtctaagcgaacatggactgcattttttaaaaaaaacatggacttcactatactagtgtggaagcgaacaattcacagctaatacatttgtatccatgtggtataagcgaatagtgaaaaataagccatgtattaaatcccagccgtaacgagaacacacatggtttatgtgacatgacatggattcactcaatcccgctgtgtattagatcctaatgtgtattaaatactagcaagccgaacaaggccttagggggtgtttgtttgagattataatctatccagattatataatctaacaacttttgaactaagagttagttcaaaaattgttggattatataatctagatgaattataatcccaaacaaacaccccttatagatgtccaataaacacgagacccgcaagcccggcacgaagctcgctgtttgggtccagttcgagtccgg

SEQ ID NO: 1924 - DNA, 3259 bp, Zea Mays
ggaaagtttcttctgcatcttttctggaaaccagcattgagcgattggtcatagcacgtctctctgcgtcttggatcatccagggatcggttaatccagacaggtacttttctggattctatcgaagacttccgatcgaagcacccacagaaaagaaagcgatcgcgacgacgcatctcgcgaaaccccggtgggaaacccagggatcggcgggcgggcttcttgtgcgtgctcatagtcatggtcagatccgatcccttaccgcgatactccatcgggatcagctttgtccgggcaggcttctcggattgttgctgaagcaaggaaggagggaaagctagcgcaagcgactgccccacacacagcaccatcctcgccggtaggggtcgtcggctatcgtgtaccttgtgttggcctccgatccacaagaagctagagctagtatcgagaggccaggggcaggctaggcggcgcgcggaagagcatgtggtcgtcggagatgggtcgaagaagccgccgaacgaacggcatggtggcagagccgcagacgacgcagctgctgctgcacggggtgatcgaggccaccatcctggaggccgacctgtccgtcaccacagacggcaagctgcagccgaccaagaagactctgatgaagaagaaggtcttctcatggatcaggaagctgacattctgcagaaaccagcaacagctggagaacgccatcggtctcggcacggacggcaagctgtacgcgacggtggacatcgacaaggcgcgcgtggggcggacgcgcatggtgccccccgtccactcccccatgtgggacgagtccttccacctctactgcgcgcacgacgccagcaacatcatcttcaccgtcaaggccgacaacgccatcggcgccacgctcatcggccgcgcttacctgcccacggagggcgtcgtcgccggccggaaggtggacctgtggctccccatccgcgacgagaagcgccagccgctggaaggcggtgaccagatacacgtccaggtccagttcaccgacgtcgccgcggacccgaccgccggctggggcgccgggatcggcagcgcggcgtacggcggcgtgccctacaccttcttcaagcagcgccgcggatgccgggtgcggctgtacgaggacgcgcacgtggccggcgacttcgcgccgcgcgtccggctcgcggacggcagcttctacgagccgcgccggtgctgggtggacgtgttcgacgcaatcaaccgggcccggaggatggtgtacatcgccggatggtccgtgaacaccgacgtggtgctggtgcgcgacccgcgggaaccgtcggcgtcgtccgagagtctcggcgagctgctcatccggaaggccgacgagggcgtcgcggtgctgatgctggtgtgggacgaccgcacctcggtggggctcggccccatcaagcgcgacgggctgatggccacgcacgaccaggacacggcgagcttcttccgcgacacgcgcgtgcagtgcgtgctctgcccgcgcaaccccgacaaggaccggagctacgtgcaggacatcgagacggccaccatgttcacacaccaccaaaagacggtgatcgtcgacggcggcggcgcgccggcgccggagacgccgccgggcctcgtgagcttcctcggcggcatcgacctgtgcgacgggaggtacgacacgcaggaccacccgctgttccgcacgctgggcaccacgcacagcaaggacttccaccagcccaacttccccggcgcgtccatcagcaagggcgggccgagggagccgtggcacgacatccactgccgcgtggaggggcccgcggcgtgggacgtgctggagaacttcgagcagaggtggaagaagcagggcaagggggacaacctcctggtggcgctgaacaaggcgtgggcggagcgcgaggcggccccgcggggcgacgccgagtcgtggaacgtgcaggtgttccggtccatcgacggcggcgcggcggcggggttcccggagggctccgcgaacgcgccccgggaggcggcggcgctcgggctggtgagcggcaaggaccacgtgatcgagcgcagcatccaggacgcgtacatccacgccatccggcgggcgcgggacttcatctacatcgagaaccagtacttcctggggagctcctacgcgtggcggcagaacgacggcgtgacggtggaggacatcaacgcgctgcacctcatccccaaggagctgtcgctcaagatcgtgagcaagatcgaggccggcgagcggttcgtcgtgtacgtggtggtgccgctgtggccggagggcgtgccggagagcggctccgtgcaggccatcctggattggcagcgccgcaccatggagatgatgtataaggacgtgacgctggccatccgcgccagggggctccgggccgaccccagggactacctcaccttcttctgcctcggcaaccgcgaggcgccgagccccggcgagtacgtgccgccggagcacccggaccccaacaccgactacgagagggcgcagcaggccaggcgcttcatgatctacgtccacgccaagaccatgatagtggacgatgagtacatcatcgtgggctcggcgaacatcaaccagcgctccatggacggcggccgcgacacggagatcgcgatgggcgcgtaccagccgggctacctggcgaccaggaaccggccggcgaaggggcaggtccacggcttccgggtctccctgtggcaggagcacctgggcgaggcggcggcggcgggaatgggcgacgatctcttccgtccgtcgagcctggcttgcgtgcgccggatgaaccaggtggccaagcagcactgggacatgttcgcgagcgacgcgttccagggcgacctcccgggccacctcatggcgtacccggtcagcgtgctcgacgacgacgacggccgggtcgtggccacgacggaaaccttcccggacaccaacgccaaggtgctcggcaacaagtccgacatcctcccgcccatcctcaccacatgatttaatcatcgtcgattgtattcaccgccacgccgtgggaatgtgtacacaagcgagagaagcatgcatgtttaaaaagctgaaatgtgattcatatgtcaaacaaaaacagaataatttaaaagcttaaatgtgattcatcatcctttccgaataaacacctcacacgattgttggacatgcatgagagcttcatcgata

SEQ ID NO: 1925 - DNA, 1572 bp, Zea Mays
tccaagtcgcccaccgtgacgcccatcgagtcaaccgaacccaagccgtgtggcgactggcgaggcgagtgccccagttcctaactccggtgggcgcgctcccaccgccgcgcggctcaaaacccgccctcagcctcccgcgctccagtccacacgggagcgggtggtgtcgtctgaagcggcgcgatcaaggagtcttcgggcgctccggacgtaacgtgctggcggttgcttatctccggatgtatatataagcggaaatgttctccttgttctatggcctgtggaagtatgtgttcgccaaggacgagttccgtgttctgattcttggtgttgacagagctggcaagacgactttgctggagaagttgaaatcgatatatctcaagggggaaggacttccgcctgaccgtgtcgttccaacagttgggctcaacattggccgcatcgaagacgcaaaggcaaaacttgttttctgggatctaggtggtcaggttagcctacgaacaatctgggagaaatactatgaagaggcccatgccataatgtacgttattgacgctgccacagcatcgtcatttgaagattccaaatctgctctggagaaggttattcgccatgaacatctgagaggagcaccactcttgatagttgcaaacaaacaggatttacctggagccattgatgaggaagaattggctaaatttctgcataaagaactggatgagaggccatatacatttcaggctgtatctgcatatgatgggtgagcgcagaaactcaactggttcctgaggaaatttgactcgccatgaaaaaaaatgacaattttactcaaagatacaaaaaattcacacattcgtctgttatattgtttcctgggtgcatgaaactcaactggttcgtgaggaaatttgactcgccatgaaaaaaatgacaattttactcaaagatacaaaaaattcacacattcgtctgttatattgtttcctgggtgcatgatattctaaagatctgttatattgtttaaatgtgacaccggctcttgcagcagggggatcaaatctggcatagactggctggtggaacaaatggaaaaaagcaaacgtaccgagacactgcaggctcgtgctggcgtagctggacaaatttagaatggggtgaatttgttaaagaacaaagcattggataggacggcttccttcgtatcgcgtaagcagccatttgctgcattccgggattatcgttccaggtcgcccagagtgctgcaagaaatgtttggctggttgctcctgtggtggtggtgattggtgaggcgattcgtttggtattattgaggttgcattcatatgtacctaaaggtcgcaagcatacatgtctatatgatgcttttcaattttcgtagcaaactagtagcttcaatacagaggatcaaagagagccgtgttctttaacttgtttgtgataaaaaaaaaggaagaaaggaaagcgaagaaggaattattggtgcatctgaaagtctttattgcatatgtctaaaccattttaaccgatgctggatgagcttttctt

SEQ ID NO: 1926 - DNA, 1283 bp, Zea Mays
ccaagtcgcccaccgtgacgcccatcgagtcaaccgaacccaagccgtgtggcgactggcgaggcgagtgccccagttcctaactccggtgggcgcgctcccaccgccgcgcggctcaaaacccgccctcagcctcccgcgctccagtccacacgggagcgggtggtgtcgtctgaagcggcgcgatcaaggagtcttcgggcgctccggacgtaacgtgctggcggttgcttatctccggatgtatatataagcggaaatgttctccttgttctatggcctgtggaagtatgtgttcgccaaggacgagttccgtgttctgattcttggtgttgacagagctggcaagacgactttgctggagaagttgaaatcgatatatctcaagggggaaggacttccgcctgaccgtgtcgttccaacagttgggctcaacattggccgcatcgaagacgcaaaggcaaaacttgttttctgggatctaggtggtcaggttagcctacgaacaatctgggagaaatactatgaagaggcccatgccataatgtacgttattgacgctgccacagcatcgtcatttgaagattccaaatctgctctggagaaggttattcgccatgaacatctgagaggagcaccactcttgatagttgcaaacaaacaggatttacctggagccattgatgaggaagaattggctaaatttctgcataaagaactggatgagaggccatatacatttcaggctgtatctgcatatgatggggggatcaaatctggcatagactggctggtggaacaaatggaaaaaagcaaacgtaccgagacactgcaggctcgtgctggcgtagctggacaaatttagaatggggtgaatttgttaaagaacaaagcattggataggacggcttccttcgtatcgcgtaagcagccatttgctgcattccgggattatcgttccaggtcgcccagagtgctgcaagaaatgtttggctggttgctcctgtggtggtggtgattggtgaggcgattcgtttggtattattgaggttgcattcatatgtacctaaaggtcgcaagcatacatgtctatatgatgcttttcaattttcgtagcaaactagtagcttcaatacagaggatcaaagagagccgtgttctttaacttgtttgtgataaaaaaaaaggaagaaaggaaagcgaagaaggaattattggtgcatctgaaagtctttattgcatatgtctaaaccattttaaccgatgctggatgagcttttctt

SEQ ID NO: 1927 - DNA, 1281 bp, Zea Mays
ccaagtcgcccaccgtgacgcccatcgagtcaaccgaacccaagccgtgtggcgactggcgaggcgagtgccccagttcctaactccggtgggcgcgctcccaccgccgcgcggctcaaaacccgccctcagcctcccgcgctccagtccacacgggagcgggtggtgtcgtctgaagcggcgcgatcaaggagtcttcgggcgctccggacgtaacgtgctggcggttgcttatctccggatgtatatataagcggaaatgttctccttgttctatggcctgtggaagtatgtgttcgccaaggacgagttccgtgttctgattcttggtgttgacagagctggcaagacgactttgctggagaagttgaaatcgatatatctcaagggggaaggacttccgcctgaccgtgtcgttccaacagttgggctcaacattggccgcatcgaagacgcaaaggcaaaacttgttttctgggatctaggtggtcaggttagcctacgaacaatctgggagaaatactatgaagaggcccatgccataatgtacgttattgacgctgccacagcatcgtcatttgaagattccaaatctgctctgggttattcgccatgaacatctgagaggagcaccactcttgatagttgcaaacaaacaggatttacctggagccattgatgaggaagaattggctaaatttctgcataaagaactggatgagaggccatatacatttcaggctgtatctgcatatgatggcagggggatcaaatctggcatagactggctggtggaacaaatggaaaaaagcaaacgtaccgagacactgcaggctcgtgctggcgtagctggacaaatttagaatggggtgaatttgttaaagaacaaagcattggataggacggcttccttcgtatcgcgtaagcagccatttgctgcattccgggattatcgttccaggtcgcccagagtgctgcaagaaatgtttggctggttgctcctgtggtggtggtgattggtgaggcgattcgtttggtattattgaggttgcattcatatgtacctaaaggtcgcaagcatacatgtctatatgatgcttttcaattttcgtagcaaactagtagcttcaatacagaggatcaaagagagccgtgttctttaacttgtttgtgataaaaaaaaaggaagaaaggaaagcgaagaaggaattattggtgcatctgaaagtctttattgcatatgtctaaaccattttaaccgatgctggatgagcttttctt

SEQ ID NO: 1928 - DNA, 1628 bp, Zea Mays
gtgttgcgttccctacttgctcttttcttcctccgcttcaacctgtccccagcgccccccgcgcacacactgtctttctctgcctttctttccctagcgccgcgccggcgccgccattcgatcaggccgcttcgccggcgacagcatattccaggtcggttggttttggcacttcggaccggcggccatggcttccgacggcatcggccccagagatgtatgtgttgttggggttgcacgcaccccaatgggcggtttccttggtgccttgtctcccttgcctgctacgaaacttggctctatagtaattcaagctgctctggaaagagcaaacgtggatccagccctcgtgcaggaggtctactttggaaacgtcttgagtgctaatttggggcaagctcctgcaaggcaagctgctctgggtgccgggataccaaactctgttgtttgcaccactgttaacaaagtctgtgcatctggcatgaaagctactatgtttgcagcacagtcaattcaattgggtatcaatgatattgttgtggctggtggcatggaaagcatgtccaatgccccaaagtacattgctgaagctaggaaggggtctcgttttggtcatgacacacttgttgatgccatgcttaaggatgggctttgggatgtatacaatgattgtgccatgggaatgtgtgccgagctttgtgctgacaaccatgccctcacaagagaagaccaggatgcatttgctatccaaagcaacgagcgtggaattgctgctcgtgacagtggtgcttttgcatgggagattattccggttcaagttcctgttggtagaggaaaacccccaacattaattgagagagatgaaagcctggataagtttgacccagtaaaactaaagaaacttcgcccaagtttcaaggagaatggtggtacagttacagctggaaatgcttctagtataagtgatggagctgctgcattagttttagtgagtgggcagaaggctcaagagcttggccttcaagtccttgcaaggatcaaaggttatgctgatgcagctcaagctccggagctttttacaaccactccagcacttgcaataccaaaggctatcgcaaatgctggattagagtcatcccgtgttgatttctatgagattaatgaagctgttgcgcttgcaaatcaaaaacttcttggaattccttcagaaaagattaatgttcatggaggagctgtatccttaggacatcctctcgggtgcagtggtgctcgcattttggttacccttattggtgttctcagggcgaagagtggcaagatcggagttgctggtgtctgcaacggtggaggcggagcatcagctcttgttctggagctcgcataagaaatctagaccttgtagttagcaaaagctccctgaggtgatcttgtagtcttattttccgttgtagtagtcccatagaacatttcttaatttaatttggcaataaagcaaaagctccctgaggagatattgcttctgttggttgcatagtagagtatcatgtaataagagctacagaaatatttttgatatatttgtgaggatactacagaaatattttatatatttgtgatgtgtcttgtac

SEQ ID NO: 1929 - DNA, 1617 bp, Zea Mays
gtgttgcgttccctacttgctcttttcttcctccgcttcaacctgtccccagcgccccccgcgcacacactgtctttctctgcctttctttccctagcgccgcgccggcgccgccattcgatcaggccgcttcgccggcgacagcatattccaggtcggttggttttggcacttcggaccggcggccatggcttccgacggcatcggccccagagatgtatgtgttgttggggttgcacgcaccccaatgggcggtttccttggtgccttgtctcccttgcctgctacgaaacttggctctatagtaattcaagctgctctggaaagagcaaacgtggatccagccctcgtgcaggaggtctactttggaaacgtcttgagtgctaatttggggcaagctcctgcaaggcaagctgctctgggtgccgggataccaaactctgttgtttgcaccactgttaacaaagtctgtgcatctggcatgaaagctactatgtttgcagcacagtcaattcaattgggtatcaatgatattgttgtggctggtggcatggaaagcatgtccaatgccccaaagtacattgctgaagctaggaaggggtctcgttttggtcatgacacacttgttgatgccatgcttaaggatgggctttgggatgtatacaatgattgtgccatgggaatgtgtgccgagctttgtgctgacaaccatgccctcacaagagaagaccaggatgcatttgctatccaaagcaacgagcgtggaattgctgctcgtgacagtggtgcttttgcatgggagattattccggttcaagttcctgttggtagaggaaaacccccaacattaattgagagagatgaaagcctggataagtttgacccagtaaaactaaagaaacttcgcccaagtttcaaggagaatggtggtacagttacagctggaaatgcttctagtataagtgatggagctgctgcattagttttagtgagtgggcagaaggctcaagagcttggccttcaagtccttgcaaggatcaaaggctccggagctttttacaaccactccagcacttgcaataccaaaggctatcgcaaatgctggattagagtcatcccgtgttgatttctatgagattaatgaagccttttcggctgttgcgcttgcaaatcaaaaacttcttggaattccttcagaaaagattaatgttcatggaggagctgtatccttaggacatcctctcgggtgcagtggtgctcgcattttggttacccttattggtgttctcagggcgaagagtggcaagatcggagttgctggtgtctgcaacggtggaggcggagcatcagctcttgttctggagctcgcataagaaatctagaccttgtagttagcaaaagctccctgaggtgatcttgtagtcttattttccgttgtagtagtcccatagaacatttcttaatttaatttggcaataaagcaaaagctccctgaggagatattgcttctgttggttgcatagtagagtatcatgtaataagagctacagaaatatttttgatatatttgtgaggatactacagaaatattttatatatttgtgatgtgtcttgtac

SEQ ID NO: 1930 - DNA, 1538 bp, Zea Mays
gtgttgcgttccctacttgctcttttcttcctccgcttcaacctgtccccagcgccccccgcgcacacactgtctttctctgcctttctttccctagcgccgcgccggcgccgccattcgatcaggccgcttcgccggcgacagcatattccaggtcggttggttttggcacttcggaccggcggccatggcttccgacggcatcggccccagagatgtatgtgttgttggggttgcacgcaccccaatgggcggtttccttggtgccttgtctcccttgcctgctacgaaacttggctctatagtaattcaagctgctctgggtgccgggataccaaactctgttgtttgcaccactgttaacaaagtctgtgcatctggcatgaaagctactatgtttgcagcacagtcaattcaattgggtatcaatgatattgttgtggctggtggcatggaaagcatgtccaatgccccaaagtacattgctgaagctaggaaggggtctcgttttggtcatgacacacttgttgatgccatgcttaaggatgggctttgggatgtatacaatgattgtgccatgggaatgtgtgccgagctttgtgctgacaaccatgccctcacaagagaagaccaggatgcatttgctatccaaagcaacgagcgtggaattgctgctcgtgacagtggtgcttttgcatgggagattattccggttcaagttcctgttggtagaggaaaacccccaacattaattgagagagatgaaagcctggataagtttgacccagtaaaactaaagaaacttcgcccaagtttcaaggagaatggtggtacagttacagctggaaatgcttctagtataagtgatggagctgctgcattagttttagtgagtgggcagaaggctcaagagcttggccttcaagtccttgcaaggatcaaaggttatgctgatgcagctcaagctccggagctttttacaaccactccagcacttgcaataccaaaggctatcgcaaatgctggattagagtcatcccgtgttgatttctatgagattaatgaagccttttcggctgttgcgcttgcaaatcaaaaacttcttggaattccttcagaaaagattaatgttcatggaggagctgtatccttaggacatcctctcgggtgcagtggtgctcgcattttggttacccttattggtgttctcagggcgaagagtggcaagatcggagttgctggtgtctgcaacggtggaggcggagcatcagctcttgttctggagctcgcataagaaatctagaccttgtagttagcaaaagctccctgaggtgatcttgtagtcttattttccgttgtagtagtcccatagaacatttcttaatttaatttggcaataaagcaaaagctccctgaggagatattgcttctgttggttgcatagtagagtatcatgtaataagagctacagaaatatttttgatatatttgtgaggatactacagaaatattttatatatttgtgatgtgtcttgtac

SEQ ID NO: 1931 - DNA, 1482 bp, Zea Mays
gtgttgcgttccctacttgctcttttcttcctccgcttcaacctgtccccagcgccccccgcgcacacactgtctttctctgcctttctttccctagcgccgcgccggcgccgccattcgatcaggccgcttcgccggcgacagcatattccaggtcggttggttttggcacttcggaccggcggccatggcttccgacggcatcggccccagagatgtatgtgttgttggggttgcacgcaccccaatgggcggtttccttggtgccttgtctcccttgcctgctacgaaacttggctctatagtaattcaagctgctctggaaagagcaaacgtggatccagccctcgtgcaggaggtctactttggaaacgtcttgagtgctaatttggggcaagctcctgcaaggcaagctgctctgggtgccgggataccaaactctgttgtttgcaccactgttaacaaagtctgtgcatctggcatgaaagctactatgtttgcagcacagtcaattcaattgggtatcaatgatattgttgtggctggtggcatggaaagcatgtccaatgccccaaagtacattgctgaagctaggaaggggtctcgttttggtcatgacacacttgttgatgccatgcttaaggatgggctttgggatgtatacaatgattgtgccatgggaatgtgtgccgagctttgtgctgacaaccatgccctcacaagagaagaccaggatgcatttgctatccaaagcaacgagcgtggaattgctgctcgtgacagtggtgcttttgcatgggagattattccggttcaagttcctgttggtagaggaaaacccccaacattaattgagagagatgaaagcctggataagtttgacccagtaaaactaaagaaacttcgcccaagtttcaaggagaatggtggtacagttacagctggaaatgcttctagtataagtgatggagctgctgcattagttttagtgagtgggcagaaggctcaagagcttggccttcaagtccttgcaaggatcaaaggttatgctgatgcagctcaagctccggagctttttacaaccactccagcacttgcaataccaaaggctatcgcaaatgctggattagagtcatcccgtgttgatttctatgagattaatgaagccttttcggctgttgcgcttgcaaatcaaaaacttcttggaattccttcagaaaagattaatgttcatggaggagctgtatccttaggacatcctctcgggtgcagtggtgctcgcattttggttacccttattggtgttctcagggcgaagagtggcaagatcggagttgctggtgtctgcaacggtggaggcggagcatcagctcttgttctggagctcgcataagaaatctagaccttgtcacatcaactatcctgccgcccgggatctggaactccgacagcccgatttcaaatagtttgaaagaacatcag

SEQ ID NO: 1932 - DNA, 2248 bp, Zea Mays
atttatcctcctcgcccaacaaaatgcacatatctgtatcctgacaaactttagaactgacagagattaggtaacggacaatcaatcaatcatcacaagcaaagaaattgagtagattgacagctcgatgctgacgaggtgagcggtcttccttcctggcgcgcacgttcaggcgcgcttctcttcggcttcccgtaacggcttttaactaattcctcctcctcctctctctctccccgatccagctagcctgacctcccaccctccctcttgaatccgctcaagttcccgatctcccacctcgtcctccagctcgatcgcgttcgcggcaccccactccgtgctccagaaataagtagccggcggtttcctcgccccaggttttgcggtcgctggggagtgggaattcgttcggctccggtctggccaatgctcctgcggtttcttggagaggccgctgagattgggatccaagctgcgttaggcgagcagcagcagtagccgcatcgagattcgccgtcgttgtccgagggattctccgtttcttgggcggggatttcggttgcggcgggaaaaaaaaaagaattctttcaccggacttggcccaactccgctgtatgttagggtagccttttcgacgcgtttctttcgtcgccccagatccgtctccccgcccgattctttcggagtaatcggcggcggatcggaggcagaggggtttggaggcctgagctccgatggagatgcacgccgacgtcgacgggtgcagcgtgcccctggccgtgctcctcaagcgggagctgtgcaaccagaaggtggagaggccggacatcctgttcggggaggccaacaagagcaagaaaggggaggacttcacgctcctcgtgcccaggtgccaccgcaccccgggcggcagtggcggcggcgagaatgccggcgacgacgacaccatttccgtatttgcgatttttgacggacacaatggctctgcagctgccatatacacccgggagaatctaataagcagtgtgttggctgctattcctccaaatctcacaagtgaggagtggaaagctgcgctgccaagggcactagttgctggttttgtaaaaacagataaagacttccaaggaaaagctgcacgctcagggaccactgtgacttttgttataatagatggatgggttgtcactgtagcatcagttggcgattcacgatgcattctagaatctgctgagggttcaatatattttttatcagcagatcatcgcctggatgctaatgaagaggaggtggagcgtgtaacagcaagtggtggtgaagttgggagaataaatatcgctgggggtgccgggattggtccactcagatgctggccaggtggattgtgtttatcaaggtcaataggtgatatcgacgtcggggaatttatagttcctgtcccacacgtgaagcaagtaaagttgtccaatgctggtgggcggcttgtcattgccagtgatggtgtgtgggatgcactgcactttcaagaggctctgaactacaccaggggcctgccagctgaagctgctgctaatcgaattgtcaaggaagctgtcacttcgaagggattaagagatgatactacttgcatagtagttgatatactacctccagagaagttaagccccccactaaagagacctggaaaaggagtcatcaaagctctgttccggcggaggccctctgatgaaatgtctgaagatcagatggacagaggatgcttagaaactgatgttgtggaggaaatatacgaggagggctctgcaatgcttgctcgaaggttgaatataaattacccagaaggaaatatgttcaagctgcatgattgtgctgtctgccaattggagatgaaacctggtgagggcacctctgttcatggtaacatgcccaaacattcgagagttgacccctggggtggtccttttctctgttcctcctgtcaattgaaaaaggaggccatggaagggaagctacattcaagaaggaatcttggctcccttccgctaatgtgctaccagaagccagatctaacacgacgaaggatgatcccaacttgataaatggacaaacaaattccttttcgatgtaagaagggcagaacgagggtgtaaagcaaagaaagatctgggtaacagcatcctctccaagaacatcatacaaagacatacactcagtcttcttcaagtatgagacaaatagacaattt

SEQ ID NO: 1933 - DNA, 2162 bp, Zea Mays
gacagagattaggtaacggacaatcaatcaatcatcacaagcaaagaaattgagtagattgacagctcgatgctgacgaggtgagcggtcttccttcctggcgcgcacgttcaggcgcgcttctcttcggcttcccgtaacggcttttaactaattcctcctcctcctctctctctccccgatccagctagcctgacctcccaccctccctcttgaatccgctcaagttcccgatctcccacctcgtcctccagctcgatcgcgttcgcggcaccccactccgtgctccagaaataagtagccggcggtttcctcgccccaggttttgcggtcgctggggagtgggaattcgttcggctccggtctggccaatgctcctgcggtttcttggagaggccgctgagattgggatccaagctgcgttaggcgagcagcagcagtagccgcatcgagattcgccgtcgttgtccgagggattctccgtttcttgggcggggatttcggttgcggcgggaaaaaaaaaagaattctttcaccggacttggcccaactccgctgtatgttagggtagccttttcgacgcgtttctttcgtcgccccagatccgtctccccgcccgattctttcggagtaatcggcggcggatcggaggcagaggggtttggaggcctgagctccgatggagatgcacgccgacgtcgacgggtgcagcgtgcccctggccgtgctcctcaagcgggagctgtgcaaccagaaggtggagaggccggacatcctgttcggggaggccaacaagagcaagaaaggggaggacttcacgctcctcgtgcccaggtgccaccgcaccccgggcggcagtggcggcggcgagaatgccggcgacgacgacaccatttccgtatttgcgctgccatatacacccgggagaatctaataagcagtgtgttggctgctattcctccaaatctcacaagtgaggagtggaaagctgcgctgccaagggcactagttgctggttttgtaaaaacagataaagacttccaaggaaaagctgcacgctcagggaccactgtgacttttgttataatagatggatgggttgtcactgtagcatcagttggcgattcacgatgcattctagaatctgctgagggttcaatatattttttatcagcagatcatcgcctggatgctaatgaagaggaggtggagcgtgtaacagcaagtggtggtgaagttgggagaataaatatcgctgggggtgccgggattggtccactcagatgctggccaggtggattgtgtttatcaaggtcaataggtgatatcgacgtcggggaatttatagttcctgtcccacacgtgaagcaagtaaagttgtccaatgctggtgggcggcttgtcattgccagtgatggtgtgtgggatgcactgcactttcaagaggctctgaactacaccaggggcctgccagctgaagctgctgctaatcgaattgtcaaggaagctgtcacttcgaagggattaagagatgatactacttgcatagtagttgatatactacctccagagaagttaagccccccactaaagagacctggaaaaggagtcatcaaagctctgttccggcggaggccctctgatgaaatgtctgaagatcagatggacagaggatgcttagaaactgatgttgtggaggaaatatacgaggagggctctgcaatgcttgctcgaaggttgaatataaattacccagaaggaaatatgttcaagctgcatgattgtgctgtctgccaattggagatgaaacctggtgagggcacctctgttcatggtaacatgcccaaacattcgagagttgacccctggggtggtccttttctctgttcctcctgtcaattgaaaaaggaggccatggaagggaagctacattcaagaaggaatcttggctcccttccgctaatgtgctaccagaagccagatctaacacgacgaaggatgatcccaacttgataaatggacaaacaaattccttttcgatgtaagaagggcagaacgagggtgtaaagcaaagaaagatctgggtaacagcatcctctccaagaacatcatacaaagacatacactcagtcttcttcaagtatgagacaaatagacaattt

SEQ ID NO: 1934 - DNA, 2528 bp, Zea Mays
agagattaggtaacggacaatcaatcaatcatcacaagcaaagaaattgagtagattgacagctcgatgctgacgaggtgagcggtcttccttcctggcgcgcacgttcaggcgcgcttctcttcggcttcccgtaacggcttttaactaattcctcctcctcctctctctctccccgatccagctagcctgacctcccaccctccctcttgaatccgctcaagttcccgatctcccacctcgtcctccagctcgatcgcgttcgcggcaccccactccgtgctccagaaataagtagccggcggtttcctcgccccaggttttgcggtcgctggggagtgggaattcgttcggctccggtctggccaatgctcctgcggtttcttggagaggccgctgagattgggatccaagctgcgttaggcgagcagcagcagtagccgcatcgagattcgccgtcgttgtccgagggattctccgtttcttgggcggggatttcggttgcggcgggaaaaaaaaaagaattctttcaccggacttggcccaactccgctgtatgttagggtagccttttcgacgcgtttctttcgtcgccccagatccgtctccccgcccgattctttcggagtaatcggcggcggatcggaggcagaggggtttggaggcctgagctccgatggagatgcacgccgacgtcgacgggtgcagcgtgcccctggccgtgctcctcaagcgggagctgtgcaaccagaaggtggagaggccggacatcctgttcggggaggccaacaagagcaagaaaggggaggacttcacgctcctcgtgcccaggtgccaccgcaccccgggcggcagtggcggcggcgagaatgccggcgacgacgacaccatttccgtatttgcgatttttgacggacacaatggctctgcagctgccatatacacccgggagaatctaataagcagtgtgttggctgctattcctccaaatctcacaagtgaggagtggaaagctgcgctgccaagggcactagttgctggttttgtaaaaacagataaagacttccaaggaaaagctgcacgctcagggaccactgtgacttttgttataatagatggatgggttgtcactgtagcatcagttggcgattcacgatgcattctagaatctgctgagggttcaatatattttttatcagcagatcatcgcctggatgctaatgaagaggaggtggagcgtgtaacagcaagtggtggtgaagttgggagaataaatatcgctgggggtgccgggattggtccactcagatgctggccaggtggattgtgtttatcaaggtcaataggtgatatcgacgtcggggaatttatagttcctgtcccacacgtgaagcaagtaaagttgtccaatgctggtgggcggcttgtcattgccagtgatggtgtgtgggatgcactgcactttcaagaggctctgaactacaccaggggcctgccagctgaagctgctgctaatcgaattgtcaaggaagctgtcacttcgaagggattaagagatgatactacttgcatagtagttgatatactacctccagagaagttaagccccccactaaagagacctggaaaaggagtcatcaaagctctgttccggcggaggccctctgatgaaatgtctgaagatcagatggacagaggatgcttagaaactgatgttgtggaggaaatatacgaggagggctctgcaatgcttgctcgaaggttgaatataaattacccagaaggaaatatgttcaagctgcatgattgtgctgtctgccaattggagatgaaacctggtgagggcacctctgttcatggtaacatgcccaaacattcgagagttgacccctggggtggtccttttctctgttcctcctgtcaattgaaaaaggaggccatggaagggaagctacattcaagaaattcccaatctgctgttcaacctgtacctaagtaggccttccttgacgggttcaatacattggttcatacacactaactaccactaacaacagcattagcaaataaagtagactcgtcaatgccatcttattcatcaatcaatgtttgacagagtcatgaattttcacctactacattcttatcaaatggcgatcggtacagattttagagatttatggtgtcatttatatgatgcactacagttgttcggtagtagaaggttcaagtctgagccttatcaagtctatattcagagagaccacaactgacctctaggatcaaatgaactggtagccttaagggaatcttggctcccttccgctaatgtgctaccagaagccagatctaacacgacgaaggatgatcccaacttgataaatggacaaacaaattccttttcgatgtaagaagggcagaacgagggtgtaaagcaaagaaagatctgggtaacagcatcctctccaagaacatcatacaaagacatacactcagtcttcttcaagtatgagacaaatagacaattt

SEQ ID NO: 1935 - DNA, 2646 bp, Zea Mays
cgcgcttctcttcggcttcccgtaacggcttttaactaattcctcctcctcctctctctctccccgatccagctagcctgacctcccaccctccctcttgaatccgctcaagttcccgatctcccacctcgtcctccagctcgatcgcgttcgcggcaccccactccgtgctccagaaataagtagccggcggtttcctcgccccaggttttgcggtcgctggggagtgggaattcgttcggctccggtctggccaatgctcctgcggtttcttggagaggccgctgagattgggatccaagctgcgttaggcgagcagcagcagtagccgcatcgagattcgccgtcgttgtccgagggattctccgtttcttgggcggggatttcggttgcggcgggaaaaaaaaaagaattctttcaccggacttggcccaactccgctgtatgttagggtagccttttcgacgcgtttctttcgtcgccccagatccgtctccccgcccgattctttcggagtaatcggcggcggatcggaggcagaggggtttggaggcctgagctccgatggagatgcacgccgacgtcgacgggtgcagcgtgcccctggccgtgctcctcaagcgggagctgtgcaaccagaaggtggagaggccggacatcctgttcggggaggccaacaagagcaagaaaggggaggacttcacgctcctcgtgcccaggtgccaccgcaccccgggcggcagtggcggcggcgagaatgccggcgacgacgacaccatttccgtatttgcgatttttgacggacacaatggctctgcagctgccatatacacccgggagaatctaataagcagtgtgttggctgctattcctccaaatctcacaagtgaggagtggaaagctgcgctgccaagggcactagttgctggttttgtaaaaacagataaagacttccaaggaaaagctgcacgctcagggaccactgtgacttttgttataatagatggatgggttgtcactgtagcatcagttggcgattcacgatgcattctagaatctgctgagggttcaatatattttttatcagcagatcatcgcctggatgctaatgaagaggaggtggagcgtgtaacagcaagtggtggtgaagttgggagaataaatatcgctgggggtgccgggattggtccactcagatgctggccaggtggattgtgtttatcaaggtcaataggtgatatcgacgtcggggaatttatagttcctgtcccacacgtgaagcaagtaaagttgtccaatgctggtgggcggcttgtcattgccagtgatggtgtgtgggatgcactgcactttcaagaggctctgaactacaccaggggcctgccagctgaagctgctgctaatcgaattgtcaaggaagctgtcacttcgaagggattaagagatgatactacttgcatagtagttgatatactacctccagagaagttaagccccccactaaagagacctggaaaaggagtcatcaaagctctgttccggcggaggccctctgatgaaatgtctgaagatcagatggacagaggatgcttagaaactgatgttgtggaggaaatatacgaggagggctctgcaatgcttgctcgaaggttgaatataaattacccagaaggaaatatgttcaagctgcatgattgtgctgtctgccaattggagatgaaacctggtgagggcacctctgttcatggtaacatgcccaaacattcgagagttgacccctggggtggtccttttctctgttcctcctgtcaattgaaaaaggaggccatggaagggaagctacattcaagaaattcccaatctgctgttcaacctgtacctaagtaggccttccttgacgggttcaatacattggttcatacacactaactaccactaacaacagcattagcaaataaagtagactcgtcaatgccatcttattcatcaatcaatgtttgacagagtcatgaattttcacctactacattcttatcaaatggcgatcggtacagattttagagatttatggtgtcatttatatgatgcactacagttgttcggtagtagaaggttcaagtctgagccttatcaagtctatattcagagagaccacaactgacctctaggatcaaatgaactggtagccttaaggtgtgctgctttctgtagttctttcattgattatcaagtctgcacgacttgtctacttgtgaataccagtcgttggttgaaccccatttagtcctaagtcccaacgtagattccttttttttcttcacatgacatactgcttgatgggtggccataaagaccatgttttttccactctcagtcacatgtgatgcttccttattaatcctctcaccacgtggatttccctttctttttcattctttaccatgtgtatagtcacgaggcacatcattacatcacattgactattttttttgtatttgcaccataattctgcagttgtaccattgtactctcaattttctaacattttttttattctttttgttattggaactttcgcttcctatgtacttgaaatggtgttgctgaatttgaatatatttctaagctttatggatgtaatttggt

SEQ ID NO: 1936 - DNA, 2436 bp, Zea Mays
attcctcctcctcctctctctctccccgatccagctagcctgacctcccaccctccctcttgaatccgctcaagttcccgatctcccacctcgtcctccagctcgatcgcgttcgcggcaccccactccgtgctccagaaataagtagccggcggtttcctcgccccaggttttgcggtcgctggggagtgggaattcgttcggctccggtctggccaatgctcctgcggtttcttggagaggccgctgagattgggatccaagctgcgttaggcgagcagcagcagtagccgcatcgagattcgccgtcgttgtccgagggattctccgtttcttgggcggggatttcggttgcggcgggaaaaaaaaaagaattctttcaccggacttggcccaactccgctgtatgttagggtagccttttcgacgcgtttctttcgtcgccccagatccgtctccccgcccgattctttcggagtaatcggcggcggatcggaggcagaggggtttggaggcctgagctccgatggagatgcacgccgacgtcgacgggtgcagcgtgcccctggccgtgctcctcaagcgggagctgtgcaaccagaaggtggagaggccggacatcctgttcggggaggccaacaagagcaagaaaggggaggacttcacgctcctcgtgcccaggtgccaccgcaccccgggcggcagtggcggcggcgagaatgccggcgacgacgacaccatttccgtatttgcgctgcacgctcagggaccactgtgacttttgttataatagatggatgggttgtcactgtagcatcagttggcgattcacgatgcattctagaatctgctgagggttcaatatattttttatcagcagatcatcgcctggatgctaatgaagaggaggtggagcgtgtaacagcaagtggtggtgaagttgggagaataaatatcgctgggggtgccgggattggtccactcagatgctggccaggtggattgtgtttatcaaggtcaataggtgatatcgacgtcggggaatttatagttcctgtcccacacgtgaagcaagtaaagttgtccaatgctggtgggcggcttgtcattgccagtgatggtgtgtgggatgcactgcactttcaagaggctctgaactacaccaggggcctgccagctgaagctgctgctaatcgaattgtcaaggaagctgtcacttcgaagggattaagagatgatactacttgcatagtagttgatatactacctccagagaagttaagccccccactaaagagacctggaaaaggagtcatcaaagctctgttccggcggaggccctctgatgaaatgtctgaagatcagatggacagaggatgcttagaaactgatgttgtggaggaaatatacgaggagggctctgcaatgcttgctcgaaggttgaatataaattacccagaaggaaatatgttcaagctgcatgattgtgctgtctgccaattggagatgaaacctggtgagggcacctctgttcatggtaacatgcccaaacattcgagagttgacccctggggtggtccttttctctgttcctcctgtcaattgaaaaaggaggccatggaagggaagctacattcaagaaattcccaatctgctgttcaacctgtacctaagtaggccttccttgacgggttcaatacattggttcatacacactaactaccactaacaacagcattagcaaataaagtagactcgtcaatgccatcttattcatcaatcaatgtttgacagagtcatgaattttcacctactacattcttatcaaatggcgatcggtacagattttagagatttatggtgtcatttatatgatgcactacagttgttcggtagtagaaggttcaagtctgagccttatcaagtctatattcagagagaccacaactgacctctaggatcaaatgaactggtagccttaaggtgtgctgctttctgtagttctttcattgattatcaagtctgcacgacttgtctacttgtgaataccagtcgttggttgaaccccatttagtcctaagtcccaacgtagattccttttttttcttcacatgacatactgcttgatgggtggccataaagaccatgttttttccactctcagtcacatgtgatgcttccttattaatcctctcaccacgtggatttccctttctttttcattctttaccatgtgtatagtcacgaggcacatcattacatcacattgactattttttttgtatttgcaccataattctgcagttgtaccattgtactctcaattttctaacattttttttattctttttgttattggaactttcgcttcctatgtacttgaaatggtgttgctgaatttgaatatatttctaagctttatggatgtaatttggt

SEQ ID NO: 1937 - DNA, 2066 bp, Zea Mays
tcctcctcctcctctctctctccccgatccagctagcctgacctcccaccctccctcttgaatccgctcaagttcccgatctcccacctcgtcctccagctcgatcgcgttcgcggcaccccactccgtgctccagaaataagtagccggcggtttcctcgccccaggttttgcggtcgctggggagtgggaattcgttcggctccggtctggccaatgctcctgcggtttcttggagaggccgctgagattgggatccaagctgcgttaggcgagcagcagcagtagccgcatcgagattcgccgtcgttgtccgagggattctccgtttcttgggcggggatttcggttgcggcgggaaaaaaaaaagaattctttcaccggacttggcccaactccgctgtatgttagggtagccttttcgacgcgtttctttcgtcgccccagatccgtctccccgcccgattctttcggagtaatcggcggcggatcggaggcagaggggtttggaggcctgagctccgatggagatgcacgccgacgtcgacgggtgcagcgtgcccctggccgtgctcctcaagcgggagctgtgcaaccagaaggtggagaggccggacatcctgttcggggaggccaacaagagcaagaaaggggaggacttcacgctcctcgtgcccaggtgccaccgcaccccgggcggcagtggcggcggcgagaatgccggcgacgacgacaccatttccgtatttgcgatttttgacggacacaatggctctgcagctgccatatacacccgggagaatctaataagcagtgtgttggctgctattcctccaaatctcacaagtgaggagtggaaagctgcgctgccaagggcactagttgctggttttgtaaaaacagataaagacttccaaggaaaagctgcacgctcagggaccactgtgacttttgttataatagatggatgggttgtcactgtagcatcagttggcgattcacgatgcattctagaatctgctgagggttcaatatattttttatcagcagatcatcgcctggatgctaatgaagaggaggtggagcgtgtaacagcaagtggtggtgaagttgggagaataaatatcgctgggggtgccgggattggtccactcagatgctggccaggtggattgtgtttatcaaggtcaataggtgatatcgacgtcggggaatttatagttcctgtcccacacgtgaagcaagtaaagttgtccaatgctggtgggcggcttgtcattgccagtgatggtgtgtgggatgcactgcactttcaagaggctctgaactacaccaggggcctgccagctgaagctgctgctaatcgaattgtcaaggaagctgtcacttcgaagggattaagagatgatactacttgcatagtagttgatatactacctccagagaagttaagccccccactaaagagacctggaaaaggagtcatcaaagctctgttccggcggaggccctctgatgaaatgtctgaagatcagatggacagaggatgcttagaaactgatgttgtggaggaaatatacgaggagggctctgcaatgcttgctcgaaggttgaatataaattacccagaaggaaatatgttcaagctgcatgattgtgctgtctgccaattggagatgaaacctggtgagggcacctctgttcatggtaacatgcccaaacattcgagagttgacccctggggtggtccttttctctgttcctcctgtcaattgaaaaaggaggccatggaagggaagctacattcaagaaattcccaatctgctgttcaacctgtacctaaggaatcttggctcccttccgctaatgtgctaccagaagccagatctaacacgacgaaggatgatcccaacttgataaatggacaaacaaattccttttcgatgtaagaagggcagaacgagggtgtaaagcaaagaaagatctgggtaacagcatcctctccaagaacatcatacaaagacatacactcagtcttcttcaagtatgagacaaatagacaattt

SEQ ID NO: 1938 - DNA, 2659 bp, Zea Mays
ctctctctctccccgatccagctagcctgacctcccaccctccctcttgaatccgctcaagttcccgatctcccacctcgtcctccagctcgatcgcgttcgcggcaccccactccgtgctccagaaataagtagccggcggtttcctcgccccaggttttgcggtcgctggggagtgggaattcgttcggctccggtctggccaatgctcctgcggtttcttggagaggccgctgagattgggatccaagctgcgttaggcgagcagcagcagtagccgcatcgagattcgccgtcgttgtccgagggattctccgtttcttgggcggggatttcggttgcggcgggaaaaaaaaaagaattctttcaccggacttggcccaactccgctgtatgttagggtagccttttcgacgcgtttctttcgtcgccccagatccgtctccccgcccgattctttcggagtaatcggcggcggatcggaggcagaggggtttggaggcctgagctccgatggagatgcacgccgacgtcgacgggtgcagcgtgcccctggccgtgctcctcaagcgggagctgtgcaaccagaaggtggagaggccggacatcctgttcggggaggccaacaagagcaagaaaggggaggacttcacgctcctcgtgcccaggtgccaccgcaccccgggcggcagtggcggcggcgagaatgccggcgacgacgacaccatttccgtatttgcgctgccatatacacccgggagaatctaataagcagtgtgttggctgctattcctccaaatctcacaagtgaggagtggaaagctgcgctgccaagggcactagttgctggttttgtaaaaacagataaagacttccaaggaaaagctgcacgctcagggaccactgtgacttttgttataatagatggatgggttgtcactgtagcatcagttggcgattcacgatgcattctagaatctgctgagggttcaatatattttttatcagcagatcatcgcctggatgctaatgaagaggaggtggagcgtgtaacagcaagtggtggtgaagttgggagaataaatatcgctgggggtgccgggattggtccactcagatgctggccaggtggattgtgtttatcaaggtcaataggtgatatcgacgtcggggaatttatagttcctgtcccacacgtgaagcaagtaaagttgtccaatgctggtgggcggcttgtcattgccagtgatggtgtgtgggatgcactgcactttcaagaggctctgaactacaccaggggcctgccagctgaagctgctgctaatcgaattgtcaaggaagctgtcacttcgaagggattaagagatgatactacttgcatagtagttgatatactacctccagagaagttaagccccccactaaagagacctggaaaaggagtcatcaaagctctgttccggcggaggccctctgatgaaatgtctgaagatcagatggacagaggatgcttagaaactgatgttgtggaggaaatatacgaggagggctctgcaatgcttgctcgaaggttgaatataaattacccagaaggaaatatgttcaagctgcatgattgtgctgtctgccaattggagatgaaacctggtgagggcacctctgttcatggtaacatgcccaaacattcgagagttgacccctggggtggtccttttctctgttcctcctgtcaattgaaaaaggaggccatggaagggaagctacattcaagaagtatggatgtctttacccagatgctataactttttttctttttgcactggacaataaatgtgctgaatctttagttgccctctttttttcagattcccaatctgctgttcaacctgtacctaagtaggccttccttgacgggttcaatacattggttcatacacactaactaccactaacaacagcattagcaaataaagtagactcgtcaatgccatcttattcatcaatcaatgtttgacagagtcatgaattttcacctactacattcttatcaaatggcgatcggtacagattttagagatttatggtgtcatttatatgatgcactacagttgttcggtagtagaaggttcaagtctgagccttatcaagtctatattcagagagaccacaactgacctctaggatcaaatgaactggtagccttaaggtgtgctgctttctgtagttctttcattgattatcaagtctgcacgacttgtctacttgtgaataccagtcgttggttgaaccccatttagtcctaagtcccaacgtagattccttttttttcttcacatgacatactgcttgatgggtggccataaagaccatgttttttccactctcagtcacatgtgatgcttccttattaatcctctcaccacgtggatttccctttctttttcattctttaccatgtgtatagtcacgaggcacatcattacatcacattgactattttttttgtatttgcaccataattctgcagttgtaccattgtactctcaattttctaacattttttttattctttttgttattggaactttcgcttcctatgtacttgaaatggtgttgctgaatttgaatatatttctaagctttatggatgtaatttggt

SEQ ID NO: 1939 - DNA, 5849 bp, Zea Mays
acaaaattgcaagggagtcgtttgaggcagagcttgataggatcttgagggtacaggagcaggagagacaacgggtaatggaagaacaggaaagggccagagaagttgctcggaagcaagaagaggaacaggagaggatgatacgagaagaggaggagaggcaacggctggcggaggagcaggcaaagcaggcagcttggcaagctgagcaagagaggctagaagctgctagaagggctgaagagcagagaatcgcaagggaagaggaaagaaagaggatcgctatggaggaggagcggcgcagggaggcagcacatcagaagctcttagaattggaggcaagaattgctaaaagggaagcaaaaacaaacattgacagcacaagagctgtcaatgatgaatttattcctggagatgtcaaggacagagacctgtcacactctgctaactttggtgacagaaaggatattgacaaaatgaatgagcgcatcaatacctcaacaccattggaatcctctagtattaacaggttcagtgagacagttccaagggtgcgcactcttacagatggacgcccttcatttattgatagagaaactgcacactatagttcaaggcctgcatttccagaacaagagaatgtgcatcataggccacagcatgacccttttgcttcaaagaggggaaatttccccaagaaggatcttaatgatggatttgggagtgtttcggttaggcaatcttcaacaggccgaacaactgattcttcatgggcacttgaagatttccatcatgaaaaggttccacgatgggatgcgcctagggagattgaccgtttcagcaaacaatctgaatttgataatgagttttttaacagcgacaggtttggagatacagcttggctgcctagtagttctcatggaagcctcaatgctcaacaaggagataggatgtttcagagtcctgatgttaatgaattgtcttcttttaccagaccacgctactctatgaggcaaccacgtgttcccccacccccaattgtgacctctgtgcacagaagttcaattggtgcttcagcacaacgtttcaattcatcttttgtggatggtgggaacagagagtgttctggtagagatgatgtgcagattatgcagggtcagtacggaagtgtataccaagaggcatctcgccagcatgggatacgatctgaccacatttctgtcaatgagcaacaaattgtggacagaaaaagccctgtattgggttcacaatcttctctttctgtttcaagccctcctagctcacctccacatgtttcacatgatgagatggacgtatctggtgattctcctgtgttaccgacttctgctgatggtgaacatacggcgctctctgacaaccatcatgcagctctgactgtagatgcagacaatacaagcagaattgctgcctcaggagtgccccacttggaggaggatgaatggtcaagtgtaaacaatgatgataggcgaaaacaggatgaatatgatgaagacaatgatagctaccaggaagatgaaatgaatgaagctgatgatgagaacatagacttggatgatgagttcttagaggggcaggatacacccgtagaactggaaccagttatacttgggtttgatgagggcgtgcaggttgaaattccaccgaatagtcaacttgaattagcttctgtgaggagcacggaaaggacagttggagtacatctaaactcaggagttgcagagcaagagaatgtcagtggttcagttgtccattctgatcctgttactgaagcagagaaagcactgcaggcattgactcttgatggtgtaaatggcctgacagaagacagtaatggggagccatccaatagctcaaggacacctgcttcaagttcccagttacctcaggcatcttctgtgggtcctattttttcgtcagcttcaacagtagttgggcagaatgaagtacctgtcagcctccagtttggtttgtttacaggtcctcctctaataccaactccggttccagccattcaaattggttccatacagatgccaatccatctccacaatcagtttaacccatccctgcctcatatgcacccttcaacaacccctttgtatcaatttggccagttgaggtatgtacgtcctatcgctccgagtgttcgatcgctgccttctcaggccacccgccctgcacattcttccatatcagctcaacatacattgaatcagaatgtgtccagtgttctacctgagctaatggatggaggtacaaaccagaacatcccagctcaggcaagctcatccacctttatcaacaaatcagcagcacctacaaccaaggttccccttggcatggacaattcaaattcccagtatctcaatgctcctgcaaacaatcagatggctggtgtggacggatttagtagtcaagtggacagagagtttgctgagggtacaactccaagtgggaggaatcaaggtctctctttgaagaggaattacaggcctacgtccaacaatgtagaatcttctcaatatggtttggaggggagagccatgggtgatccaaaggctcttggtgttgtctctgatagaagggggaggagatatggatatgctgttaaagacattaacatgagatctactggctcaattgttgagccttctcataaggattccaaaggaggattccagagaagggctcgtaggaatgtaagacgaactgagtttagagttcgggaaaacatcgagaagaatcaaaatgaaacttctgaatcattttgccatggtgaacaagatgagataacaagctccaatggaacaagagatattccagcgagaaatactaatagaagggaacttgatatgagcaaggcatctaggataaatggagcaagtgatcagagtctctcgtttagaagtacacacaatgtcccttatgagagatctcatggtgggaacaagaagtctagaacgggtgctgttcctgatggagatactacctcattgcaagctggagctgtccgtgttgtgaagcagcaaggcattgaggtccctgttgatgcagatggcttcattgaagtaagatccaaaaggcagatcatgagtgtcaggagagagcagagggagaaagaaaacagatccaaaataaggatggcaaaggctccccgcaaacagcatagtatttccctacaaagctcagttggtcctagtgtgaataagcgagcagctccttctagtggagaagttacaaagaaagtttcttctggttccgccatcacagtagaaggaagaattgttgactatgctgaatcttcaattccattgatgggtgatacagcctccatgaacctcatagggccaccctcaaccaatgcagaaactcatacaaactgctttgccaatcagcctatccagatccaggcatcctctgacttggtcacctcgagtcctgcaaagcttgtgagtggcttatctgatggcgacaataaagggccatctattagtactccatttaacatggtttcctgggataattcacaaataaaccaacaggtcatgccattaactcaaactcaacttgaagaagctatgggaccagctaaatttgaacagcaggctgggcctggcttttcgttggagtccaacaatgctttgtctcccacagtaatcacagaaaaggtgttgccttcatctgctagtcctattaactcccttctggctggagagaagattcaatttggggcagtaacgtcaccaaccatgctacccccagtcagccgaactgtttcaagtggtcttggagctccaggttcatctaggcctgatatgaagatcgatcgaggcttgcctagcgataacagtggtcctgataaggcaaattccaaggaattatgtccgagtaccgaggatgcggaagcagaggctgaagcagctgcttctgctgtggctgtggcagctattagcactgatgagggatctccagctgatgcaactactgcatcggctccagacaagagctttacaagcaaggatctcagtgggttaacatcaggaggggcaagaacaggtcaagctggtcaatcatccacagaagagccactcgcagttgctcttcctgcagacttatcggttgatactccatccatgtccttgtggcctcctatagccagtccacaagcatcagggccaatgctttctcagtttcatggtgcacagccatcccacttttcctgctttgatatgaactcgatgttaggagggcacatttttgcatttggcccaagtgacgaatctgctggttctcaaggtcagcaccctcaaagaagcaatgcattgccttcagcaccattgggagcttggccacagtgtcattctggggtagactctttctaccgccctccaactgggtacgctggtcctttcatcactccgggaggaatcccaggcgtgcaagcccccccacatatggtggtctataaccacttcgccccagtaggtcaatttggtcagatgggacttggttttatgggagccacttatatccctggtgacaagcagcctgactggaagcaaagtcaagggccacctattgttggtgtaagccagagtgatccaaacagccaaaatatggtgtctggtcaagtaaacgctcctagtgttcctgctccagttccacatctacgcccaacttctatcatgccaatcccgtctccattgaccatgttcgacattgctcctttccagacatctacagacatacagatgcaaacgtgctggccacatatgcctgtacctcctctacactcagttccattatcagttgcacttaagcagcatccagtagagggtacagccacacaacagtttgttcataacgtgccaatagacaagtctggtacaaataaccgatttcaggagtcctctgcttctgctgggccatcagacggcaacaaaaccttcccaaatgcagccgtttctcagtacagggatgagttaggtcttgtcgaacagccagcctcaaccagctcaagctcccaaactgttcagccttcgtttggccaggcgggcttgatcagcaatgaagtcccaaccagtgccaaagccatggttagggtgaccccatccaaagtcaaccctggaattgcagcaggggcggctggcagcacgaacgccccccaggtcaccagcataccttccaagacccatcagtcctcgtcatcatcatcagacccgcaataccagcatctggttaacaatcaggatcgccgtgcccgtgcgactcagaaggctggtactggtaacgagtggcagcgacgatcagggtaccagggtaggaatcaaggttctggttccgacaggagttcaggcactggtaggatgaagcagatctacgttgcgaagccctctgcaacaagtggccatgcctcgtcaggctagagagtggtggtgctgacttcactgagcctgctccacgctggtacacagctcagagcatccttggcatcagacacatgtgaaacatattttcgctccatgtctgtctattctggtttgttttggtgattgtggcatggtgctggttgtgtatgtttttggttcattttgttgcatagaagaaaatagagtgtgctgttgcactgcaaaaagacattcgaagcgataccatatcatgcatgataaattttgcagccgatggaatcggctgcccgtgtaagtcactggtgtgatgtaaggattactattgtttattgttactatttgttggctggctcaacgtctggacaggcgaggaaatgtaacgtgggggggtatgttaat

SEQ ID NO: 1940 - DNA, 7378 bp, Zea Mays
caccaaccttcccatcccctcccccacacccccgccgccgcctcctcgtcggccggcggcgagggcgcgacgcctcatacccgcctcttccggtcctccggggggcccgccccgcgcgtgagagccccctcgcaacgggcttcgcctacgagctcgtgggttagggtttcatgcgcctcgccggccgccgatgtcgcaccccggaaagtttgtctccgtcaacctcaaccgatcctacggccagtccgctccctcatcacaccatggcggcggcggccgtccctcccgccctgccggcgccggttcctcagccggcggcggtatggtggtgctctctcgtccgcgcggagcctcctcccttgccaagccgcaagcgcccaagctctccgtcccgccgcctctcaatctaccgtcgctccgcaaggagcacgagagatttgacggctcggcggccgctgcggggggcggggtcgcctcggccccgcctcgatccggcgggcctgctgctggctggaccaagcccgcctcggcgtccgagaagcctcccggctccgcagcgcttcctggcggcgtccccaggccaccgtcatatgggtttgcggagaaagccggcgtcttgcgtggggaggacttcccgtccttgaaagcagctgttgccccgccaacacccccgcagcctgcgcagcggcagaaggatgctgatggggtccgggtcgtcacgccagaggcgcgaccaggatctcttgggatgcggccacaggtgacaacctcgcggaccactgagacgctggcctctggtgtcagcttgggacctggtggccgcacttccgctgagagggtgcagaagcctgatctggggccgcttccgatggtccggcttaggtatgattctgactgggctgatgacgagcgtgacacagggctgagccttccagagcgggacagcagggagaggggatttggcaggactgaggccatgcttccagggcgcgacctttatgtatcgatgagggatcccttcaaaaaggagatgtttgggagagatgtggctgcaacaaataaagaaggtgggcaggacaggctgtggcgatctcccgtgtcaaaccaacacgacagggagcgaacagatggtcgaccttacagtggtggcagaggaagcagtgggcaatcataccgagaaaacatagctgccagtggatccaaggatgtgtggagtaatggtaaggagcctcctatgagtgcctatggacagaatggggtggaagctgctagcgagcgttacggcgacagttcaaataattggcctaggttgaattctttccagaataatgttggttccaaagtgcagccctttggtggtaataaagggcctttaaataatgatccagtggcaaaatttggcagggagaagcggctgactggttcccctgcaaagcctttaatagatgatagtggttttgacagcatttctgccgttaacttgactgcaataaagaagaaaaaagaagcagctaaaccagctgattttcatgacccagcaagggagtcgtttgaggcagagcttgataggatcttgagggtacaggagcaggagagacaacgggtaatggaagaacaggaaagggccagagaagttgctcggaagcaagaagaggaacaggagaggatgatacgagaagaggaggagaggcaacggctggcggaggagcaggcaaagcaggcagcttggcaagctgagcaagagaggctagaagctgctagaagggctgaagagcagagaatcgcaagggaagaggaaagaaagaggatcgctatggaggaggagcggcgcagggaggcagcacatcagaagctcttagaattggaggcaagaattgctaaaagggaagcaaaaacaaacattgacagcacaagagctgtcaatgatgaatttattcctggagatgtcaaggacagagacctgtcacactctgctaactttggtgacagaaaggatattgacaaaatgaatgagcgcatcaatacctcaacaccattggaatcctctagtattaacaggttcagtgagacagttccaagggtgcgcactcttacagatggacgcccttcatttattgatagagaaactgcacactatagttcaaggcctgcatttccagaacaagagaatgtgcatcataggccacagcatgacccttttgcttcaaagaggggaaatttccccaagaaggatcttaatgatggatttgggagtgtttcggttaggcaatcttcaacaggccgaacaactgattcttcatgggcacttgaagatttccatcatgaaaaggttccacgatgggatgcgcctagggagattgaccgtttcagcaaacaatctgaatttgataatgagttttttaacagcgacaggtttggagatacagcttggctgcctagtagttctcatggaagcctcaatgctcaacaaggagataggatgtttcagagtcctgatgttaatgaattgtcttcttttaccagaccacgctactctatgaggcaaccacgtgttcccccacccccaattgtgacctctgtgcacagaagttcaattggtgcttcagcacaacgtttcaattcatcttttgtggatggtgggaacagagagtgttctggtagagatgatgtgcagattatgcagggtcagtacggaagtgtataccaagaggcatctcgccagcatgggatacgatctgaccacatttctgtcaatgagcaacaaattgtggacagaaaaagccctgtattgggttcacaatcttctctttctgtttcaagccctcctagctcacctccacatgtttcacatgatgagatggacgtatctggtgattctcctgtgttaccgacttctgctgatggtgaacatacggcgctctctgacaaccatcatgcagctctgactgtagatgcagacaatacaagcagaattgctgcctcaggagtgccccacttggaggaggatgaatggtcaagtgtaaacaatgatgataggcgaaaacaggatgaatatgatgaagacaatgatagctaccaggaagatgaaatgaatgaagctgatgatgagaacatagacttggatgatgagttcttagaggggcaggatacacccgtagaactggaaccagttatacttgggtttgatgagggcgtgcaggttgaaattccaccgaatagtcaacttgaattagcttctgtgaggagcacggaaaggacagttggagtacatctaaactcaggagttgcagagcaagagaatgtcagtggttcagttgtccattctgatcctgttactgaagcagagaaagcactgcaggcattgactcttgatggtgtaaatggcctgacagaagacagtaatggggagccatccaatagctcaaggacacctgcttcaagttcccagttacctcaggcatcttctgtgggtcctattttttcgtcagcttcaacagtagttgggcagaatgaagtacctgtcagcctccagtttggtttgtttacaggtcctcctctaataccaactccggttccagccattcaaattggttccatacagatgccaatccatctccacaatcagtttaacccatccctgcctcatatgcacccttcaacaacccctttgtatcaatttggccagttgaggtatgtacgtcctatcgctccgagtgttcgatcgctgccttctcaggccacccgccctgcacattcttccatatcagctcaacatacattgaatcagaatgtgtccagtgttctacctgagctaatggatggaggtacaaaccagaacatcccagctcaggcaagctcatccacctttatcaacaaatcagcagcacctacaaccaaggttccccttggcatggacaattcaaattcccagtatctcaatgctcctgcaaacaatcagatggctggtgtggacggatttagtagtcaagtggacagagagtttgctgagggtacaactccaagtgggaggaatcaaggtctctctttgaagaggaattacaggcctacgtccaacaatgtagaatcttctcaatatggtttggaggggagagccatgggtgatccaaaggctcttggtgttgtctctgatagaagggggaggagatatggatatgctgttaaagacattaacatgagatctactggctcaattgttgagccttctcataaggattccaaaggaggattccagagaagggctcgtaggaatgtaagacgaactgagtttagagttcgggaaaacatcgagaagaatcaaaatgaaacttctgaatcattttgccatggtgaacaagatgagataacaagctccaatggaacaagagatattccagcgagaaatactaatagaagggaacttgatatgagcaaggcatctaggataaatggagcaagtgatcagagtctctcgtttagaagtacacacaatgtcccttatgagagatctcatggtgggaacaagaagtctagaacgggtgctgttcctgatggagatactacctcattgcaagctggagctgtccgtgttgtgaagcagcaaggcattgaggtccctgttgatgcagatggcttcattgaagtaagatccaaaaggcagatcatgagtgtcaggagagagcagagggagaaagaaaacagatccaaaataaggatggcaaaggctccccgcaaacagcatagtatttccctacaaagctcagttggtcctagtgtgaataagcgagcagctccttctagtggagaagttacaaagaaagtttcttctggttccgccatcacagtagaaggaagaattgttgactatgctgaatcttcaattccattgatgggtgatacagcctccatgaacctcatagggccaccctcaaccaatgcagaaactcatacaaactgctttgccaatcagcctatccagatccaggcatcctctgacttggtcacctcgagtcctgcaaagcttgtgagtggcttatctgatggcgacaataaagggccatctattagtactccatttaacatggtttcctgggataattcacaaataaaccaacaggtcatgccattaactcaaactcaacttgaagaagctatgggaccagctaaatttgaacagcaggctgggcctggcttttcgttggagtccaacaatgctttgtctcccacagtaatcacagaaaaggtgttgccttcatctgctagtcctattaactcccttctggctggagagaagattcaatttggggcagtaacgtcaccaaccatgctacccccagtcagccgaactgtttcaagtggtcttggagctccaggttcatctaggcctgatatgaagatcgatcgaggcttgcctagcgataacagtggtcctgataaggcaaattccaaggaattatgtccgagtaccgaggatgcggaagcagaggctgaagcagctgcttctgctgtggctgtggcagctattagcactgatgagggatctccagctgatgcaactactgcatcggctccagacaagagctttacaagcaaggatctcagtgggttaacatcaggaggggcaagaacaggtcaagctggtcaatcatccacagaagagccactcgcagttgctcttcctgcagacttatcggttgatactccatccatgtccttgtggcctcctatagccagtccacaagcatcagggccaatgctttctcagtttcatggtgcacagccatcccacttttcctgctttgatatgaactcgatgttaggagggcacatttttgcatttggcccaagtgacgaatctgctggttctcaaggtcagcaccctcaaagaagcaatgcattgccttcagcaccattgggagcttggccacagtgtcattctggggtagactctttctaccgccctccaactgggtacgctggtcctttcatcactccgggaggaatcccaggcgtgcaagcccccccacatatggtggtctataaccacttcgccccagtaggtcaatttggtcagatgggacttggttttatgggagccacttatatccctggtgacaagcagcctgactggaagcaaagtcaagggccacctattgttggtgtaagccagagtgatccaaacagccaaaatatggtgtctggtcaagtaaacgctcctagtgttcctgctccagttccacatctacgcccaacttctatcatgccaatcccgtctccattgaccatgttcgacattgctcctttccagacatctacagacatacagatgcaaacgtgctggccacatatgcctgtacctcctctacactcagttccattatcagttgcacttaagcagcatccagtagagggtacagccacacaacagtttgttcataacgtgccaatagacaagtctggtacaaataaccgatttcaggagtcctctgcttctgctgggccatcagacggcaacaaaaccttcccaaatgcagccgtttctcagtacagggatgagttaggtcttgtcgaacagccagcctcaaccagctcaagctcccaaactgttcagccttcgtttggccaggcgggcttgatcagcaatgaagtcccaaccagtgccaaagccatggttagggtgaccccatccaaagtcaaccctggaattgcagcaggggcggctggcagcacgaacgccccccaggtcaccagcataccttccaagacccatcagtcctcgtcatcatcatcagacccgcaataccagcatctggttaacaatcaggatcgccgtgcccgtgcgactcagaaggctggtactggtaacgagtggcagcgacgatcagggtaccagggtaggaatcaaggttctggttccgacaggagttcaggcactggtaggatgaagcagatctacgttgcgaagccctctgcaacaagtggccatgcctcgtcaggctagagagtggtggtgctgacttcactgagcctgctccacgctggtacacagctcagagcatccttggcatcagacacatgtgaaacatattttcgctccatgtctgtctattctggtttgttttggtgattgtggcatggtgctggttgtgtatgtttttggttcattttgttgcatagaagaaaatagagtgtgctgttgcactgcaaaaagacattcgaagcgataccatatcatgcatgataaattttgcagccgatggaatcggctgcccgtgtaagtcactggtgtgatgtaaggattactattgtttattgttactatttgttggctggctcaacgtctggacaggcgaggaaatgtaacgtgggggggtatgttaat

SEQ ID NO: 1941 - DNA, 5349 bp, Zea Mays
gcgagggcgcgacgcctcatacccgcctcttccggtcctccggggggcccgccccgcgcgtgagagccccctcgcaacgggcttcgcctacgagctcgtgggttagggtttcatgcgcctcgccggccgccgatgtcgcaccccggaaagtttgtctccgtcaacctcaaccgatcctacggccagtccgctccctcatcacaccatggcggcggcggccgtccctcccgccctgccggcgccggttcctcagccggcggcggtatggtggtgctctctcgtccgcgcggagcctcctcccttgccaagccgcaagcgcccaagctctccgtcccgccgcctctcaatctaccgtcgctccgcaaggagcacgagagatttgacggctcggcggccgctgcggggggcggggtcgcctcggccccgcctcgatccggcgggcctgctgctggctggaccaagcccgcctcggcgtccgagaagcctcccggctccgcagcgcttcctggcggcgtccccaggccaccgtcatatgggtttgcggagaaagccggcgtcttgcgtggggaggacttcccgtccttgaaagcagctgttgccccgccaacacccccgcagcctgcgcagcggcagaaggatgctgatggggtccgggtcgtcacgccagaggcgcgaccaggatctcttgggatgcggccacaggtgacaacctcgcggaccactgagacgctggcctctggtgtcagcttgggacctggtggccgcacttccgctgagagggtgcagaagcctgatctggggccgcttccgatggtccggcttaggtatgattctgactgggctgatgacgagcgtgacacagggctgagccttccagagcgggacagcagggagaggggatttggcaggactgaggccatgcttccagggcgcgacctttatgtatcgatgagggatcccttcaaaaaggagatgtttgggagagatgtggctgcaacaaataaagaaggtgggcaggacaggctgtggcgatctcccgtgtcaaaccaacacgacagggagcgaacagatggtcgaccttacagtggtggcagaggaagcagtgggcaatcataccgagaaaacatagctgccagtggatccaaggatgtgtggagtaatggtaaggagcctcctatgagtgcctatggacagaatggggtggaagctgctagcgagcgttacggcgacagttcaaataattggcctaggttgaattctttccagaataatgttggttccaaagtgcagccctttggtggtaataaagggcctttaaataatgatccagtggcaaaatttggcagggagaagcggctgactggttcccctgcaaagcctttaatagatgatagtggttttgacagcatttctgccgttaacttgactgcaataaagaagaaaaaagaagcagctaaaccagctgattttcatgacccagcaagggagtcgtttgaggcagagcttgataggatcttgagggtacaggagcaggagagacaacgggtaatggaagaacaggaaagggccagagaagttgctcggaagcaagaagaggaacaggagaggatgatacgagaagaggaggagaggcaacggctggcggaggagcaggcaaagcaggcagcttggcaagctgagcaagagaggctagaagctgctagaagggctgaagagcagagaatcgcaagggaagaggaaagaaagaggatcgctatggaggaggagcggcgcagggaggcagcacatcagaagctcttagaattggaggcaagaattgctaaaagggaagcaaaaacaaacattgacagcacaagagctgtcaatgatgaatttattcctggagatgtcaaggacagagacctgtcacactctgctaactttggtgacagaaaggatattgacaaaatgaatgagcgcatcaatacctcaacaccattggaatcctctagtattaacaggttcagtgagacagttccaagggtgcgcactcttacagatggacgcccttcatttattgatagagaaactgcacactatagttcaaggcctgcatttccagaacaagagaatgtgcatcataggccacagcatgacccttttgcttcaaagaggggaaatttccccaagaaggatcttaatgatggatttgggagtgtttcggttaggcaatcttcaacaggccgaacaactgattcttcatgggcacttgaagatttccatcatgaaaaggttccacgatgggatgcgcctagggagattgaccgtttcagcaaacaatctgaatttgataatgagttttttaacagcgacaggtttggagatacagcttggctgcctagtagttctcatggaagcctcaatgctcaacaaggagataggatgtttcagagtcctgatgttaatgaattgtcttcttttaccagaccacgctactctatgaggcaaccacgtgttcccccacccccaattgtgacctctgtgcacagaagttcaattggtgcttcagcacaacgtttcaattcatcttttgtggatggtgggaacagagagtgttctggtagagatgatgtgcagattatgcagggtcagtacggaagtgtataccaagaggcatctcgccagcatgggatacgatctgaccacatttctgtcaatgagcaacaaattgtggacagaaaaagccctgtattgggttcacaatcttctctttctgtttcaagccctcctagctcacctccacatgtttcacatgatgagatggacgtatctggtgattctcctgtgttaccgacttctgctgatggtgaacatacggcgctctctgacaaccatcatgcagctctgactgtagatgcagacaatacaagcagaattgctgcctcaggagtgccccacttggaggaggatgaatggtcaagtgtaaacaatgatgataggcgaaaacaggatgaatatgatgaagacaatgatagctaccaggaagatgaaatgaatgaagctgatgatgagaacatagacttggatgatgagttcttagaggggcaggatacacccgtagaactggaaccagttatacttgggtttgatgagggcgtgcaggttgaaattccaccgaatagtcaacttgaattagcttctgtgaggagcacggaaaggacagttggagtacatctaaactcaggagttgcagagcaagagaatgtcagtggttcagttgtccattctgatcctgttactgaagcagagaaagcactgcaggcattgactcttgatggtgtaaatggcctgacagaagacagtaatggggagccatccaatagctcaaggacacctgcttcaagttcccagttacctcaggcatcttctgtgggtcctattttttcgtcagcttcaacagtagttgggcagaatgaagtacctgtcagcctccagtttggtttgtttacaggtcctcctctaataccaactccggttccagccattcaaattggttccatacagatgccaatccatctccacaatcagtttaacccatccctgcctcatatgcacccttcaacaacccctttgtatcaatttggccagttgaggtatgtacgtcctatcgctccgagtgttcgatcgctgccttctcaggccacccgccctgcacattcttccatatcagctcaacatacattgaatcagaatgtgtccagtgttctacctgagctaatggatggaggtacaaaccagaacatcccagctcaggcaagctcatccacctttatcaacaaatcagcagcacctacaaccaaggttccccttggcatggacaattcaaattcccagtatctcaatgctcctgcaaacaatcagatggctggtgtggacggatttagtagtcaagtggacagagagtttgctgagggtacaactccaagtgggaggaatcaaggtctctctttgaagaggaattacaggcctacgtccaacaatgtagaatcttctcaatatggtttggaggggagagccatgggtgatccaaaggctcttggtgttgtctctgatagaagggggaggagatatggatatgctgttaaagacattaacatgagatctactggctcaattgttgagccttctcataaggattccaaaggaggattccagagaagggctcgtaggaatgtaagacgaactgagtttagagttcgggaaaacatcgagaagaatcaaaatgaaacttctgaatcattttgccatggtgaacaagatgagataacaagctccaatggaacaagagatattccagcgagaaatactaatagaagggaacttgatatgagcaaggcatctaggataaatggagcaagtgatcagagtctctcgtttagaagtacacacaatgtcccttatgagagatctcatggtgggaacaagaagtctagaacgggtgctgttcctgatggagatactacctcattgcaagctggagctgtccgtgttgtgaagcagcaaggcattgaggtccctgttgatgcagatggcttcattgaagtaagatccaaaaggcagatcatgagtgtcaggagagagcagagggagaaagaaaacagatccaaaataaggatggcaaaggctccccgcaaacagcatagtatttccctacaaagctcagttggtcctagtgtgaataagcgagcagctccttctagtggagaagttacaaagaaagtttcttctggttccgccatcacagtagaaggaagaattgttgactatgctgaatcttcaattccattgatgggtgatacagcctccatgaacctcatagggccaccctcaaccaatgcagaaactcatacaaactgctttgccaatcagcctatccagatccaggcatcctctgacttggtcacctcgagtcctgcaaagcttgtgagtggcttatctgatggcgacaataaagggccatctattagtactccatttaacatggtttcctgggataattcacaaataaaccaacaggtcatgccattaactcaaactcaacttgaagaagctatgggaccagctaaatttgaacagcaggctgggcctggcttttcgttggagtccaacaatgctttgtctcccacagtaatcacagaaaaggtgttgccttcatctgctagtcctattaactcccttctggctggagagaagattcaatttgtaacgtcaccaaccatgctacccccagtcagccgaactgtttcaagtggtcttggagctccaggttcatctaggcctgatatgaagatcgatcgaggcttgcctagc

SEQ ID NO: 1942 - DNA, 2388 bp, Zea Mays
ctccgttctaaatactgggaaatactttctgcgtaaatgaccgccaatagccaatatgttcagatgtctattcccgttcagcttgtagcagcttcctagtcctagggttagatttccaagcaccacgccacccgtacacggtttccagcagagcattccggaaggagggggcgcgatgtggcacgaggcgcggcggtcggagcggaaggtccacgacctcatggacgcggcccgccgccgggcgcagcgccgagccgtctacctcgcccgccgccgcggcgacccgcagcaggcgctccaggtctccggcacgcggtgccgcgttcaccgcgacgacgccctgtaccaggccaccgaggaccagcagggattgatacaatggaatggaaagcaagatgttttgattgacagatttgatggccgtgcattgcttgattttatccgagactcgagctctcgcccttttcgagtccaagggaaatctgaagaagaggaagagttagaggaatttgttaattttgaacgttaccgggatttgattaagcatcgtcgcagaggattttctgatgaggccggtttgcagcatgttgtgcaagagttggaggcaaaagctcttcttccttttagctttgacaaaccacaatcctcacagcctcctgctagcaaaggcgcatattcacaggttggatactcatacaagggagacggaaatgaggaatctgaagacctagacagtgatgacgacgacgaagaggaagaagttgatgatgatgacaaggacttcagtagtgatgatagcagtgatgaacgaatggaaagtatagcgaaagaatttgggataaaaagatataactggcttgtttacatggataaaaaaaacaaagaacaggagaagaggcagaaagaaattgttaaaggcgacccatctataaaaaaaatgagccgtagagaaagaaggaaggcttctcagattgagcgggaaaaggagcgggaggcagcacgttctgttggaagggtatcttatcgtgatccttatagggaacaaaggagaagcccatcatatgaagcatattcaaggggcagaagatcaagatcgagatcaagatctcgttcaccatcccattctaggcgtcatggccgtgggatacatgctgaaagcaattattggagcaagcaaaaggctcctagggttgaatatattactgaatttggaggttccgatgataccagtgaaccaaaagtttcagggatctctccgccttcgtctccaatacgaattgacatacctaaccggtcgggaaactcgacttttaatatttgcaaatatacattgggcgaacttttctctgatggagcttattacctcaatcctggtgttctgaagatgactatgtcaggaataggatagatcaagacatggtcatgatggtatctatggtgtaaaaaatagttgttttgtagataggcatgcattttatggttcgttttatttttgctaagcaggaagaagatttaacacacatatatctacagtcagctgtggagtttatgacctgtgcatctttgccatgtaaattattatggctataataccccatattttgcaggttgtctggtggtcaaattcttgaggcacttcacagtgatcctgcctcttctttgtctgtggaacaggaaagaactgcaaaacttttgaaaccttcccccagtacatcatcagcattagctaaactaagcaaggttgcttctgggggaactggtaaaactccccagactgaaaagaaagaaacaccacaagaaagacttaagaggataatgagcaaacagcttaacaagcaaattaaaaaggacacggctgctgagattgccaagaaacgagaacaggaacgacaaaggcaggaaaaacttgctgaagttggtcgatacaagcgtcgtagccgcagtagaagtcttagccgttccccaccaagaaggcggcgatatagcagaagccgtagtaggagcagaagcccaagaaggtaccgatcccgctcgctctccagttcccggtcgccctctcgctctccaaggtaccgaagcaggtcaagacactgaaaatatccaggcagccactaacaaagtgccttgccatgttgtagttaatttattttatagactttttcattcctgcagcgatgtgtactcatgagaagcctccgtttttgttttcttagtcctattatcgacagtgtgtgttccttgtgtttcagaaggtttattctctgttcctcatggcttgcccctttcaagcaagcgtaattttagggcatgtttggccagaccagcttccaggccgaatttagtagtattgccaagcagttcttttattcagaacaactttgatcgaat

SEQ ID NO: 1943 - DNA, 2127 bp, Zea Mays
aatagccaatatgttcagatgtctattcccgttcagcttgtagcagcttcctagtcctagggttagatttccaagcaccacgccacccgtacacggtttccagcagagcattccggaaggagggggcgcgatgtggcacgaggcgcggcggtcggagcggaaggtccacgacctcatggacgcggcccgccgccgggcgcagcgccgagccgtctacctcgcccgccgccgcggcgacccgcagcaggcgctccaggtctccggcacgcggtgccgcgttcaccgcgacgacgccctgtaccaggccaccgaggaccagcagggattgatacaatggaatggaaagcaagatgttttgattgacagatttgatggccgtgcattgcttgattttatccgagactcgagctctcgcccttttcgagtccaagggaaatctgaagaagaggaagagttagaggaatttgttaattttgaacgttaccgggatttgattaagcatcgtcgcagaggatgtcgtttctgatgaggccggtttgcagcatgttgtgcaagagttggaggcaaaagctcttcttccttttagctttgacaaaccacaatcctcacagcctcctgctagcaaaggcgcatattcacaggttggatactcatacaagggagacggaaatgaggaatctgaagacctagacagtgatgacgacgacgaagaggaagaagttgatgatgatgacaaggacttcagtagtgatgatagcagtgatgaacgaatggaaagtatagcgaaagaatttgggataaaaagatataactggcttgtttacatggataaaaaaaacaaagaacaggagaagaggcagaaagaaattgttaaaggcgacccatctataaaaaaaatgagccgtagagaaagaaggaaggcttctcagattgagcgggaaaaggagcgggaggcagcacgttctgttggaagggtatcttatcgtgatccttatagggaacaaaggagaagcccatcatatgaagcatattcaaggggcagaagatcaagatcgagatcaagatctcgttcaccatcccattctaggcgtcatggccgtgggatacatgctgaaagcaattattggagcaagcaaaaggctcctagggttgaatatattactgaatttggaggttccgatgataccagtgaaccaaaagtttcagggatctctccgccttcgtctccaatacgaattgacatacctaaccggtcgggaaactcgacttttaatatttgcaaatatacattgggcgaacttttctctgatggagcttattacctcaatcctggtgttctgaagatgactatgtcaggaataggatagatcaagacatggtcatgatggtatctatggtgtaaaaaatagttgttttgtagataggcatgcattttatggttcgttttatttttgctaagcaggaagaagatttaacacacatatatctacagtcagctgtggagtttatgacctgtgcatctttgccatgtaaattattatggctataataccccatattttgcaggttgtctggtggtcaaattcttgaggcacttcacagtgatcctgcctcttctttgtctgtggaacaggaaagaactgcaaaacttttgaaaccttcccccaggtttgtcatgatgattacaatgttatgaagagagcggctgtatgtgcatccaagggtgtttgtctagaaccctttactttatttttcatgggctgtctcgacttgagcatgtctctgttacttagagaaccgtcttgtatttttcatcattactgacatgtgatttctgttaacagtacatcatcagcattagctaaactaagcaaggttgcttctgggggaactggtaaaactccccagactgaaaagaaagaaacaccacaagaaagacttaagaggataatgagcaaacagcttaacaagcaaattaaaaaggacacggctgctgagattgccaagaaacgagaacaggaacgacaaaggcaggaaaaacttgctgaagttggtcgatacaagcgtcgtagccgcagtagaagtcttagccgttccccaccaaggaagggactgggccgagccaag

SEQ ID NO: 1944 - DNA, 2084 bp, Zea Mays
aatagccaatatgttcagatgtctattcccgttcagcttgtagcagcttcctagtcctagggttagatttccaagcaccacgccacccgtacacggtttccagcagagcattccggaaggagggggcgcgatgtggcacgaggcgcggcggtcggagcggaaggtccacgacctcatggacgcggcccgccgccgggcgcagcgccgagccgtctacctcgcccgccgccgcggcgacccgcagcaggcgctccaggtctccggcacgcggtgccgcgttcaccgcgacgacgccctgtaccaggccaccgaggaccagcagggattgatacaatggaatggaaagcaagatgttttgattgacagatttgatggccgtgcattgcttgattttatccgagactcgagctctcgcccttttcgagtccaagggaaatctgaagaagaggaagagttagaggaatttgttaattttgaacgttaccgggatttgattaagcatcgtcgcagaggattttctgatgaggccggtttgcagcatgttgtgcaagagttggaggcaaaagctcttcttccttttagctttgacaaaccacaatcctcacagcctcctgctagcaaaggcgcatattcacaggttggatactcatacaagggagacggaaatgaggaatctgaagacctagacagtgatgacgacgacgaagaggaagaagttgatgatgatgacaaggacttcagtagtgatgatagcagtgatgaacgaatggaaagtatagcgaaagaatttgggataaaaagatataactggcttgtttacatggataaaaaaaacaaagaacaggagaagaggcagaaagaaattgttaaaggcgacccatctataaaaaaaatgagccgtagagaaagaaggaaggcttctcagattgagcgggaaaaggagcgggaggcagcacgttctgttggaagggtatcttatcgtgatccttatagggaacaaaggagaagcccatcatatgaagcatattcaaggggcagaagatcaagatcgagatcaagatctcgttcaccatcccattctaggcgtcatggccgtgggatacatgctgaaagcaattattggagcaagcaaaaggctcctagggttgaatatattactgaatttggaggttccgatgataccagtgaaccaaaagtttcagggatctctccgccttcgtctccaatacgaattgacatacctaaccggttgtctggtggtcaaattcttgaggcacttcacagtgatcctgcctcttctttgtctgtggaacaggaaagaactgcaaaacttttgaaaccttcccccaggtttgtcatgatgattacaatgttatgaagagagcggctgtatgtgcatccaaggtacatcatcagcattagctaaactaagcaaggttgcttctgggggaactggtaaaactccccagactgaaaagaaagaaacaccacaagaaagacttaagaggataatgagcaaacagcttaacaagcaaattaaaaaggacacggctgctgagattgccaagaaacgagaacaggaacgacaaaggcaggaaaaacttgctgaagttggtcgatacaagcgtcgtagccgcagtagaagtcttagccgttccccaccaagaaggcggcgatatagcagaagccgtagtaggagcagaagcccaagaaggtaccgatcccgctcgctctccagttcccggtcgccctctcgctctccaaggtaccgaagcaggtcaagacactgaaaatatccaggcagccactaacaaagtgccttgccatgttgtagttaatttattttatagactttttcattcctgcagcgatgtgtactcatgagaagcctccgtttttgttttcttagtcctattatcgacagtgtgtgttccttgtgtttcagaaggtttattctctgttcctcatggcttgcccctttcaagcaagcgtaattttagggcatgtttggccagaccagcttccaggccgaatttagtagtattgccaagcagttcttttattcagaacaactttgatcgaat

SEQ ID NO: 1945 - DNA, 2398 bp, Zea Mays
aatagccaatatgttcagatgtctattcccgttcagcttgtagcagcttcctagtcctagggttagatttccaagcaccacgccacccgtacacggtttccagcagagcattccggaaggagggggcgcgatgtggcacgaggcgcggcggtcggagcggaaggtccacgacctcatggacgcggcccgccgccgggcgcagcgccgagccgtctacctcgcccgccgccgcggcgacccgcagcaggcgctccaggtctccggcacgcggtgccgcgttcaccgcgacgacgccctgtaccaggccaccgaggaccagcagggattgatacaatggaatggaaagcaagatgttttgattgacagatttgatggccgtgcattgcttgattttatccgagactcgagctctcgcccttttcgagtccaagggaaatctgaagaagaggaagagttagaggaatttgttaattttgaacgttaccgggatttgattaagcatcgtcgcagaggattttctgatgaggccggtttgcagcatgttgtgcaagagttggaggcaaaagctcttcttccttttagctttgacaaaccacaatcctcacagcctcctgctagcaaaggcgcatattcacaggttggatactcatacaagggagacggaaatgaggaatctgaagacctagacagtgatgacgacgacgaagaggaagaagttgatgatgatgacaaggacttcagtagtgatgatagcagtgatgaacgaatggaaagtatagcgaaagaatttgggataaaaagatataactggcttgtttacatggataaaaaaaacaaagaacaggagaagaggcagaaagaaattgttaaaggcgacccatctataaaaaaaatgagccgtagagaaagaaggaaggcttctcagattgagcgggaaaaggagcgggaggcagcacgttctgttggaagggtatcttatcgtgatccttatagggaacaaaggagaagcccatcatatgaagcatattcaaggggcagaagatcaagatcgagatcaagatctcgttcaccatcccattctaggcgtcatggccgtgggatacatgctgaaagcaattattggagcaagcaaaaggctcctagggttgaatatattactgaatttggaggttccgatgataccagtgaaccaaaagtttcagggatctctccgccttcgtctccaatacgaattgacatacctaaccggtcgggaaactcgacttttaatatttgcaaatatacattgggcgaacttttctctgatggagcttattacctcaatcctggtgttctgaagatgactatgtcaggaataggatagatcaagacatggtcatgatggtatctatggtgtaaaaaatagttgttttgtagataggcatgcattttatggttcgttttatttttgctaagcaggaagaagatttaacacacatatatctacagtcagctgtggagtttatgacctgtgcatctttgccatgtaaattattatggctataataccccatattttgcaggttgtctggtggtcaaattcttgaggcacttcacagtgatcctgcctcttctttgtctgtggaacaggaaagaactgcaaaacttttgaaaccttcccccaggtttgtcatgatgattacaatgttatgaagagagcggctgtatgtgcatccaaggtacatcatcagcattagctaaactaagcaaggttgcttctgggggaactggtaaaactccccagactgaaaagaaagaaacaccacaagaaagacttaagaggataatgagcaaacagcttaacaagcaaattaaaaaggacacggctgctgagattgccaagaaacgagaacaggaacgacaaaggcaggaaaaacttgctgaagttggtcgatacaagcgtcgtagccgcagtagaagtcttagccgttccccaccaagaaggcggcgatatagcagaagccgtagtaggagcagaagcccaagaaggtaccgatcccgctcgctctccagttcccggtcgccctctcgctctccaaggtaccgaagcaggtcaagacactgaaaatatccaggcagccactaacaaagtgccttgccatgttgtagttaatttattttatagactttttcattcctgcagcgatgtgtactcatgagaagcctccgtttttgttttcttagtcctattatcgacagtgtgtgttccttgtgtttcagaaggtttattctctgttcctcatggcttgcccctttcaagcaagcgtaattttagggcatgtttggccagaccagcttccaggccgaatttagtagtattgccaagcagttcttttattcagaacaactttgatcgaat

SEQ ID NO: 1946 - DNA, 2329 bp, Zea Mays
aatagccaatatgttcagatgtctattcccgttcagcttgtagcagcttcctagtcctagggttagatttccaagcaccacgccacccgtacacggtttccagcagagcattccggaaggagggggcgcgatgtggcacgaggcgcggcggtcggagcggaaggtccacgacctcatggacgcggcccgccgccgggcgcagcgccgagccgtctacctcgcccgccgccgcggcgacccgcagcaggcgctccaggtctccggcacgcggtgccgcgttcaccgcgacgacgccctgtaccaggccaccgaggaccagcagggattgatacaatggaatggaaagcaagatgttttgattgacagatttgatggccgtgcattgcttgattttatccgagactcgagctctcgcccttttcgagtccaagggaaatctgaagaagaggaagagttagaggaatttgttaattttgaacgttaccgggatttgattaagcatcgtcgcagaggatcatgttgtgcaagagttggaggcaaaagctcttcttccttttagctttgacaagttggatactcatacaagggagacggaaatgaggaatctgaagacctagacagtgatgacgacgacgaagaggaagaagttgatgatgatgacaaggacttcagtagtgatgatagcagtgatgaacgaatggaaagtatagcgaaagaatttgggataaaaagatataactggcttgtttacatggataaaaaaaacaaagaacaggagaagaggcagaaagaaattgttaaaggcgacccatctataaaaaaaatgagccgtagagaaagaaggaaggcttctcagattgagcgggaaaaggagcgggaggcagcacgttctgttggaagggtatcttatcgtgatccttatagggaacaaaggagaagcccatcatatgaagcatattcaaggggcagaagatcaagatcgagatcaagatctcgttcaccatcccattctaggcgtcatggccgtgggatacatgctgaaagcaattattggagcaagcaaaaggctcctagggttgaatatattactgaatttggaggttccgatgataccagtgaaccaaaagtttcagggatctctccgccttcgtctccaatacgaattgacatacctaaccggtcgggaaactcgacttttaatatttgcaaatatacattgggcgaacttttctctgatggagcttattacctcaatcctggtgttctgaagatgactatgtcaggaataggatagatcaagacatggtcatgatggtatctatggtgtaaaaaatagttgttttgtagataggcatgcattttatggttcgttttatttttgctaagcaggaagaagatttaacacacatatatctacagtcagctgtggagtttatgacctgtgcatctttgccatgtaaattattatggctataataccccatattttgcaggttgtctggtggtcaaattcttgaggcacttcacagtgatcctgcctcttctttgtctgtggaacaggaaagaactgcaaaacttttgaaaccttcccccaggtttgtcatgatgattacaatgttatgaagagagcggctgtatgtgcatccaaggtacatcatcagcattagctaaactaagcaaggttgcttctgggggaactggtaaaactccccagactgaaaagaaagaaacaccacaagaaagacttaagaggataatgagcaaacagcttaacaagcaaattaaaaaggacacggctgctgagattgccaagaaacgagaacaggaacgacaaaggcaggaaaaacttgctgaagttggtcgatacaagcgtcgtagccgcagtagaagtcttagccgttccccaccaagaaggcggcgatatagcagaagccgtagtaggagcagaagcccaagaaggtaccgatcccgctcgctctccagttcccggtcgccctctcgctctccaaggtaccgaagcaggtcaagacactgaaaatatccaggcagccactaacaaagtgccttgccatgttgtagttaatttattttatagactttttcattcctgcagcgatgtgtactcatgagaagcctccgtttttgttttcttagtcctattatcgacagtgtgtgttccttgtgtttcagaaggtttattctctgttcctcatggcttgcccctttcaagcaagcgtaattttagggcatgtttggccagaccagcttccaggccgaatttagtagtattgccaagcagttcttttattcagaacaactttgatcgaat

SEQ ID NO: 1947 - DNA, 2347 bp, Zea Mays
aatagccaatatgttcagatgtctattcccgttcagcttgtagcagcttcctagtcctagggttagatttccaagcaccacgccacccgtacacggtttccagcagagcattccggaaggagggggcgcgatgtggcacgaggcgcggcggtcggagcggaaggtccacgacctcatggacgcggcccgccgccgggcgcagcgccgagccgtctacctcgcccgccgccgcggcgacccgcagcaggcgctccaggtctccggcacgcggtgccgcgttcaccgcgacgacgccctgtaccaggccaccgaggaccagcagggattgatacaatggaatggaaagcaagatgttttgattgacagatttgatggccgtgcattgcttgattttatccgagactcgagctctcgcccttttcgagtccaagggaaatctgaagaagaggaagagttagaggaatttgttaattttgaacgttaccgggatttgattaagcatcgtcgcagaggatgtcgtttctgatgaggccggtttgcagcatgttgtgcaagagttggaggcaaaagctcttcttccttttagctttgacaaaccacaatcctcacagcctcctgctagcaaaggcgcatattcacaggttggatactcatacaagggagacggaaatgaggaatctgaagacctagacagtgatgacgacgacgaagaggaagaagttgatgatgatgacaaggacttcagtagtgatgatagcagtgatgaacgaatggaaagtatagcgaaagaatttgggataaaaagatataactggcttgtttacatggataaaaaaaacaaagaacaggagaagaggcagaaagaaattgttaaaggcgacccatctataaaaaaaatgagccgtagagaaagaaggaaggcttctcagattgagcgggaaaaggagcgggaggcagcacgttctgttggaagggtatcttatcgtgatccttatagggaacaaaggagaagcccatcatatgaagcatattcaaggggcagaagatcaagatcgagatcaagatctcgttcaccatcccattctaggcgtcatggccgtgggatacatgctgaaagcaattattggagcaagcaaaaggctcctagggttgaatatattactgaatttggaggttccgatgataccagtgaaccaaaagtttcagggatctctccgccttcgtctccaatacgaattgacatacctaaccggtcgggaaactcgacttttaatatttgcaaatatacattgggcgaacttttctctgatggagcttattacctcaatcctggtgttctgaagatgactatgtcaggaataggatagatcaagacatggtcatgatggtatctatggtgtaaaaaatagttgttttgtagataggcatgcattttatggttcgttttatttttgctaagcaggaagaagatttaacacacatatatctacagtcagctgtggagtttatgacctgtgcatctttgccatgtaaattattatggctataataccccatattttgcaggttgtctggtggtcaaattcttgaggcacttcacagtgatcctgcctcttctttgtctgtggaacaggaaagaactgcaaaacttttgaaaccttcccccagtacatcatcagcattagctaaactaagcaaggttgcttctgggggaactggtaaaactccccagactgaaaagaaagaaacaccacaagaaagacttaagaggataatgagcaaacagcttaacaagcaaattaaaaaggacacggctgctgagattgccaagaaacgagaacaggaacgacaaaggcaggaaaaacttgctgaagttggtcgatacaagcgtcgtagccgcagtagaagtcttagccgttccccaccaagaaggcggcgatatagcagaagccgtagtaggagcagaagcccaagaaggtaccgatcccgctcgctctccagttcccggtcgccctctcgctctccaaggtaccgaagcaggtcaagacactgaaaatatccaggcagccactaacaaagtgccttgccatgttgtagttaatttattttatagactttttcattcctgcagcgatgtgtactcatgagaagcctccgtttttgttttcttagtcctattatcgacagtgtgtgttccttgtgtttcagaaggtttattctctgttcctcatggcttgcccctttcaagcaagcgtaattttagggcatgtttggccagaccagcttccaggccgaatttagtagtattgccaagcagttcttttattcagaacaactttgatcgaat

SEQ ID NO: 1948 - DNA, 2320 bp, Zea Mays
aatagccaatatgttcagatgtctattcccgttcagcttgtagcagcttcctagtcctagggttagatttccaagcaccacgccacccgtacacggtttccagcagagcattccggaaggagggggcgcgatgtggcacgaggcgcggcggtcggagcggaaggtccacgacctcatggacgcggcccgccgccgggcgcagcgccgagccgtctacctcgcccgccgccgcggcgacccgcagcaggcgctccaggtctccggcacgcggtgccgcgttcaccgcgacgacgccctgtaccaggccaccgaggaccagcagggattgatacaatggaatggaaagcaagatgttttgattgacagatttgatggccgtgcattgcttgattttatccgagactcgagctctcgcccttttcgagtccaagggaaatctgaagaagaggaagagttagaggaatttgttaattttgaacgttaccgggatttgattaagcatcgtcgcagaggatcatgttgtgcaagagttggaggcaaaagctcttcttccttttagctttgacaaaccacaatcctcacagcctcctgctagcaaaggcgcatattcacaggttggatactcatacaagggagacggaaatgaggaatctgaagacctagacagtgatgacgacgacgaagaggaagaagttgatgatgatgacaaggacttcagtagtgatgatagcagtgatgaacgaatggaaagtatagcgaaagaatttgggataaaaagatataactggcttgtttacatggataaaaaaaacaaagaacaggagaagaggcagaaagaaattgttaaaggcgacccatctataaaaaaaatgagccgtagagaaagaaggaaggcttctcagattgagcgggaaaaggagcgggaggcagcacgttctgttggaagggtatcttatcgtgatccttatagggaacaaaggagaagcccatcatatgaagcatattcaaggggcagaagatcaagatcgagatcaagatctcgttcaccatcccattctaggcgtcatggccgtgggatacatgctgaaagcaattattggagcaagcaaaaggctcctagggttgaatatattactgaatttggaggttccgatgataccagtgaaccaaaagtttcagggatctctccgccttcgtctccaatacgaattgacatacctaaccggtcgggaaactcgacttttaatatttgcaaatatacattgggcgaacttttctctgatggagcttattacctcaatcctggtgttctgaagatgactatgtcaggaataggatagatcaagacatggtcatgatggtatctatggtgtaaaaaatagttgttttgtagataggcatgcattttatggttcgttttatttttgctaagcaggaagaagatttaacacacatatatctacagtcagctgtggagtttatgacctgtgcatctttgccatgtaaattattatggctataataccccatattttgcaggttgtctggtggtcaaattcttgaggcacttcacagtgatcctgcctcttctttgtctgtggaacaggaaagaactgcaaaacttttgaaaccttcccccagtacatcatcagcattagctaaactaagcaaggttgcttctgggggaactggtaaaactccccagactgaaaagaaagaaacaccacaagaaagacttaagaggataatgagcaaacagcttaacaagcaaattaaaaaggacacggctgctgagattgccaagaaacgagaacaggaacgacaaaggcaggaaaaacttgctgaagttggtcgatacaagcgtcgtagccgcagtagaagtcttagccgttccccaccaagaaggcggcgatatagcagaagccgtagtaggagcagaagcccaagaaggtaccgatcccgctcgctctccagttcccggtcgccctctcgctctccaaggtaccgaagcaggtcaagacactgaaaatatccaggcagccactaacaaagtgccttgccatgttgtagttaatttattttatagactttttcattcctgcagcgatgtgtactcatgagaagcctccgtttttgttttcttagtcctattatcgacagtgtgtgttccttgtgtttcagaaggtttattctctgttcctcatggcttgcccctttcaagcaagcgtaattttagggcatgtttggccagaccagcttccaggccgaatttagtagtattgccaagcagttcttttattcagaacaactttgatcgaat

SEQ ID NO: 1949 - DNA, 1715 bp, Zea Mays
tgcgtgcccaatcctctctcaccatctctcctatcggatacaatggaatggaaagcaagatgttttgattgacagatttgatggccgtgcattgcttgattttatccgagactcgagctctcgcccttttcgagtccaagggaaatctgaagaagaggaagagttagaggaatttgttaattttgaacgttaccgggatttgattaagcatcgtcgcagaggatcatgttgtgcaagagttggaggcaaaagctcttcttccttttagctttgacaaaccacaatcctcacagcctcctgctagcaaaggcgcatattcacaggttggatactcatacaagggagacggaaatgaggaatctgaagacctagacagtgatgacgacgacgaagaggaagaagttgatgatgatgacaaggacttcagtagtgatgatagcagtgatgaacgaatggaaagtatagcgaaagaatttgggataaaaagatataactggcttgtttacatggataaaaaaaacaaagaacaggagaagaggcagaaagaaattgttaaaggcgacccatctataaaaaaaatgagccgtagagaaagaaggaaggcttctcagattgagcgggaaaaggagcgggaggcagcacgttctgttggaagggtatcttatcgtgatccttatagggaacaaaggagaagcccatcatatgaagcatattcaaggggcagaagatcaagatcgagatcaagatctcgttcaccatcccattctaggcgtcatggccgtgggatacatgctgaaagcaattattggagcaagcaaaaggctcctagggttgaatatattactgaatttggaggttccgatgataccagtgaaccaaaagtttcagggatctctccgccttcgtctccaatacgaattgacatacctaaccggttgtctggtggtcaaattcttgaggcacttcacagtgatcctgcctcttctttgtctgtggaacaggaaagaactgcaaaacttttgaaaccttcccccagtacatcatcagcattagctaaactaagcaaggttgcttctgggggaactggtaaaactccccagactgaaaagaaagaaacaccacaagaaagacttaagaggataatgagcaaacagcttaacaagcaaattaaaaaggacacggctgctgagattgccaagaaacgagaacaggaacgacaaaggcaggaaaaacttgctgaagttggtcgatacaagcgtcgtagccgcagtagaagtcttagccgttccccaccaagaaggcggcgatatagcagaagccgtagtaggagcagaagcccaagaaggtaccgatcccgctcgctctccagttcccggtcgccctctcgctctccaaggtaccgaagcaggtcaagacactgaaaatatccaggcagccactaacaaagtgccttgccatgttgtagttaatttattttatagactttttcattcctgcagcgatgtgtactcatgagaagcctccgtttttgttttcttagtcctattatcgacagtgtgtgttccttgtgtttcagaaggtttattctctgttcctcatggcttgcccctttcaagcaagcgtaattttagggcatgtttggccagaccagcttccaggccgaatttagtagtattgccaagcagttcttttattcagaacaactttgatcgaat

SEQ ID NO: 1950 - DNA, 1920 bp, Zea Mays
aatcctctctcaccatctctcctatcggatacaatggaatggaaagcaagatgttttgattgacagatttgatggccgtgcattgcttgattttatccgagactcgagctctcgcccttttcgagtccaagggaaatctgaagaagaggaagagttagaggaatttgttaattttgaacgttaccgggatttgattaagcatcgtcgcagaggatgtcggtacctttttggtttctctgttctattgctgttgctgtagaaatttcatatcttgcatccatttacatcacttgagggattgtcctaatgcacactttatttgtttctaaattggtacagaaaaagggtgctatttcttaattcaaagcactagttaactgaacatttacctagcttcttttcacagtttctgatgaggccggtttgcagcatgttgtgcaagagttggaggcaaaagctcttcttccttttagctttgacaaaccacaatcctcacagcctcctgctagcaaaggcgcatattcacaggttggatactcatacaagggagacggaaatgaggaatctgaagacctagacagtgatgacgacgacgaagaggaagaagttgatgatgatgacaaggacttcagtagtgatgatagcagtgatgaacgaatggaaagtatagcgaaagaatttgggataaaaagatataactggcttgtttacatggataaaaaaaacaaagaacaggagaagaggcagaaagaaattgttaaaggcgacccatctataaaaaaaatgagccgtagagaaagaaggaaggcttctcagattgagcgggaaaaggagcgggaggcagcacgttctgttggaagggtatcttatcgtgatccttatagggaacaaaggagaagcccatcatatgaagcatattcaaggggcagaagatcaagatcgagatcaagatctcgttcaccatcccattctaggcgtcatggccgtgggatacatgctgaaagcaattattggagcaagcaaaaggctcctagggttgaatatattactgaatttggaggttccgatgataccagtgaaccaaaagtttcagggatctctccgccttcgtctccaatacgaattgacatacctaaccggttgtctggtggtcaaattcttgaggcacttcacagtgatcctgcctcttctttgtctgtggaacaggaaagaactgcaaaacttttgaaaccttcccccagtacatcatcagcattagctaaactaagcaaggttgcttctgggggaactggtaaaactccccagactgaaaagaaagaaacaccacaagaaagacttaagaggataatgagcaaacagcttaacaagcaaattaaaaaggacacggctgctgagattgccaagaaacgagaacaggaacgacaaaggcaggaaaaacttgctgaagttggtcgatacaagcgtcgtagccgcagtagaagtcttagccgttccccaccaagaaggcggcgatatagcagaagccgtagtaggagcagaagcccaagaaggtaccgatcccgctcgctctccagttcccggtcgccctctcgctctccaaggtaccgaagcaggtcaagacactgaaaatatccaggcagccactaacaaagtgccttgccatgttgtagttaatttattttatagactttttcattcctgcagcgatgtgtactcatgagaagcctccgtttttgttttcttagtcctattatcgacagtgtgtgttccttgtgtttcagaaggtttattctctgttcctcatggcttgcccctttcaagcaagcgtaattttagggcatgtttggccagaccagcttccaggccgaatttagtagtattgccaagcagttcttttattcagaacaactttgatcgaat

SEQ ID NO: 1951 - DNA, 2210 bp, Zea Mays
atcctctctcaccatctctcctatcggatacaatggaatggaaagcaagatgttttgattgacagatttgatggccgtgcattgcttgattttatccgagactcgagctctcgcccttttcgagtccaagggaaatctgaagaagaggaagagttagaggaatttgttaattttgaacgttaccgggatttgattaagcatcgtcgcagaggatgtcggtacctttttggtttctctgttctattgctgttgctgtagaaatttcatatcttgcatccatttacatcacttgagggattgtcctaatgcacactttatttgtttctaaattggtacagaaaaagggtgctatttcttaattcaaagcactagttaactgaacatttacctagcttcttttcacagtttctgatgaggccggtttgcagcatgttgtgcaagagttggaggcaaaagctcttcttccttttagctttgacaaaccacaatcctcacagcctcctgctagcaaaggcgcatattcacaggttggatactcatacaagggagacggaaatgaggaatctgaagacctagacagtgatgacgacgacgaagaggaagaagttgatgatgatgacaaggacttcagtagtgatgatagcagtgatgaacgaatggaaagtatagcgaaagaatttgggataaaaagatataactggcttgtttacatggataaaaaaaacaaagaacaggagaagaggcagaaagaaattgttaaaggcgacccatctataaaaaaaatgagccgtagagaaagaaggaaggcttctcagattgagcgggaaaaggagcgggaggcagcacgttctgttggaaggggaacaaaggagaagcccatcatatgaagcatattcaaggggcagaagatcaagatcgagatcaagatctcgttcaccatcccattctaggcgtcatggccgtgggatacatgctgaaagcaattattggagcaagcaaaaggctcctagggttgaatatattactgaatttggaggttccgatgataccagtgaaccaaaagtttcagggatctctccgccttcgtctccaatacgaattgacatacctaaccggtcgggaaactcgacttttaatatttgcaaatatacattgggcgaacttttctctgatggagcttattacctcaatcctggtgttctgaagatgactatgtcaggaataggatagatcaagacatggtcatgatggtatctatggtgtaaaaaatagttgttttgtagataggcatgcattttatggttcgttttatttttgctaagcaggaagaagatttaacacacatatatctacagtcagctgtggagtttatgacctgtgcatctttgccatgtaaattattatggctataataccccatattttgcaggttgtctggtggtcaaattcttgaggcacttcacagtgatcctgcctcttctttgtctgtggaacaggaaagaactgcaaaacttttgaaaccttcccccagtacatcatcagcattagctaaactaagcaaggttgcttctgggggaactggtaaaactccccagactgaaaagaaagaaacaccacaagaaagacttaagaggataatgagcaaacagcttaacaagcaaattaaaaaggacacggctgctgagattgccaagaaacgagaacaggaacgacaaaggcaggaaaaacttgctgaagttggtcgatacaagcgtcgtagccgcagtagaagtcttagccgttccccaccaagaaggcggcgatatagcagaagccgtagtaggagcagaagcccaagaaggtaccgatcccgctcgctctccagttcccggtcgccctctcgctctccaaggtaccgaagcaggtcaagacactgaaaatatccaggcagccactaacaaagtgccttgccatgttgtagttaatttattttatagactttttcattcctgcagcgatgtgtactcatgagaagcctccgtttttgttttcttagtcctattatcgacagtgtgtgttccttgtgtttcagaaggtttattctctgttcctcatggcttgcccctttcaagcaagcgtaattttagggcatgtttggccagaccagcttccaggccgaatttagtagtattgccaagcagttcttttattcagaacaactttgatcgaat

SEQ ID NO: 1952 - DNA, 2475 bp, Zea Mays
ctctgcactacccgaaacccacgcccaacggccgtttcccgcaccccctatccgggaaggaagaaagccagaactcacccctgcttcgtctggcggcgccgtttcccgcacgcgatgccgtcgacggcggaggatttcccggcgataaggaagctggggaagctcttccggcttaccgaagtgtacctctgggacgattcgtatggcgctggacctcacgatggacagaagaacgggcgctcggcggaggctgctctcgtggactctcatacagataaaacatgcaatgaagcatccaatagcactgacaaaggccatttctttgttgaagatttggaattggtcaatctcatgggttctttggggcttcctgtttcattcagcacaagtaaagtgaacaagaacacatgcaacaagggaaagaaaaaaggaagacaagcaccgctcaaagcagcaaacactcaaatcaatgatgctgtgaggatatgtatcaatactgaagatagagaaaattctgttgaatcattggatgctatggagcaaacgcactcatgcaatttatttgtgacaccactgggtcaaaatgaaccctcccgtgatgacactgacaagaggcttagggaagacagctcttgtgttgaagaacaagaagagtctggctgtagcaccatctactctgctggcaaagcccctggctgtgatgctaaaaatcatctcactgaacttggggcttttgagctttctgataacttggccaactcagcaaaagaagaatactcaattcaagaaaatcaagcttatgaaagtgtgttgctagattctgaagagatgtcaaggaatgactgtgttgatgatgaatctacacattcctgtgttggcatttatcaggatgaaagagtgtccacaaggggagatcaaacatctgaagaaactctatcagtaccccatgattacaatgatgttggcagagaagctagtctaagtttggcagagccatcatctattgatgagcatgcacaaagctctgccaacaacttttactatgactatggtgaatggagggttatctgggatccattctataatcggtattatttttacaacatccagacacaagagtccacatggtgtcctcctgaaggactggaggattttgcatcatattgtagcccagataccactaaagagctagctgaactgggatctcagtgttcaagcatggcaccacaagagaacaatctggctactcatgtcaatcatttagaagcacaggagcaagatcactgcattcatgatttatctgacattcctgttgaaaagccaatatatcaaagtatgataactacctctgacaaagcacagcacactgaaaataagtacagcgattcaacaactactgtgttagagatgaaccaggaagttgctagcaccaaaacgaaaaagagagtaaggagatctcgatcgtatcattcatgccaagacatggcagggaacgtctctaatgacatcatcaagtactgggctcagcggagttggtggaaatgccatccaatttgccaaaaagtgcaagcatgtaattgcagttgatattgatccacaaaagattgattgcgcgcatcataatgcatccatttatggagtaaatgatcacatagatttcattgtaggtgattttatacatatagctcctcatctgaagggagaaactgctttcatgtcgcctccttggggtggccctgactatgccaaagttgatgtttatgatatgaaaagcatgcttattccttgtgatgggtactctctttttaaactcggaaccatgatagcttcaagagtagtgatgtttcttcctcgcaacattgacctaaaccaattggcggacatgtccttgtctgtggatcccccgtgggcagttgaggtcgagaagaacttcctcaacggaaagctgaaagccataacagcttactttgaagaacaggatcgttgaaccaagcatcggcgctgaaagaagcggtttatcatcttcaccgagcatagataatttatttgcagagatgagtcattggtatcatacaaaagcagctcagcttatctcaattcacagcaagtgaaactgtcgaaggaaaactacaaggctgacagtcgaacgcgtgggagttagcttaattttgccttatgataagcaagcatgcttcctggtttatttcatacagctactagtagtttcagctgcaacagttgtgcgttggtgtgcgtgtgattctcacatatctggtcctgcggatgtgagtgatgcaaatgtatgtgtcatcatcccatgtaagggtttgtttgtttgctctcaatctatgtagattgagtgggattaagtgagtttaaatctcagacaagtcaaaaaaaaatgttttcaatctcatccaatccacatatgatagtaatacccgagtaaggcttagatgtaatagttggaataag

SEQ ID NO: 1953 - DNA, 2640 bp, Zea Mays
cacgcccaacggccgtttcccgcaccccctatccgggaaggaagaaagccagaactcacccctgcttcgtctggcggcgccgtttcccgcacgcgatgccgtcgacggcggaggatttcccggcgataaggaagctggggaagctcttccggcttaccgaagtgtacctctgggacgattcgtatggcgctggacctcacgatggacagaagaacgggcgctcggcggaggctgctctcgtggactctcatacagataaaacatgcaatgaagcatccaatagcactgacaaaggccatttctttgttgaagatttggaattggtcaatctcatgggttctttggggcttcctgtttcattcagcacaagtaaagtgaacaagaacacatgcaacaagggaaagaaaaaaggaagacaagcaccgctcaaagcagcaaacactcaaatcaatgatgctgtgaggatatgtatcaatactgaagatagagaaaattctgttgaatcattggatgctatggagcaaacgcactcatgcaatttatttgtgacaccactgggtcaaaatgaaccctcccgtgatgacactgacaagaggcttagggaagacagctcttgtgttgaagaacaagaagagtctggctgtagcaccatctactctgctggcaaagcccctggctgtgatgctaaaaatcatctcactgaacttggggcttttgagctttctgataacttggccaactcagcaaaagaagaatactcaattcaagaaaatcaagcttatgaaagtgtgttgctagattctgaagagatgtcaaggaatgactgtgttgatgatgaatctacacattcctgtgttggcatttatcaggatgaaagagtgtccacaaggggagatcaaacatctgaagaaactctatcagtaccccatgattacaatgatgttggcagagaagctagtctaagtttggcagagccatcatctattgatgagcatgcacaaagctctgccaacaacttttactatgactatggtgaatggagggttatctgggatccattctataatcggtattatttttacaacatccagacacaagagtccacatggtgtcctcctgaaggactggaggattttgcatcatattgtagcccagataccactaaagagctagctgaactgggatctcagtgttcaagcatggcaccacaagagaacaatctggctactcatgtcaatcatttagaagcacaggagcaagatcactgcattcatgatttatctgacattcctgttgaaaagccaatatatcaaagtatgataactacctctgacaaagcacagcacactgaaaataagtacagcgattcaacaactactgtgttagagatgaaccaggaagttgctagcaccaaaacgaaaaagagagtaaggagatctcgatcgtatcattcatgccaagacatggcagggaacgtctctaatgacatcatcaagtactgggctcagcggtattcacttttctcactttttgatagtggtataaagatggatgaagtagggtggttttcagttacgccagagccaattgcaaagcatcatgcatctcgtgtgggtgcgggagtaatgattgattgtttcacaggagttggtggaaatgccatccaatttgccaaaaagtgcaagcatgtaattgcagttgatattgatccacaaaagattgattgcgcgcatcataatgcatccatttatggagtaaatgatcacatagatttcattgtaggtgattttatacatatagctcctcatctgaagggagaaactgctttcatgtcgcctccttggggtggccctgactatgccaaagttgatgtttatgatatgaaaagcatgcttattccttgtgatggcttcaagagtagtgatgtttcttcctcgcaacattgacctaaaccaattggcggacatgtccttgtctgtggatcccccgtgggcagttgaggtcgagaagaacttcctcaacggaaagctgaaagccataacagcttactttgaagaacaggatcgttgaaccaagcatcggcgctggtgatacaaatcatcttgttagctatgactcacgacaaatttttgtggtgaccctaaacagaacctttgtgttcggagacagaaagaagcggtttatcatcttcaccgagcatagataatttatttgcagagatgagtcattggtatcatacaaaagcagctcagcttatctcaattcacagcaagtgaaactgtcgaaggaaaactacaaggctgacagtcgaacgcgtgggagttagcttaattttgccttatgataagcaagcatgcttcctggtttatttcatacagctactagtagtttcagctgcaacagttgtgcgttggtgtgcgtgtgattctcacatatctggtcctgcggatgtgagtgatgcaaatgtatgtgtcatcatcccatgtaagggtttgtttgtttgctctcaatctatgtagattgagtgggattaagtgagtttaaatctcagacaagtcaaaaaaaaatgttttcaatctcatccaatccacatatgatagtaatacccgagtaaggcttagatgtaatagttggaataag

SEQ ID NO: 1954 - DNA, 2640 bp, Zea Mays
cacgcccaacggccgtttcccgcaccccctatccgggaaggaagaaagccagaactcacccctgcttcgtctggcggcgccgtttcccgcacgcgatgccgtcgacggcggaggatttcccggcgataaggaagctggggaagctcttccggcttaccgaagtgtacctctgggacgattcgtatggcgctggacctcacgatggacagaagaacgggcgctcggcggaggctgctctcgtgataaaacatgcaatgaagcatccaatagcactgacaaaggccatttctttgttgaagatttggaattggtcaatctcatgggttctttggggcttcctgtttcattcagcacaagtaaagtgaacaagaacacatgcaacaagggaaagaaaaaaggaagacaagcaccgctcaaagcagcaaacactcaaatcaatgatgctgtgaggatatgtatcaatactgaagatagagaaaattctgttgaatcattggatgctatggagcaaacgcactcatgcaatttatttgtgacaccactgggtcaaaatgaaccctcccgtgatgacactgacaagaggcttagggaagacagctcttgtgttgaagaacaagaagagtctggctgtagcaccatctactctgctggcaaagcccctggctgtgatgctaaaaatcatctcactgaacttggggcttttgagctttctgataacttggccaactcagcaaaagaagaatactcaattcaagaaaatcaagcttatgaaagtgtgttgctagattctgaagagatgtcaaggaatgactgtgttgatgatgaatctacacattcctgtgttggcatttatcaggatgaaagagtgtccacaaggggagatcaaacatctgaagaaactctatcagtaccccatgattacaatgatgttggcagagaagctagtctaagtttggcagagccatcatctattgatgagcatgcacaaagctctgccaacaacttttactatgactatggtgaatggagggttatctgggatccattctataatcggtattatttttacaacatccagacacaagagtccacatggtgtcctcctgaaggactggaggattttgcatcatattgtagcccagataccactaaagagctagctgaactgggatctcagtgttcaagcatggcaccacaagagaacaatctggctactcatgtcaatcatttagaagcacaggagcaagatcactgcattcatgatttatctgacattcctgttgaaaagccaatatatcaaagtatgataactacctctgacaaagcacagcacactgaaaataagtacagcgattcaacaactactgtgttagagatgaaccaggaagttgctagcaccaaaacgaaaaagagaatcattcatgccaagacatggcagggaacgtctctaatgacatcatcaagtactgggctcagcggtattcacttttctcactttttgatagtggtataaagatggatgaagtagggtggttttcagttacgccagagccaattgcaaagcatcatgcatctcgtgtgggtgcgggagtaatgattgattgtttcacaggagttggtggaaatgccatccaatttgccaaaaagtgcaagcatgtaattgcagttgatattgatccacaaaagattgattgcgcgcatcataatgcatccatttatggagtaaatgatcacatagatttcattgtaggtgattttatacatatagctcctcatctgaagggagaaactgctttcatgtcgcctccttggggtggccctgactatgccaaagttgatgtttatgatatgaaaagcatgcttattccttgtgatgggtactctctttttaaactcggaaccatgatagcttcaagagtagtgatgtttcttcctcgcaacattgacctaaaccaattggcggacatgtccttgtctgtggatcccccgtgggcagttgaggtcgagaagaacttcctcaacggaaagctgaaagccataacagcttactttgaagaacaggatcgttgaaccaagcatcggcgctggtgatacaaatcatcttgttagctatgactcacgacaaatttttgtggtgaccctaaacagaacctttgtgttcggagacagaaagaagcggtttatcatcttcaccgagcatagataatttatttgcagagatgagtcattggtatcatacaaaagcagctcagcttatctcaattcacagcaagtgaaactgtcgaaggaaaactacaaggctgacagtcgaacgcgtgggagttagcttaattttgccttatgataagcaagcatgcttcctggtttatttcatacagctactagtagtttcagctgcaacagttgtgcgttggtgtgcgtgtgattctcacatatctggtcctgcggatgtgagtgatgcaaatgtatgtgtcatcatcccatgtaagggtttgtttgtttgctctcaatctatgtagattgagtgggattaagtgagtttaaatctcagacaagtcaaaaaaaaatgttttcaatctcatccaatccacatatgatagtaatacccgagtaaggcttagatgtaatagttggaataag

SEQ ID NO: 1955 - DNA, 2541 bp, Zea Mays
cacgcccaacggccgtttcccgcaccccctatccgggaaggaagaaagccagaactcacccctgcttcgtctggcggcgccgtttcccgcacgcgatgccgtcgacggcggaggatttcccggcgataaggaagctggggaagctcttccggcttaccgaagtgtacctctgggacgattcgtatggcgctggacctcacgatggacagaagaacgggcgctcggcggaggctgctctcgtggactctcatacagataaaacatgcaatgaagcatccaatagcactgacaaaggccatttctttgttgaagatttggaattggtcaatctcatgggttctttggggcttcctgtttcattcagcacaagtaaagtgaacaagaacacatgcaacaagggaaagaaaaaaggaagacaagcaccgctcaaagcagcaaacactcaaatcaatgatgctgtgaggatatgtatcaatactgaagatagagaaaattctgttgaatcattggatgctatggagcaaacgcactcatgcaatttatttgtgacaccactgggtcaaaatgaaccctcccgtgatgacactgacaagaggcttagggaagacagctcttgtgttgaagaacaagaagagtctggctgtagcaccatctactctgctggcaaagcccctggctgtgatgctaaaaatcatctcactgaacttggggcttttgagctttctgataacttggccaactcagcaaaagaagaatactcaattcaagaaaatcaagcttatgaaagtgtgttgctagattctgaagagatgtcaaggaatgactgtgttgatgatgaatctacacattcctgtgttggcatttatcaggatgaaagagtgtccacaaggggagatcaaacatctgaagaaactctatcagtaccccatgattacaatgatgttggcagagaagctagtctaagtttggcagagccatcatctattgatgagcatgcacaaagctctgccaacaacttttactatgactatggtgaatggagggttatctgggatccattctataatcggtattatttttacaacatccagacacaagagtccacatggtgtcctcctgaaggactggaggattttgcatcatattgtagcccagataccactaaagagctagctgaactgggatctcagtgttcaagcatggcaccacaagagaacaatctggctactcatgtcaatcatttagaagcacaggagcaagatcactgcattcatgatttatctgacattcctgttgaaaagccaatatatcaaagatcattcatgccaagacatggcagggaacgtctctaatgacatcatcaagtactgggctcagcggtattcacttttctcactttttgatagtggtataaagatggatgaagtagggtggttttcagttacgccagagccaattgcaaagcatcatgcatctcgtgtgggtgcgggagtaatgattgattgtttcacaggagttggtggaaatgccatccaatttgccaaaaagtgcaagcatgtaattgcagttgatattgatccacaaaagattgattgcgcgcatcataatgcatccatttatggagtaaatgatcacatagatttcattgtaggtgattttatacatatagctcctcatctgaagggagaaactgctttcatgtcgcctccttggggtggccctgactatgccaaagttgatgtttatgatatgaaaagcatgcttattccttgtgatgggtactctctttttaaactcggaaccatgatagcttcaagagtagtgatgtttcttcctcgcaacattgacctaaaccaattggcggacatgtccttgtctgtggatcccccgtgggcagttgaggtcgagaagaacttcctcaacggaaagctgaaagccataacagcttactttgaagaacaggatcgttgaaccaagcatcggcgctggtgatacaaatcatcttgttagctatgactcacgacaaatttttgtggtgaccctaaacagaacctttgtgttcggagacagaaagaagcggtttatcatcttcaccgagcatagataatttatttgcagagatgagtcattggtatcatacaaaagcagctcagcttatctcaattcacagcaagtgaaactgtcgaaggaaaactacaaggctgacagtcgaacgcgtgggagttagcttaattttgccttatgataagcaagcatgcttcctggtttatttcatacagctactagtagtttcagctgcaacagttgtgcgttggtgtgcgtgtgattctcacatatctggtcctgcggatgtgagtgatgcaaatgtatgtgtcatcatcccatgtaagggtttgtttgtttgctctcaatctatgtagattgagtgggattaagtgagtttaaatctcagacaagtcaaaaaaaaatgttttcaatctcatccaatccacatatgatagtaatacccgagtaaggcttagatgtaatagttggaataag

SEQ ID NO: 1956 - DNA, 2494 bp, Zea Mays
cacgcccaacggccgtttcccgcaccccctatccgggaaggaagaaagccagaactcacccctgcttcgtctggcggcgccgtttcccgcacgcgatgccgtcgacggcggaggatttcccggcgataaggaagctggggaagctcttccggcttaccgaagtgtacctctgggacgattcgtatggcgctggacctcacgatggacagaagaacgggcgctcggcggaggctgctctcgtggactctcatacagataaaacatgcaatgaagcatccaatagcactgacaaaggccatttctttgttgaagatttggaattggtcaatctcatgggttctttggggcttcctgtttcattcagcacaagtaaagtgaacaagaacacatgcaacaagggaaagaaaaaaggaagacaagcaccgctcaaagcagcaaacactcaaatcaatgatgctgtgaggatatgtatcaatactgaagatagagaaaattctgttgaatcattggatgctatggagcaaacgcactcatgcaatttatttgtgacaccactgggtcaaaatgaaccctcccgtgatgacactgacaagaggcttagggaagacagctcttgtgttgaagaacaagaagagtctggctgtagcaccatctactctgctggcaaagcccctggctgtgatgctaaaaatcatctcactgaacttggggcttttgagctttctgataacttggccaactcagcaaaagaagaatactcaattcaagaaaatcaagcttatgaaagtgtgttgctagattctgaagagatgtcaaggaatgactgtgttgatgatgaatctacacattcctgtgttggcatttatcaggatgaaagagtgtccacaaggggagatcaaacatctgaagaaactctatcagtaccccatgattacaatgatgttggcagagaagctagtctaagtttggcagagccatcatctattgatgagcatgcacaaagctctgccaacaacttttactatgactatggtgaatggagggttatctgggatccattctataatcggtattatttttacaacatccagacacaagagtccacatggtgtcctcctgaaggactggaggattttgcatcatattgtagcccagataccactaaagagctagctgaactgggatctcagtgttcaagcatggcaccacaagagaacaatctggctactcatgtcaatcatttagaagcacaggagcaagatcactgcattcatgatttatctgacattcctgttgaaaagccaatatatcaaagtatgataactacctctgacaaagcacagcacactgaaaataagtacagcgattcaacaactactgtgttagagatgaaccaggaagttgctagcaccaaaacgaaaaagagaatcattcatgccaagacatggcagggaacgtctctaatgacatcatcaattacgccagagccaattgcaaagcatcatgcatctcgtgtgggtgcgggagtaatgattgattgtttcacaggagttggtggaaatgccatccaatttgccaaaaagtgcaagcatgtaattgcagttgatattgatccacaaaagattgattgcgcgcatcataatgcatccatttatggagtaaatgatcacatagatttcattgtaggtgattttatacatatagctcctcatctgaagggagaaactgctttcatgtcgcctccttggggtggccctgactatgccaaagttgatgtttatgatatgaaaagcatgcttattccttgtgatgggtactctctttttaaactcggaaccatgatagcttcaagagtagtgatgtttcttcctcgcaacattgacctaaaccaattggcggacatgtccttgtctgtggatcccccgtgggcagttgaggtcgagaagaacttcctcaacggaaagctgaaagccataacagcttactttgaagaacaggatcgttgaaccaagcatcggcgctgaaagaagcggtttatcatcttcaccgagcatagataatttatttgcagagatgagtcattggtatcatacaaaagcagctcagcttatctcaattcacagcaagtgaaactgtcgaaggaaaactacaaggctgacagtcgaacgcgtgggagttagcttaattttgccttatgataagcaagcatgcttcctggtttatttcatacagctactagtagtttcagctgcaacagttgtgcgttggtgtgcgtgtgattctcacatatctggtcctgcggatgtgagtgatgcaaatgtatgtgtcatcatcccatgtaagggtttgtttgtttgctctcaatctatgtagattgagtgggattaagtgagtttaaatctcagacaagtcaaaaaaaaatgttttcaatctcatccaatccacatatgatagtaatacccgagtaaggcttagatgtaatagttggaataag

SEQ ID NO: 1957 - DNA, 2659 bp, Zea Mays
cacgcccaacggccgtttcccgcaccccctatccgggaaggaagaaagccagaactcacccctgcttcgtctggcggcgccgtttcccgcacgcgatgccgtcgacggcggaggatttcccggcgataaggaagctggggaagctcttccggcttaccgaagtgtacctctgggacgattcgtatggcgctggacctcacgatggacagaagaacgggcgctcggcggaggctgctctcgtgataaaacatgcaatgaagcatccaatagcactgacaaaggccatttctttgttgaagatttggaattggtcaatctcatgggttctttggggcttcctgtttcattcagcacaagtaaagtgaacaagaacacatgcaacaagggaaagaaaaaaggaagacaagcaccgctcaaagcagcaaacactcaaatcaatgatgctgtgaggatatgtatcaatactgaagatagagaaaattctgttgaatcattggatgctatggagcaaacgcactcatgcaatttatttgtgacaccactgggtcaaaatgaaccctcccgtgatgacactgacaagaggcttagggaagacagctcttgtgttgaagaacaagaagagtctggctgtagcaccatctactctgctggcaaagcccctggctgtgatgctaaaaatcatctcactgaacttggggcttttgagctttctgataacttggccaactcagcaaaagaagaatactcaattcaagaaaatcaagcttatgaaagtgtgttgctagattctgaagagatgtcaaggaatgactgtgttgatgatgaatctacacattcctgtgttggcatttatcaggatgaaagagtgtccacaaggggagatcaaacatctgaagaaactctatcagtaccccatgattacaatgatgttggcagagaagctagtctaagtttggcagagccatcatctattgatgagcatgcacaaagctctgccaacaacttttactatgactatggtgaatggagggttatctgggatccattctataatcggtattatttttacaacatccagacacaagagtccacatggtgtcctcctgaaggactggaggattttgcatcatattgtagcccagataccactaaagagctagctgaactgggatctcagtgttcaagcatggcaccacaagagaacaatctggctactcatgtcaatcatttagaagcacaggagcaagatcactgcattcatgatttatctgacattcctgttgaaaagccaatatatcaaagtatgataactacctctgacaaagcacagcacactgaaaataagtacagcgattcaacaactactgtgttagagatgaaccaggaagttgctagcaccaaaacgaaaaagagagtaaggagatctcgatcgtatcattcatgccaagacatggcagggaacgtctctaatgacatcatcaagtactgggctcagcggtattcacttttctcactttttgatagtggtataaagatggatgaagtagggtggttttcagttacgccagagccaattgcaaagcatcatgcatctcgtgtgggtgcgggagtaatgattgattgtttcacaggagttggtggaaatgccatccaatttgccaaaaagtgcaagcatgtaattgcagttgatattgatccacaaaagattgattgcgcgcatcataatgcatccatttatggagtaaatgatcacatagatttcattgtaggtgattttatacatatagctcctcatctgaagggagaaactgctttcatgtcgcctccttggggtggccctgactatgccaaagttgatgtttatgatatgaaaagcatgcttattccttgtgatgggtactctctttttaaactcggaaccatgatagcttcaagagtagtgatgtttcttcctcgcaacattgacctaaaccaattggcggacatgtccttgtctgtggatcccccgtgggcagttgaggtcgagaagaacttcctcaacggaaagctgaaagccataacagcttactttgaagaacaggatcgttgaaccaagcatcggcgctggtgatacaaatcatcttgttagctatgactcacgacaaatttttgtggtgaccctaaacagaacctttgtgttcggagacagaaagaagcggtttatcatcttcaccgagcatagataatttatttgcagagatgagtcattggtatcatacaaaagcagctcagcttatctcaattcacagcaagtgaaactgtcgaaggaaaactacaaggctgacagtcgaacgcgtgggagttagcttaattttgccttatgataagcaagcatgcttcctggtttatttcatacagctactagtagtttcagctgcaacagttgtgcgttggtgtgcgtgtgattctcacatatctggtcctgcggatgtgagtgatgcaaatgtatgtgtcatcatcccatgtaagggtttgtttgtttgctctcaatctatgtagattgagtgggattaagtgagtttaaatctcagacaagtcaaaaaaaaatgttttcaatctcatccaatccacatatgatagtaatacccgagtaaggcttagatgtaatagttggaataag

SEQ ID NO: 1958 - DNA, 2694 bp, Zea Mays
atgagaggggtgaaggaagcccaggagagccgaggaacacgccaagaagcgtcggcgatgagatttatgctctgtgaagtcgtcgagccaccaaggacgggggcgacgtggggggtggcggcgcagaggcgaggattggggtggcaggagcatgcgcatgcgtggagaaaggtgggcccagcgaggatcgcagggcatggacggtggcgtacctggaagcaccgatggaagggcgaggagtgcggggaagagacgtacctggacgggcgccgatggaagggtgaggagtgggggttaggaccacggaggcgagaatcgtggaggcggggaagaatgatgcctgttcgagctcggagagcgagaaccccccgtgctggccagtgggccaccttctgcccacgaacgaagagcggcgcgatacgtgggcccagcaagatcagggcccgccccgaagcacccaggcaccttcgtgctcgtgccgtgcccgtgcccgtgcccgtgcccggcgcatcggcgtctcctctcctcgcgcatttctcactcgaccaccacttcggcaccgcagcgtccgaatccctccgaaccccgacccaagcgcgctgtccggcggtcctcatcgaacccgccctgatccctagcgctcgcgtgctccactctacctacggagggagcccgcccagccggccgcctctgcgttggtcctggccgcggcctcgcacgcagatgatggtggcggagaagccggcgccgggggtgttccaggtgcacgaggcggcggacgacgagcaggagccggcgtcgccgtcgtcgccacggaagatgcactcgctggacttcgagcacatcggcgcgctcgccgccgtggccgagtcgctggcgcccgggagcaggtggcggagagcgctcaccagcgcgcgcttcgtcatcttccaggccaagatcaacgtgctgctccccttcggcccgctcgccatcgtgctccactatctctccggaacgcacgtaagaaccccggccacgcacttcgtttccaaatcttcacaatctttttctttttcctcttttttttttcgccaaccaagtgcacgtacactctctactttcgcgcggccgcgtttgaatctctactgactactgccaacctcgtctttgttccgctgcattagttgccgtgcacataagctgaccacacttcaccttctctgtttgcttccatcaaatgcgagctccacagcaaggatgggttttccttttcagcttaatcggcattaccccgttggccgagagactgggatacgcgaccgagcaacttgcttgctacactggcccaacagttggggggctactgaatgctacatttggaaatgcaacggaaatgattatatcaatatacgcactgaaaaatgggatgattcgagtcgtccagcagtcactactaggctcaatactgtcaaatatgctgctggttcttggctgtgctttctttgccggcggtcttgtccactccgacagggatcaggtcttcaacaaggcatcagctgttgtaaactcaggactactgttgatggctgtcttaggccttatgttcccagcagtgcttcacttcacgcattcagaagcgcagtatggaaaatccgaagtagctctttcaaggtttagtagctgcatcatgcttgtggcctatgctagctatctgttttttcaactgaagagccaccgcagtatgtacagcccaattggtgatgaagaagaagccactgaggaggatgaggatgaaaaggagataacacaatgggaggccatctgctggctttttatgttgactatttggatttcaatactctcagggtacctggttgatgccattcagggtgcgtccgaatcattaaacttgccagtagcctttattagtgttattctgcttcctattgtggggaatgctgctgaacatgcgagcgccattatgtttgccatgaagaacaaattggacattacattgggagttgcaataggttcatcaacacagatctccatgtttgtgattccattctgcgtggtaattggctggatgatggggcgggaaatggacttgaattttcaattgtttgagacagcgactctctttataactgtactagtggtggcattcatgctacaggaaggcacatcaaactattttaaaggccttatgctcatcttgtgctacctcatagtcgctgcaagcttcttcgtccatgttgatcctgatgcaagtgagaactaggtgaaaaatctgcaatacagcatacctgtgaacagaatggaggggctacgacctaactgcagagttagcaaattgcgtagatgaggttctgcaagagtcctgaatttggatgtaacttgttggcagaatcccggaccgagggtttaactcgggctctcaagattaaggagctgatgcagctttttttaggatagcaacagcatcgcccgttgaggaactgtaactttatgcggcgatcacagaatttaccgttgcatttgttcacagtttttgatgttgctgtgatgttacggtgttaccgttggttggtacgatgatgttagaagggctccaacggttcccgaggctctctccccctcgccatgttccgtgtacatgtagaaagaaacttactatattttgcgacttgaaacacacaagatttttagacc

SEQ ID NO: 1959 - DNA, 2111 bp, Zea Mays
tcgtcttcgcgagcagtcgcggtggctgtggcggcgtcatcgtcatcactcatcagcgattccaaatacaaactcccacagcttccacagaaaaccctaacactagatccccaccatggatctcctccagtcctcttacgcgccggacgccgcctcgtccccggaggactcggcggccgcgtcctcgccggagtcctcgccgctccgccttccgtccaagtccgccgcccccgccgtcgacgacaccgcgctcgcgctctcctccgccgcgtccgccgcccgcccgctcgacccctcgctccacctcgtcgccttcaaccccaccgctgaccagctctgggcgcccatcctagggccccagcacccccacgccccaatctcctccgcctcaggcaatcgcaaccacaagctcggccacgtcgaggacgccgcggtcctgcccttcctattcgacgagcagtacaacaccttccaccgcttcggttacgctgccgacccctccggcctccacatcgtcggcgacgcccatccccaggcgcctgagcccgacaccgtctacaacctcgccccctccgagcacaagcgccgccgcctcctggccaaggcggacaaccaggaggagcccgcccctccggaggccaagaaccccgcctccgaggaatgggtcctccacaacaagcagagtccctgggctgggaagaaggaagcgcctcccgcggagctcaccgacgagcagaggcagtatgcggaggcgcacgctgccaagaaggccgagaaggaggctcgcgccgaaggaaagagcgagagggcagaggttgtggtcaagaccaccttccacggcaaggaggagaaggactaccagggacgctcctggatcacgccgcccaaggacgccaaggccaccaacgaccactgctacatcccaaagaggtgtgtccacgagtgggtcggccacaccaagggggtctcggccatcaggttttttccaaagtatggacatttgctgctgtctgcaagtatggattgcaagattaaaatctgggatgtgcttgggtcacggacatgtatgcggacttatatggggcactcaaaggccgtaagggatatatcattctctaatgatgggactaaattcttgagtgctgggtatgacaggaatatacagtactgggatactgagacagggcaggtgatctcgaccttctcaaccgggaaggtcccatatgttgtgaagctcaatcctgatgaggataagcagcatattctccttgccggaatgagtgataaaaagattgtgcaatgggatatgaagtcagggcagattacacaagagtatgatcagcatttaggggctgtgaacaccataacttttgtggataacaacaggagatttgtgacctcgagtgatgacaagtctcttcgtgtgtgggagtttggcatccctgtggtgattaagtatatcagtgagccgcacatgcactcaatgccatcaattgcactgcatcccaactcaaattggctggcagcacagagcttggacaatcagatactgatatacagcaccaaggagaggtttcagcttaataagaagaagagatttgccggacatattgtggcaggttatgcttgtcaagtgaacttctcacctgatgggaggtttgtgatgtctggtgatggtgagggtagctgctggttctgggactggaaaagctgcaggagatttaagactttgaggtgccacaacggagtttgcattggatgtgagtggcatccattggaaactagcaaggttgcaacctgtggatgggatggtgtaattaaatactgggattgaagtttggcagagagattgcttgagctcctgggggaggttttgtaacaatccaattcacaagggctgaatgtcatgagatactggtcaagtgtcgcagcgctgtacttgctcacctgtcgaacgctttccggccagtcaggagctcgctcttttgagagtactggccggacatttccacctccggaactctgtatccggggctgtcatctgattcctgaaggtgtcaacgtgtaagggaagtctgctcattcatgtttcaacagtactaagtctaagg

SEQ ID NO: 1960 - DNA, 2470 bp, Zea Mays
tcgtcttcgcgagcagtcgcggtggctgtggcggcgtcatcgtcatcactcatcagcgattccaaatacaaactcccacagcttccacagaaaaccctaacactagatccccaccatggatctcctccagtcctcttacgcgccggacgccgcctcgtccccggaggactcggcggccgcgtcctcgccggagtcctcgccgctccgccttccgtccaagtccgccgcccccgccgtcgacgacaccgcgctcgcgctctcctccgccgcgtccgccgcccgcccgctcgacccctcgctccacctcgtcgccttcaaccccaccgctgaccagctctgggcgcccatcctagggccccagcacccccacgccccaatctcctccgcctcaggcaatcgcaaccacaagctcggccacgtcgaggacgccgcggtcctgcccttcctattcgacgagcagtacaacaccttccaccgcttcggttacgctgccgacccctccggcctccacatcgtcggcgacgcccatccccaggcgcctgagcccgacaccgtctacaacctcgccccctccgagcacaagcgccgccgcctcctggccaaggcggacaaccaggaggagcccgcccctccggaggccaagaaccccgcctccgaggaatgggtcctccacaacaagcagagtccctgggctgggaagaaggaagcgcctcccgcggagctcaccgacgagcagaggcagtatgcggaggcgcacgctgccaagaaggccgagaaggaggctcgcgccgaaggaaagagcgagagggcagaggttgtggtcaagaccaccttccacggcaaggaggagaaggactaccagggacgctcctggatcacgccgcccaaggacgccaaggccaccaacgaccactgctacatcccaaagaggtgtgtccacgagtgggtcggccacaccaagggggtctcggccatcaggttttttccaaagtatggacatttgctgctgtctgcaagtatggattgcaagattaaaatctgggatgtgcttgggtcacggacatgtatgcggacttatatggggcactcaaaggccgtaagggatatatcattctctaatgatgggactaaattcttgagtgctgggtatgacaggaatatacagtactgggatactgagacagggcaggtgatctcgaccttctcaaccgggaaggtcccatatgttgtgaagctcaatcctgatgaggataagcagcatattctccttgccggaatgagtgataaaaagattgtgcaatgggatatgaagtcagggcagattacacaagagtatgatcagcatttaggggctgtgaacaccataacttttgtggataacaacaggagatttgtgacctcgagtgatgacaagtctcttcgtgtgtgggagtttggcatccctgtggtgattaagtatatcagtgagccgcacatgcactcaatgccatcaattgcactgcatcccaactcaaattggctggcagcacagagcttggacaatcagatactgatatacagcaccaaggagaggtttcagcttaataagaagaagagatttgccggacatattgtggcaggttatgcttgtcaagtgaacttctcacctgatgggaggtttgtgatgtctggtgatggtgagggtagctgctggttctgggactggaaaagctgcaggagatttaagactttgaggtgccacaacggagtttgcattggatgtgagtggcatccattggaaactagcaaggttgcaacctgtggatgggatggtgtaattaaatactgggattgaagtttggcagagagattgcttgagctcctgggggaggttttgtaacaatccaattcacaagggctgaatgtcatgagatactcctcattttcccctaggacgcgtggtccccactcagcgctgtcgtcgtccccatgctcgctcgctgcacaagacggaccagtgactggacgacctccgacatgggcggcctgaattctggctcaggttgcgcaaccggaaaccgaccaatctgcaacaccgcacaaaatggctggagacgggaacagcaactaaacccgtcaacagcttacctggacgcagaggacttcgcgtggcacagcccctccagcgtcatctggtcgatgtcgtgcagctggggcgacgcccactggaccaacgatagctgggaccttgcttgagagctgcaacagtcatcgtctttgtttgttgcagggtcaagtgtcgcagcgctgtacttgctcacctgtcgaacgctttccggccagtcaggagctcgctcttttgagagtactggccggacatttccacctccggaactctgtatccggggctgtcatctgattcctgaaggtgtcaacgtgcttgtcagtgggggtcattttcttcagctcctttgcggtgggtgagagtgag

SEQ ID NO: 1961 - DNA, 1776 bp, Zea Mays
ctcccctcatcacctgtgtttccgcgaaacaacgctctaaattcaacagtgcctaaattaagtgacacaaccctaaactttcatatgactactatatagcatgtgttacatacgatccgaggagatgatcgatgatggtggtggcgcaagtgaggagagggggaagggaagggatgagggatgattcaagtaaagtagttcatggggaacggagatgagttatccaactatctggaccgttgattttgatagtgtgttaagtttgagtacaatatgtttggtgaatttagtgcaaagtttaaactgatagattatatagtggtaagagcataactcttttctattatataaatatatgtaactttctatctttaacgtatacaactttatatctaactttctatctttaacgtacataccattctatatttaatgcaagttttatttttattattattattttttcggccggtcccccctcccctcatcacctgtgctaccgcgaaacaacgttccgaattcaacagtgcctaaattaagtgacacaaccctaaactttcatatgactactatatagcatgtgttacacacgatcccgaggagatgtgaaagggaaatgtgcccttgggccatttttataagtattttagtgattagatgcccaacacatattgatttagttcttatgtgctaaatgagtgagaagtgcaaatcaaagaaaaaggtatgtatccggccttagtaaattgtttttgagtactaacatatgcatcgaggtgccaggaaacattgccgagaagaaatgatttgagttggagaagagttggctaagtcagccaaaccagcgcagtctgtggtgcaccggactgtccggtggtgcaccggacagtgtccggtgccccaggctggcccgacggtgaactggcccggcggtgaatcggccgggtgacgtggctaaaaatcaccggactatccagtgagtccttatcgcccgtgcccaagtccttcaacgatgaagtcgtcgctctcgagaaaaggagaaagctctgcggctaaaaatcactggactgtccggtggtgcaccggactgtccagtgagtcagagccgcccaagccaacggtcgctagcgcaattagcgggcgacgcgtggcccgcgccaacggtcggttcggcacaccggactgtccggtgcgccaacggaaccgccggcccaacaatcggatgcgccagataaggaaggagatcgagcaccggactgctacaggacctgtccggtggtgcaccggactgtctggtgcgtcactcgacagaaggcaagaattgccttccaagttgatctccaacggctcctagctgccttgggactataaaagagacccctaggcgcatggagcaatataacaagcttgcaagaaacattctaagacggctagactctgcaatcatgcaatcggatcatcgttcttgagatttgagcaccgtttgagttgtaaactccccgcgccgtgtttgtgtgctcacttcttcacttgtgtgtgtgtgtgtttgctgcgatacgagtcttgtgtgcgttgctttccctcccttactcttgtgcttctttgtgatctatattgtaagggcgagaggctccaacttgtggagattcctcgcaaacgggagaagaacactaaacaaaaagaccgtagtattcaagttgatcattgtatcacttgaaaggggttgagtgcaaccttcgtccattgggacgccacaacgtgaaagtaggcaagtgt

SEQ ID NO: 1962 - DNA, 981 bp, Zea Mays
aatcaccggactgtccggtggtgcaccggactgtccggtgagtcagagccgcccaagccaacggtcgctagcgcaatcagcgggcgacgcgtggcccgcgccaacggtcagttgggcacacaggattgtctggtgcgccaacggaaccgctggcccaatggtcggatgcgccagataaggaaggagatcgagcaccagactactacaggacctgtccgatggtgcaccggactgttcggtgcgccactcgatagaaggcgagaattgccttccaagttgatctccaacggctccgagctgccttgggactataaaagagacccctaggtgcatggagaaatataccaagcttgcaagaaacattctaagacgcctagactctgcaatcatgcaatcggatcatcgttcttgagatttgagcaccgtttgagttgtaaactccctgtgccatgtttgtgtgctcacttcttcacatgtgtgtgtgtgtgtttgctgcgatacgagtcttgtgtgtgttgctttccctcccttactcttgtgcttctttgtgatctatattgtaagggcgagaggctccaacttgtggagattcctcgcaaacgggagaagaacactaaacaaaaagatcgtggtattcaagttgatcattggatcacttgaaaggggttgagtgcaaccttcgtccattggaacgccacaacgtggaagtaggcaagtgttatacttggccgaaccacaggataaaacaccgtgtctcttgtgctgcttttctctgtgattgttttgttcgcaagagctcgcttcatagcaacttgattaactcgcactaacacttttataatcaagtttgtggctatttagtgtttgattttgcaggatcacctattcaccccccctctaggtgctctcaagatgatcgatgatggcggtggcgcaagggaggagagggggaagggatgagggatgattcaaataaagtag

SEQ ID NO: 1963 - DNA, 365 bp, Zea Mays
ctttcatctgactactatatagcatgtgttacacacgatcccgaggagatgatcgatgatggtggtcgcgcaagtgaggagagggggaaaggagtggaagggatgagggatgattcaaataaagtagttcatggggaagggagatgagttaaccaactatctggatattttattttgatagtgtgttaagtttgagtacaatatgtttggtgaatttagtgggataatgagtatggggtgatttggttgtgtgacttttgcaatgtttaaacttatggattatatagtggtaagagcatacctcttttctattatgtaaatatatgtaactttctatctttaacgtatacaactttatatctaac

SEQ ID NO: 1964 - DNA, 443 bp, Zea Mays
aattcaatagtgcctaaattaagtgacacaaccctaaactttcatatgactactatatagcatgtgttacacacgatcccgaggagatgatcattgatggcggtggcgcttgtgaggagagggggaagggatgagggatgattcaaataaagtatttcatagggaagggagatgcgttatccaactatctagaccgctgattttcatagtgtgttaagtttgagtacaatatgtttggtgaatttagtgggatcatgagtatggggtgatttggttgtgtgacttttgcaaagtttgaactgatggattatatagtggtaagagcataactcttttctattatatatatatatatgtaactttctatctttaacgtatacaactttatatctaactttctatctttaacgtacataccattctatatttaaagcatgtttttt

SEQ ID NO: 1965 - DNA, 989 bp, Zea Mays
atcacctatgcttccgcgaaacaacgctctgaattcaacagtgcctaaattaagtgacacaaccctaaactttcatatgactactatatatgatgtgttacacacgatcccgaggagatgaacgatgctggcggtggcgcaagtgaggagagggggaagggaagggatgagggatgattcaaataaagtagttcatgaggaagggagatgagttatcgaactatctggaccgttgattttgatagtgtgttaagcttgagtgcaatatctttggtgaatttagtgggataatgagtatggggtgatttggttgtgtgacttttgcaaagtttaaactgatggattatatagtggtaagaccataactcttttctattatataaatatatgtaactttctatctttaacgtatacaactttatatctaactttctatctttaatgtacataccattctatatttgacgcaagttttttattattattattttcccgaccggtccccccctcccctcatcacctatgcttccgtgaaacaacgctccgaattcaacagtgcctaaattaagtgacacaaccctaaactttcatatgactactatatagcatgtgttacacacgatcccgaggagatgatcgatgatggcggtggcgcaagtgaggagagggagaatggaagggaagggatgattcaaataaattagttcatggggaagggagatgagatatccaactatctggaccgctgattttgatagtgtgttaagtttgagtacaatatgtttggtgaatttagtggcataatgagtatggggtgatttggttgtgtgacttttgcaaagtttaaactaatggattatatagtggtaagagcataactcttttctattatataaatatatgtaactttctatctttaacgtacacaactttatatctaactttctatctttaacgtacatgccattctgtattttacgcaagttttt

SEQ ID NO: 1966 - DNA, 380 bp, Zea Mays
aggaaacattacatcagataaagaaaattgtaataagctccatgcacggttcgtctagacttgcaaacagcaagagtagacttgggaattcaaaagaaaggtgtctgcgaattttttttaaaaaaagtctagccatgaagttttatgccaaacaacaaccagaatgacaattattgaaactgagtcggatcgcacctagccagccagtctccacggctacctctagctaggttctacgcatgcaggctcgacatcttttattgggggcatgcgcacctctctcatccagcagcgagcaggcacgtcttcagaagaacggcgccctctccggcgccgcctgcttgcgcggccgcctgcggagcgacgcgttctgatttgcg

SEQ ID NO: 1967 - DNA, 587 bp, Zea Mays
gtacgatggctgaaagcagcttagcgagcgaatgcaatgtcgttcttcgtggccggcgacgacgacgtacgtcgcccggccgggtggcaagagccgtcgagcccctgcgttgttgccctcttcactgctggaacaggcacgcaggcgaggaggaagacgacccgctagtgacgaagattgtatttccagcagtccaaacaatcgggtttaatccgaagcgaattgattaaagttcaagaatacacaccggacagcgtgtttatttagagtggatttatttaagaagttgctcccgtcttgtccatcagagcgtatgccaaattaaaaaaagattgatgatctaccaatacctgatgacgctcgtgcgtttggcatctggcagggtggctttgtgaagaaatttcctggcggcgaatgattcttgcgtgtgcaggtattttctagcggcgattcttgcgagataaagagctgacgacgcgtattgcctgaatatatggagttgtgggagcggatggcgggtaacgacaaaccggtggcagatttgtgaaccggtcaaaaacccgaaaaatatatggagctcttgaaat

SEQ ID NO: 1968 - DNA, 186 bp, Zea Mays
atgataggggcccaaaacagaacacttccacacatggctgttgagtatcgcagttttgaagatggtgatgctggatcatcgatcactggctcgcctccttggacaagctcagatcagggttggcgatctgaggtcccagcccaagccatggctgaccatccgacatctccttcttcacaggtgtaa

SEQ ID NO: 1969 - DNA, 585 bp, Zea Mays
atgaacgcctggtgctgctcgtgcaaaatggccctgtcgaggtcgctatggcctgcgccggtggacgagcccttggtgttggccatgcggagccgggacgtcgtctgtgtatgacctgcaagagaagaagggaatggcggggtcaggtggtgtggtgtggtggtggccacgactatgttgccattgaagaataaaaggaataatctacccacacattgtcaacgtctctctatcctgcttggaggaatcctctcgtggggactccattgttacatccggagaaggttattgttgaccggaaaggaaacatcaaggtctctgatttggtctcggtgctttaccatcatatcttagggtatatgataaataattttctagactgtgaaatgatttcagcaagttgatcgctcattgtattgcatgatatatttactttcatattgatggattgttgcatacaacctgtggtagcccttacattgcccttgaggtgaagaaagcctgaccactcccaggccaaacaatttttggtgtccagttattaatttcttgtgccaaatgcttgcagtttctgtagaacagaag

SEQ ID NO: 1970 - DNA, 1280 bp, Zea Mays
atgaacgcctggtgctgctcgtgcaaaatggccctgtcgaggtcgctatggcctgcgccggtggacgagcccttggtgttggccatgcggagccgggacgtcgtctgtgtatgacctgcaagagaagaagggaatggcggggtcaggtggtgtggtgtggtggtggccacgactatgttgccattgaagaataaaagactgttggagttgctctaagccaacagttctaccatgactttactccacgcaacagtcgcttcgtgacgcccgccgcgacctccgcctcgcgtcgtcgttccccaggaactccgacgcgcaggacgagctgtaggccagcaacgccgaggccaacttggaataatctacccacacattgtcaacgtctctctatcctgcttggaggaatcctctcgtggggactccattgttacatccggagaaggttattgttgaccggaaaggaaacatcaagctatgatttgaaatcgacagcttcatagatgtgcttgtcgtggaccacaactccacaagcaccgccagctgttccgtctcaatcctcatgtataccatttgaatatgggcattttcacttgaataagaatgagaggatagacacacaatattctgaatttgcagacttcctcttgtaattgttcagaagtcgacgatattcttgcagcactattttgaacctagagtacactatgtgattcactgacgtaaacacactgcttctgaattttcagtatgtgtacacataattgatgtgtcctcctcgctcaactctttgcaatgatgagacagcaactctcatctgttattctgtccttttttatgtccattttagttcagttttgaaagataggaaagttcagttttgactaaaaaacctatagggaagtcaatgcttttgcctttaagagagttgtgccttaggatactacaacttcttaacatacctcttgctaaattacctcttgacacatgtaccctcttctagattacattgaccccctcaacaagtgatgctgcatatatagtttgctaaaaaaagattgatgttgaaatttagagcttcccaggtgtgcctcctaggtgaatgaagagtggtatagtgcaacatatgtgttttatctgatttcttttttgcaggttggtgctaatatcgatgacactgaagttgcgacagttagttcctctataaccaaggagcggaaaatggattaaagctcatttctctttcacataacgagggatgtctcactgaaactggtgtagca

SEQ ID NO: 1971 - DNA, 1123 bp, Zea Mays
atgaacgcctggtgctgctcgtgcaaaatggccctgtcgaggtcgctatggcctgcgccggtggacgagcccttggtgttggccatgcggagccgggacgtcgtctgtgtatgacctgcaagagaagaagggaatggcggggtcaggtggtgtggtgtggtggtggccacgactatgttgccattgaagaataaaagggaataatctacccacacattgtcaacgtctctctatcctgcttggaggaatcctctcgtggggactccattgttacatccggagaaggttattgttgaccggaaaggaaacatcaagctatgatttgaaatcgacagcttcatagatgtgcttgtcgtggaccacaactccacaagcaccgccagctgttccgtctcaatcctcatgtataccatttgaatatgggcattttcacttgaataagaatgagaggatagacacacaatattctgaatttgcagacttcctcttgtaattgttcagaagtcgacgatattcttgcagcactattttgaacctagagtacactatgtgattcactgacgtaaacacactgcttctgaattttcagtatgtgtacacataattgatgtgtcctcctcgctcaactctttgcaatgatgagacagcaactctcatctgttattctgtccttttttatgtccattttagttcagttttgaaagataggaaagttcagttttgactaaaaaacctatagggaagtcaatgcttttgcctttaagagagttgtgccttaggatactacaacttcttaacatacctcttgctaaattacctcttgacacatgtaccctcttctagattacattgaccccctcaacaagtgatgctgcatatatagtttgctaaaaaaagattgatgttgaaatttagagcttcccaggtgtgcctcctaggtgaatgaagagtggtatagtgcaacatatgtgttttatctgatttcttttttgcaggttggtgctaatatcgatgacactgaagttgcgacagttagttcctctataaccaaggagcggaaaatggattaaagctcatttctctttcacataacgagggatgtctcactgaaactggtgtagca

SEQ ID NO: 1972 - DNA, 1321 bp, Zea Mays
atgaacgcctggtgctgctcgtgcaaaatggccctgtcgaggtcgctatggcctgcgccggtggacgagcccttggtgttggccatgcggagccgggacgtcgtctgtgtatgacctgcaagagaagaagggaatggcggggtcaggtggtgtggtgtggtggtggccacgactatgttgccattgaagaataaaagactgttggagttgctctaagccaacagttctaccatgactttactccacgcaacagtcgcttcgtgacgcccgccgcgacctccgcctcgcgtcgtcgttccccaggaactccgacgcgcaggacgagctgtaggccagcaacgccgaggccaacttggaataatctacccacacattgtcaacgtctctctatcctgcttggaggaatcctctcgtggggactccattgttacatccggagaaggttattgttgaccggaaaggaaacatcaaggtctctgatttggtctcggtgctttaccatcatatcttaggctatgatttgaaatcgacagcttcatagatgtgcttgtcgtggaccacaactccacaagcaccgccagctgttccgtctcaatcctcatgtataccatttgaatatgggcattttcacttgaataagaatgagaggatagacacacaatattctgaatttgcagacttcctcttgtaattgttcagaagtcgacgatattcttgcagcactattttgaacctagagtacactatgtgattcactgacgtaaacacactgcttctgaattttcagtatgtgtacacataattgatgtgtcctcctcgctcaactctttgcaatgatgagacagcaactctcatctgttattctgtccttttttatgtccattttagttcagttttgaaagataggaaagttcagttttgactaaaaaacctatagggaagtcaatgcttttgcctttaagagagttgtgccttaggatactacaacttcttaacatacctcttgctaaattacctcttgacacatgtaccctcttctagattacattgaccccctcaacaagtgatgctgcatatatagtttgctaaaaaaagattgatgttgaaatttagagcttcccaggtgtgcctcctaggtgaatgaagagtggtatagtgcaacatatgtgttttatctgatttcttttttgcaggttggtgctaatatcgatgacactgaagttgcgacagttagttcctctataaccaaggagcggaaaatggattaaagctcatttctctttcacataacgagggatgtctcactgaaactggtgtagca

SEQ ID NO: 1973 - DNA, 572 bp, Zea Mays
atgaacgcctggtgctgctcgtgcaaaatggccctgtcgaggtcgctatggcctgcgccggtggacgagcccttggtgttggccatgcggagccgggacgtcgtctgtgtatgacctgcaagagaagaagggaatggcggggtcaggtggtgtggtgtggtggtggccacgactatgttgccattgaagaataaaaggaataatctacccacacattgtcaacgtctctctatcctgcttggaggaatcctctcgtggggactccattgttacatccggagaaggttattgttgaccggaaaggaaacatcaaggtctctgatttggtctcggtgctttaccatcatatcttaggctatgatttgaaatcgacagcttcatagatgtgcttgtcgtggaccacaactccacaagcaccgccagctgttccgtctcaatcctcatgttggtgctaatatcgatgacactgaagttgcgacagttagttcctctataaccaaggagcggaaaatggattaaagctcatttctctttcacataacgagggatgtctcactgaaactggtgtagca

SEQ ID NO: 1974 - DNA, 2201 bp, Zea Mays
atgaacgcctggtgctgctcgtgcaaaatggccctgtcgaggtcgctatggcctgcgccggtggacgagcccttggtgttggccatgcggagccgggacgtcgtctgtgtatgacctgcaagagaagaagggaatggcggggtcaggtggtgtggtgtggtggtggccacgactatgttgccattgaagaataaaaggtttattctaggacacaataatccctctgtgaagaaacatttgtatcatttacccaaaaaaccccatcctgatggtgatctctttgtgttctcctgaatctgctattttttgtatattccctccgtttttaaatacaatatgtgaggtttacgattttgaactaactgtgaaaaataaaaattgtgttctcttagcttagctgttgacctcaatctctttatttgctttcatatttttgaggatcgtgatgtgaatgagagtcatgatcattgcctacgacgaagcgctcttattattcagcagcttaacatttgtgttgactttagtttatagtccatactttgtaaagtttgttgttgcaaatgcttcagtttgctagatgtcaatttagtaaatgtcagtgtggtagatgttcagtttggcttcttcctgtttgagacgaactatttagcacattgtttttttttcatatatatatggttcagttcaatttctatttgaatacatggatgttttacttttacatatggttcagttcactttcttcctgtttgagaccaacaaaaaaaacactacatatctttactttcagttggagtatgacagtttgagcgtttcagtttgaaagcacttcaatttgtttaagtttgtctgcacttttagttggagtaccaagtgtgagcactctcagttcttgttactacaagtctgaaatacgtcattttcctctgtggcgtactatgtagcacggtatacacggaaatgctttgggacattggcttttccctgaccatgtgactcgttttaaatattgggcaattcaattttgagggagctgctgtgcgccaaggtgattttagcctataaaaacgtgtgtggtgcccctaaaagctgattttggggctggttttttttcacagactgttggagttgctctaagccaacagttctaccatgactttactccacgcaacagtcgcttcgtgacgcccgccgcgacctccgcctcgcgtcgtcgttccccaggaactccgacgcgcaggacgagctgtaggccagcaacgccgaggccaacttggaataatctacccacacattgtcaacgtctctctatcctgcttggaggaatcctctcgtggggactccattgttacatccggagaaggttattgttgaccggaaaggaaacatcaagctatgatttgaaatcgacagcttcatagatgtgcttgtcgtggaccacaactccacaagcaccgccagctgttccgtctcaatcctcatgtataccatttgaatatgggcattttcacttgaataagaatgagaggatagacacacaatattctgaatttgcagacttcctcttgtaattgttcagaagtcgacgatattcttgcagcactattttgaacctagagtacactatgtgattcactgacgtaaacacactgcttctgaattttcagtatgtgtacacataattgatgtgtcctcctcgctcaactctttgcaatgatgagacagcaactctcatctgttattctgtccttttttatgtccattttagttcagttttgaaagataggaaagttcagttttgactaaaaaacctatagggaagtcaatgcttttgcctttaagagagttgtgccttaggatactacaacttcttaacatacctcttgctaaattacctcttgacacatgtaccctcttctagattacattgaccccctcaacaagtgatgctgcatatatagtttgctaaaaaaagattgatgttgaaatttagagcttcccaggtgtgcctcctaggtgaatgaagagtggtatagtgcaacatatgtgttttatctgatttcttttttgcaggttggtgctaatatcgatgacactgaagttgcgacagttagttcctctataaccaaggagcggaaaatggattaaagctcatttctctttcacataacgagggatgtctcactgaaactggtgtagca

SEQ ID NO: 1975 - DNA, 1122 bp, Zea Mays
atgaacgcctggtgctgctcgtgcaaaatggccctgtcgaggtcgctatggcctgcgccggtggacgagcccttggtgttggccatgcggagccgggacgtcgtctgtgtatgacctgcaagagaagaagggaatggcggggtcaggtggtgtggtgtggtggtggccacgactatgttgccattgaagaataaaaggaataatctacccacacattgtcaacgtctctctatcctgcttggaggaatcctctcgtggggactccattgttacatccggagaaggttattgttgaccggaaaggaaacatcaagctatgatttgaaatcgacagcttcatagatgtgcttgtcgtggaccacaactccacaagcaccgccagctgttccgtctcaatcctcatgtataccatttgaatatgggcattttcacttgaataagaatgagaggatagacacacaatattctgaatttgcagacttcctcttgtaattgttcagaagtcgacgatattcttgcagcactattttgaacctagagtacactatgtgattcactgacgtaaacacactgcttctgaattttcagtatgtgtacacataattgatgtgtcctcctcgctcaactctttgcaatgatgagacagcaactctcatctgttattctgtccttttttatgtccattttagttcagttttgaaagataggaaagttcagttttgactaaaaaacctatagggaagtcaatgcttttgcctttaagagagttgtgccttaggatactacaacttcttaacatacctcttgctaaattacctcttgacacatgtaccctcttctagattacattgaccccctcaacaagtgatgctgcatatatagtttgctaaaaaaagattgatgttgaaatttagagcttcccaggtgtgcctcctaggtgaatgaagagtggtatagtgcaacatatgtgttttatctgatttcttttttgcaggttggtgctaatatcgatgacactgaagttgcgacagttagttcctctataaccaaggagcggaaaatggattaaagctcatttctctttcacataacgagggatgtctcactgaaactggtgtagca

SEQ ID NO: 1976 - DNA, 1169 bp, Zea Mays
cagcagcttaacatttgtgttgactttagtttatagtccatactttgtaaagtttgttgttgcaaatgcttcagtttgctagatgtcaatttagtaaatgtcagtgtggtagatgttcagtttggcttcttcctgtttgagacgaactatttagcacattgtttttttttcatatatatatggttcagttcaatttctatttgaatacatggatgttttacttttacatatggttcagttcactttcttcctgtttgagaccaacaaaaaaaacactacatatctttactttcagttggagtatgacagtttgagcgtttcagtttgaaagcacttcaatttgtttaagtttgtctgcacttttagttggagtaccaagtgtgagcactctcagttcttgttactacaagtctgaaatacgtcattttcctctgtggcgtactatgtagcacggtatacacggaaatgctttgggacattggcttttccctgaccatgtgactcgttttaaatattgggcaattcaattttgagggagctgctgtgcgccaaggtgattttagcctataaaaacgtgtgtggtgcccctaaaagctgattttggggctggttttttttcacagactgttggagttgctctaagccaacagttctaccatgactttactccacgcaacagtcgcttcgtgacgcccgccgcgacctccgcctcgcgtcgtcgttccccaggaactccgacgcgcaggacgagctgtaggccagcaacgccgaggccaacttggaataatctacccacacattgtcaacgtctctctatcctgcttggaggaatcctctcgtggggactccattgttacatccggagaaggttattgttgaccggaaaggaaacatcaaggtctctgatttggtctcggtgctttaccatcatatcttagggtatatgataaataattttctagactgtgaaatgatttcagcaagttgatcgctcattgtattgcatgatatatttactttcatattgatggattgttgcatacaacctgtggtagcccttacattgcccttgaggtgaagaaagcctgaccactcccaggccaaacaatttttggtgtccagttattaatttcttgtgccaaatgcttgcagtttctgtagaacagaag

SEQ ID NO: 1977 - DNA, 2305 bp, Zea Mays
cttttattcccattacaacgtgcgcacaaaaagtggcaccaaaactttgaacggtggccatgctggagcgcttccctgtggccaactggccaatggaggagaaatatgaaccaaccaatgacaagtcggacccactggattgacagcctctgacgccgaaaaagccacagatcggatcgcggcgggcagaggccacctccggattcgggcgctcggcgtagccgcgcagtggtgtgtctgcctccctccttgtatcctcctcgaattcgagcggcggcgacggcgggaagggagatggaggcggttagaggcgatgggaggtggtgcgtggtgactggcggccgcgggttcgccgcgaggcatctggtgacgatgctgctccgctccggcgagtggcgggtgcgcgtggccgacctgggccctgccatcacgctcgaccgcgacgaagaagagggtttcctgggtgctgctctccgcgaaggccaggccgtctacgtgtccgccgacctccgtgacaaggcccaggtcgccagagcttttgaaggggcagaagtagttttccatatggctgctccagattcatccatcaacaacttccaccttcattatggagtcaatgtcgatggaacaaagaatgttattgacacttgtatccgttgcaaggtgaagagactcatctatactagttcacctagtgtcgtgtttgatggagttcatggaatttttaatgcagatgaatcaatgccttacccagataagaaacgaaagcggatgcagaaaagcttgtgatgagagctaatggtagggaagggcttcttacatgctgtatacgcccaagtagcatttttggccctggtgataagctaatggttccatctttggttgctgctgcaagggcagggaagtccaaatacattattggtgatgggaacaactactatgatttcacctacgtggaaaatgtggcatatggccatgtttgtgcggagaaaactctatcatctgaagatggtgcaaagatagccgctggaaaaacctatttcataacaaatatggagcctataaaattctgggagttcatgtcattgattttagaaggtcttggatatgaaaggccttcagtaaaaataccagtctctgttatgatgccggtggctcatgttgtagaatggacttaccagaaatttgccaagtatggaatgaaagttcctcagctgaccccttcaaggatcaggctgctttcatgtaacaggacattcagttgctcaagagcaaaggagcagcttggttatgaacctctcgtgtcccttaaggatggagtgaagagaacagtagagtcgtactcccatctacaagctcagaatcataggagtatatcaaaggcttcaattttcctcgggaatggaaatcttgcaaaaacagtactttgggaagatgcgaagcaaactgtgacagtgcttctactgttggctgttatctactaccacttatttacatgtggttacaccttcatcacagcgatggcaaagcttttgtcactaactgctctgttcttattcattcatggcatgctgccatcaaatctgttcggtcacaaggttgagaaactcgaggcctctaattttcacatcacccaggcacaggctcatcatattgctaattccattagttcgaattggaactctttagtcagtgcgctaagatctctttgtagaggaaatgattggctattgtttctcaaggtttcactatctctgctggttgtcagcatccttagttccatgtcttctcaggctgcatttaaaataggtactgctctggttttcacaggcttcaaagcgtatgagaaatgggaggacagcattgatagtatggtgggcgacgcctgtaccattcttctgcactttggttctgccaaggaatcatctagctagaaacaaacgtaggtgtagcttgcagactgccagttactttgtttactgatattatcttcagctccagctgtttctgggtttcgttgacctaaattttcttctgtattcatctgatggtgttgtagaattgcctagcggcacatatgcaagttttggactcttttcctcttgatagttgatgtacaatatgaaattgtacattttccccctttcccctcggagtggttctcttcccatcaacggtgacaataggctctagtaaagatcgaattggattatgattggactctatttctattcatttttgaactaaaatttatttagagtccaaagaaattgtgaagaaacatttggatcgcgatccattacca

SEQ ID NO: 1978 - DNA, 2236 bp, Zea Mays
cttttattcccattacaacgtgcgcacaaaaagtggcaccaaaactttgaacggtggccatgctggagcgcttccctgtggccaactggccaatggaggagaaatatgaaccaaccaatgacaagtcggacccactggattgacagcctctgacgccgaaaaagccacagatcggatcgcggcgggcagaggccacctccggattcgggcgctcggcgtagccgcgcagtggtgtgtctgcctccctccttgtatcctcctcgaattcgagcggcggcgacggcgggaagggagatggaggcggttagaggcgatgggaggtggtgcgtggtgactggcggccgcgggttcgccgcgaggcatctggtgacgatgctgctccgctccggcgagtggcgggtgcgcgtggccgacctgggccctgccatcacgctcgaccgcgacgaagaagagggtttcctgggtgctgctctccgcgaaggccaggccgtctacgtgtccgccgacctccgtgacaaggcccaggtcgccagagcttttgaaggggcagaagtagttttccatatggctgctccagattcatccatcaacaacttccaccttcattatggagtcaatgtcgatggaacaaagaatgttattgacacttgtatccgttgcaaggtgaagagactcatctatactagttcacctagtgtcgtgtttgatggagttcatggaatttttaatgcagatgaatcaatgccttacccagataagtttaatgattcatattcagaaacgaaagcggatgcagaaaagcttgtgatgagagctaatggtagggaagggcttcttacatgctgtatacgcccaagtagcatttttggccctggtgataagctaatggttccatctttggttgctgctgcaagggcagggaagtccaaatacattattggtgatgggaacaactactatgatttcacctacgtggaaaatgtggcatatggccatgtttgtgcggagaaaactctatcatctgaagatggtgcaaagatagccgctggaaaaacctatttcataacaaatatggagcctataaaattctgggagttcatgtcattgattttagaaggtcttggatatgaaaggccttcagtaaaaataccagtctctgttatgatgccggtggctcatgttgtagaatggacttaccagaaatttgccaagtatggaatgaaagttcctcagctgaccccttcaaggatcaggctgctttcatgtaacaggacattcagttgctcaagagcaaaggagcagcttggttatgaacctctcgtgtcccttaaggatggagtgaagagaacagtagagtcgtactcccatctacaagctcagaatcataggagtatatcaaaggcttcaattttcctcgggaatggaaatcttgcaaaaacagtactttgggaagatgcgaagcaaactgtgacagtgcttctactgttggctgttatctactaccacttatttacatgtggttacaccttcatcacagcgatggcaaagcttttgtcactaactgctctgttcttattcattcatggcatgctgccatcaaatctgttcggtcacaaggttgagaaactcgaggcctctaattttcacatcacccaggcacaggctcatcatattgctaattccattagttcgaattggaactctttagtcagtgcgctaagatctctttgtagaggaaatgattggctattgtttctcaaggcttcaaagcgtatgagaaatgggaggacagcattgatagtatggtgggcgacgcctgtaccattcttctgcactttggttctgccaaggaatcatctagctagaaacaaacgtaggtgtagcttgcagactgccagttactttgtttactgatattatcttcagctccagctgtttctgggtttcgttgacctaaattttcttctgtattcatctgatggtgttgtagaattgcctagcggcacatatgcaagttttggactcttttcctcttgatagttgatgtacaatatgaaattgtacattttccccctttcccctcggagtggttctcttcccatcaacggtgacaataggctctagtaaagatcgaattggattatgattggactctatttctattcatttttgaactaaaatttatttagagtccaaagaaattgtgaagaaacatttggatcgcgatccattacca

SEQ ID NO: 1979 - DNA, 2225 bp, Zea Mays
cttttattcccattacaacgtgcgcacaaaaagtggcaccaaaactttgaacggtggccatgctggagcgcttccctgtggccaactggccaatggaggagaaatatgaaccaaccaatgacaagtcggacccactggattgacagcctctgacgccgaaaaagccacagatcggatcgcggcgggcagaggccacctccggattcgggcgctcggcgtagccgcgcagtggtgtgtctgcctccctccttgtatcctcctcgaattcgagcggcggcgacggcgggaagggagatggaggcggttagaggcgatgggaggtggtgcgtggtgactggcggccgcgggttcgccgcgaggcatctggtgacgatgctgctccgctccggcgagtggcgggtgcgcgtggccgacctgggccctgccatcacgctcgaccgcgacgaagaagagggtttcctgggtgctgctctccgcgaaggccaggccgtctacgtgtccgccgacctccgtgacaaggcccaggtcgccagagcttttgaaggggcagaagtagttttccatatggctgctccagattcatccatcaacaacttccaccttcattatggagtcaatgtcgatggaacaaagaatgttattgacacttgtatccgttgcaaggtgaagagactcatctatactagttcacctagtgtcgtgtttgatggagttcatggaatttttaatgcagatgaatcaatgccttacccagataagtttaatgattcatattcagaaacgaaagcggatgcagaaaagcttgtgatgagagctaatggtagggaagggcttcttacatgctgtatacgcccaagtagcatttttggccctggtgataagctaatggttccatctttggttgctgctgcaagggcagggaagtccaaatacattattggtgatgggaacaactactatgatttcacctacgtggaaaatgtggcatatggccatgtttgtgcggagaaaactctatcatctgaagatggtgcaaagatagccgctggaaaaacctatttcataacaaatatggagcctataaaattctgggagttcatgtcattgattttagaaggtcttggatatgaaaggccttcagtaaaaataccagtctctgttatgatgccggtggctcatgttgtagaatggacttaccagaaatttgccaagtatggaatgaaagttcctcagctgaccccttcaaggatcaggctgctttcatgtaacaggacattcagttgctcaagagcaaaggagcagcttggttatgaacctctcgtgtcccttaaggatggagtgaagagaacagtagagtcgtactcccatctacaagctcagaatcataggagtatatcaaaggcttcaattttcctcgggaatggaaatcttgcaaaaacagtactttgggaagatgcgaagcaaactgtgacagtgcttctactgttggctgttatctactaccacttatttacatgtggttacaccttcatcacagcgatggcaaagcttttgtcactaactgctctgttcttattcattcatggcatgctgccatcaaatctgttcggtcacaaggttgagaaactcgaggcctctaattttcacatcacccaggcacaggctcatcatattgctaattccattagttcgaattggaactctttagtcagtgcgctaagatctctttgtagaggaaatgattggctattgtttctcaaggtttcactatctctgctggttgtcagcatccttagttccatgtcttctcaggctgcatttaaatttggttctgccaaggaatcatctagctagaaacaaacgtaggtgtagcttgcagactgccagttactttgtttactgatattatcttcagctccagctgtttctgggtttcgttgacctaaattttcttctgtattcatctgatggtgttgtagaattgcctagcggcacatatgcaagttttggactcttttcctcttgatagttgatgtacaatatgaaattgtacattttccccctttcccctcggagtggttctcttcccatcaacggtgacaataggctctagtaaagatcgaattggattatgattggactctatttctattcatttttgaactaaaatttatttagagtccaaagaaattgtgaagaaacatttggatcgcgatccattacca

SEQ ID NO: 1980 - DNA, 2207 bp, Zea Mays
cttttattcccattacaacgtgcgcacaaaaagtggcaccaaaactttgaacggtggccatgctggagcgcttccctgtggccaactggccaatggaggagaaatatgaaccaaccaatgacaagtcggacccactggattgacagcctctgacgccgaaaaagccacagatcggatcgcggcgggcagaggccacctccggattcgggcgctcggcgtagccgcgcagtggtgtgtctgcctccctccttgtatcctcctcgaattcgagcggcggcgacggcgggaagggagatggaggcggttagaggcgatgggaggtggtgcgtggtgactggcggccgcgggttcgccgcgaggcatctggtgacgatgctgctccgctccggcgagtggcgggtgcgcgtggccgacctgggccctgccatcacgctcgaccgcgacgaagaagagggtttcctgggtgctgctctccgcgaaggccaggccgtctacgtgtccgccgacctccgtgacaaggcccaggtcgccagagcttttgaaggggcagaagtagttttccatatggctgctccagattcatccatcaacaacttccaccttcattatggagtcaatgtcgatggaacaaagaatgttattgacacttgtatccgttgcaaggtgaagagactcatctatactagttcacctagtgtcgtgtttgatggagttcatggaatttttaatgcagatgaatcaatgccttacccagataagtttaatgattcatattcagaaacgaaagcggatgcagaaaagcttgtgatgagagctaatggtagggaagggcttcttacatgctgtatacgcccaagtagcatttttggccctggtgataagctaatggttccatctttggttgctgctgcaagggcagggaagtccaaatacattattggtgatgggaacaactactatgatttcacctacgtggaaaatgtggcatatggccatgtttgtgcggagaaaactctatcatctgaagatggtgcaaagatagccgctggaaaaacctatttcataacaaatatggagcctataaaattctgggagttcatgtcattgattttagaaggtcttggatatgaaaggccttcagtaaaaataccagtctctgttatgatgccggtggctcatgttgtagaatggacttaccagaaatttgccaagtatggaatgaaagttcctcagctgaccccttcaaggatcaggctgctttcatgtaacaggacattcagttgctcaagagcaaaggagcagcttggttatgaacctctcgtgtcccttaaggatggagtgaagagaacagtagagtcgtactcccatctacaagctcagaatcataggagtatatcaaaggcttcaattttcctcgggaatggaaatcttgcaaaaacagtactttgggaagatgcgaagcaaactgtgacagtgcttctactgttggctgttatctactaccacttatttacatgtggttacaccttcatcacagcgatggcaaagcttttgtcactaactgctctgttcttattcattcatggcatgctgccatcaaatctgttcggtcacaaggttgagaaactcgaggcctctaattttcacatcacccaggcacaggctcatcatattgctaattccattagttcgaattggaactctttagtcagtgcgctaagatctctttgtagaggaaatgattggctattgtttctcaaggtttcactatctctgctggttgtcagcatccttagttccatgtcttctcaggctgcatttaaaataggtactgctctggttttcacaggcttcaaagcgtatgagaaatgggaggacagcattgatagtatggtgggcgacgcctgtaccattcttctgcactttggttctgccaaggaatcatctagctagaaacaaacaattgcctagcggcacatatgcaagttttggactcttttcctcttgatagttgatgtacaatatgaaattgtacattttccccctttcccctcggagtggttctcttcccatcaacggtgacaataggctctagtaaagatcgaattggattatgattggactctatttctattcatttttgaactaaaatttatttagagtccaaagaaattgtgaagaaacatttggatcgcgatccattacca

SEQ ID NO: 1981 - DNA, 2286 bp, Zea Mays
cttttattcccattacaacgtgcgcacaaaaagtggcaccaaaactttgaacggtggccatgctggagcgcttccctgtggccaactggccaatggaggagaaatatgaaccaaccaatgacaagtcggacccactggattgacagcctctgacgccgaaaaagccacagatcggatcgcggcgggcagaggccacctccggattcgggcgctcggcgtagccgcgcagtggtgtgtctgcctccctccttgtatcctcctcgaattcgagcggcggcgacggcgggaagggagatggaggcggttagaggcgatgggaggtggtgcgtggtgactggcggccgcgggttcgccgcgaggcatctggtgacgatgctgctccgctccggcgagtggcgggtgcgcgtggccgacctgggccctgccatcacgctcgaccgcgacgaagaagagggtttcctgggtgctgctctccgcgaaggccaggccgtctacgtgtccgccgacctccgtgacaaggcccaggtcgccagagcttttgaaggggcagaagtagttttccatatggctgctccagattcatccatcaacaacttccaccttcattatggagtcaatgtcgatggtgaagagactcatctatactagttcacctagtgtcgtgtttgatggagttcatggaatttttaatgcagatgaatcaatgccttacccagataagtttaatgattcatattcagaaacgaaagcggatgcagaaaagcttgtgatgagagctaatggtagggaagggcttcttacatgctgtatacgcccaagtagcatttttggccctggtgataagctaatggttccatctttggttgctgctgcaagggcagggaagtccaaatacattattggtgatgggaacaactactatgatttcacctacgtggaaaatgtggcatatggccatgtttgtgcggagaaaactctatcatctgaagatggtgcaaagatagccgctggaaaaacctatttcataacaaatatggagcctataaaattctgggagttcatgtcattgattttagaaggtcttggatatgaaaggccttcagtaaaaataccagtctctgttatgatgccggtggctcatgttgtagaatggacttaccagaaatttgccaagtatggaatgaaagttcctcagctgaccccttcaaggatcaggctgctttcatgtaacaggacattcagttgctcaagagcaaaggagcagcttggttatgaacctctcgtgtcccttaaggatggagtgaagagaacagtagagtcgtactcccatctacaagctcagaatcataggagtatatcaaaggcttcaattttcctcgggaatggaaatcttgcaaaaacagtactttgggaagatgcgaagcaaactgtgacagtgcttctactgttggctgttatctactaccacttatttacatgtggttacaccttcatcacagcgatggcaaagcttttgtcactaactgctctgttcttattcattcatggcatgctgccatcaaatctgttcggtcacaaggttgagaaactcgaggcctctaattttcacatcacccaggcacaggctcatcatattgctaattccattagttcgaattggaactctttagtcagtgcgctaagatctctttgtagaggaaatgattggctattgtttctcaaggtttcactatctctgctggttgtcagcatccttagttccatgtcttctcaggctgcatttaaaataggtactgctctggttttcacaggcttcaaagcgtatgagaaatgggaggacagcattgatagtatggtgggcgacgcctgtaccattcttctgcactttggttctgccaaggaatcatctagctagaaacaaacgtaggtgtagcttgcagactgccagttactttgtttactgatattatcttcagctccagctgtttctgggtttcgttgacctaaattttcttctgtattcatctgatggtgttgtagaattgcctagcggcacatatgcaagttttggactcttttcctcttgatagttgatgtacaatatgaaattgtacattttccccctttcccctcggagtggttctcttcccatcaacggtgacaataggctctagtaaagatcgaattggattatgattggactctatttctattcatttttgaactaaaatttatttagagtccaaagaaattgtgaagaaacatttggatcgcgatccattacca

SEQ ID NO: 1982 - DNA, 1128 bp, Zea Mays
tgcctctcttcaatcggggcttcggcgtcagcgtctcagcgaccagaacaatcaccaccgtccgtccgtcccgttcctcttctcgcaggttggacccgtcagtcacacacctccgaagtcggaacctccctgccccaacacaatggcctcctccctcgccgcgcgccgcctcctctcccgcgcagccgccgtgcatggggtggagcgagtcggccatggtcgcgggggcgagggacgttggcgtgtcccctgccatcgtgggcgcatttccaaggaaggaggccgcccttgtggagtttttcatggatgactgcctccaacaactgatggatcgaattgatgctggagaaggagagcagttgaagaacttgatactgagtgagagactctcaaaacttgttcggatgaggctggaaatgcaggcaccttatatatctaagtggcctcaagcactgagtattcagtctcaaccagcaaacgtctcaacaagcttgaagcagcgagctatcctggtggatgagatatggcatgctgctggagattctgggtcagatattgattggtatgtgaaacgtacagtgcttggtggtatctactcaacctcagaggtgtatatgttgacagacaattctccagcaaggattgaaacgaaagtgtttcactgtttcggagttccgtgatacttggacgtttgtgaaccgcagaataaaggatgctcttgatcttcagaaaaccttccaagaggccgcatacctcgctgaagccgtgggagcaggcatgagcggtaccgtgcagggtgttctcaacagggtcttccagaaccgtagtggatgaactttctttttctcaaacacgtagtgtggatggactaattccgtcttttgcacgctgcacaggataaagcacattttcccgttgaccaactggcgtatgtttataataaagcaaatggtgatgtggttgagatgcatcacgttagggtaggaagtgacgatgtgtatgctggtggtggtgttgaggtgcagatttttcaaatgaatgctttcgtcgcggagtccagtccacacgcatgcgtgcaaagacgtggggcttattataatttgatgccagctgcatgcattacttgcc

SEQ ID NO: 1983 - DNA, 1418 bp, Zea Mays
tgcctctcttcaatcggggcttcggcgtcagcgtctcagcgaccagaacaatcaccaccgtccgtccgtcccgttcctcttctcgcaggttggacccgtcagtcacacacctccgaagtcggaacctccctgccccaacacaatggcctcctccctcgccgcgcgccgcctcctctcccgcgcagccgccgtgcgccgtttccccgtccccttcgcctccgccccagcccccgcgatggctccccgcagtttctccgccgacgcgggaccgcctccgccgctcccgccaccgccgccgcagcccgtcgtcgagccgcccacgtcggagggcgcgggtgcctcgtcctcctccaccaccgctggtgccggaggggcccacaggtcgtcgccgggagccgcggcgggggcgcggcgccagggtggtgcgggctacgaggaggagcaggagaaggtcctccgcgcgtcgctgctccacgtgccgcgcatggggtggagcgagtcggccatggtcgcgggggcgagggacgttggcgtgtcccctgccatcgtgggcgcatttccaaggaaggaggccgcccttgtggagtttttcatggatgactgcctccaacaactgatggatcgaattgatgctggagaaggagagcagttgaagaacttgatactgagtgagagactctcaaaacttgttcggatgaggctggaaatgcaggcaccttatatatctaagtggcctcaagcactgagtattcagtctcaaccagcaaacgtctcaacaagcttgaagcagcgagctatcctggtggatgagatatggcatgctgctggagattctgggtcagatattgattggtatgtgaaacgtacagtgcttggtggtatctactcaacctcagaggtgtatatgttgacagacaattctccagcaaggattgaaacgaaagtgtttcactgtttcggagttccgtgatacttggacgtttgtgaaccgcagaataaaggatgctcttgatcttcagaaaaccttccaagaggccgcatacctcgctgaagccgtgggagcaggcatgagcggtaccgtgcagggtgttctcaacagggtcttccagaaccgtagtggatgaactttctttttctcaaacacgtagtgtggatggactaattccgtcttttgcacgctgcacaggataaagcacattttcccgttgaccaactggcgtatgtttataataaagcaaatggtgatgtggttgagatgcatcacgttagggtaggaagtgacgatgtgtatgctggtggtggtgttgaggtgcagatttttcaaatgaatgctttcgtcgcggagtccagtccacacgcatgcgtgcaaagacgtggggcttattataatttgatgccagctgcatgcattacttgcc

SEQ ID NO: 1984 - DNA, 1024 bp, Zea Mays
tgatgaataagaaagagagaaggaagactgaaaacgggaaagctatatttagttggatggcaacatcatcgagggatgggctaagttttcaagttttaatacttctagtttttcatggatgactgcctccaacaactgatggatcgaattgatgctggagaaggagagcagttgaagaacttgatactgagtgagagactctcaaaacttgttcggatgaggctggaaatgcaggcaccttatatatctaagtggcctcaagcactgagtattcagtctcaaccagcaaacgtctcaacaagcttgaagcagcgagctatcctggtggatgagatatggcatgctgctggagattctgggtcagatattgattggtatgtgaaacgtacagtgcttggtggtatctactcaacctcagaggtgtatatgttgacagacaattctccaggtttgcagttctcaatagctctatgttggtttccatttcttgctacatactgaagttaattttacccctgcaacaacttaacagcaaggattgaaacgaaagtgtttcactgtttcggagttccgtgatacttggacgtttgtgaaccgcagaataaaggatgctcttgatcttcagaaaaccttccaagaggccgcatacctcgctgaagccgtgggagcaggcatgagcggtaccgtgcagggtgttctcaacagggtcttccagaaccgtagtggatgaactttctttttctcaaacacgtagtgtggatggactaattccgtcttttgcacgctgcacaggataaagcacattttcccgttgaccaactggcgtatgtttataataaagcaaatggtgatgtggttgagatgcatcacgttagggtaggaagtgacgatgtgtatgctggtggtggtgttgaggtgcagatttttcaaatgaatgctttcgtcgcggagtccagtccacacgcatgcgtgcaaagacgtggggcttattataatttgatgccagctgcatgcattacttgcc

SEQ ID NO: 1985 - DNA, 1305 bp, Zea Mays
gctatatttagttggatggcaacatcatcgagggatgggctaagttttcaagttttaatacttctagtttttcatggatgactgcctccaacaactgatggatcgaattgatgctggagaaggagagcagttgaagaacttgatactgagtgagagactctcaaaacttgttcggatgaggctggaaatgcaggcaccttatatatctaagtggcctcaagcactgagtattcagtctcaaccagcaaacgtctcaacaagcttgaagcagcgagctatcctggtggatgagatatggcatgctgctggagattctgggtcagatattgattggtatgtgaaacgtacagtgcttggtggtatctactcaacctcagaggtgtatatgttgacagacaattctccaggtttgcagttctcaatagctctatgttggtttccatttcttgctacatactgaagttaattttacccctgcaacaacttaacagcaaggattgaaacgaaagtgtttcactgtttcgggtaaactagctgaactgaaagcctcacttttttgcccgtttattttgttgtttttgttactgtacagcactacagctgaagcatggaacacaagcagtactaaactgaaatacagatatttttgcttgttcagtgttgaaaaagcacaagatataattaatgatatggtttcttgccttgtttgctgtcttctactaaattttagaaaacatgaattcgaagtattatgagatgctagactgtcaagatgtagtgctatttgtatgactgcataccagtgttcacatgttaatgtattgttcctacttatggcacatggcagagttccgtgatacttggacgtttgtgaaccgcagaataaaggatgctcttgatcttcagaaaaccttccaagaggccgcatacctcgctgaagccgtgggagcaggcatgagcggtaccgtgcagggtgttctcaacagggtcttccagaaccgtagtggatgaactttctttttctcaaacacgtagtgtggatggactaattccgtcttttgcacgctgcacaggataaagcacattttcccgttgaccaactggcgtatgtttataataaagcaaatggtgatgtggttgagatgcatcacgttagggtaggaagtgacgatgtgtatgctggtggtggtgttgaggtgcagatttttcaaatgaatgctttcgtcgcggagtccagtccacacgcatgcgtgcaaagacgtggggcttattataatttgatgccagctgcatgcattacttgcc

SEQ ID NO: 1986 - DNA, 465 bp, Zea Mays
actaatgggttcgagctgcaaagcctgactgttaggaactgaaagtggatttgctttacctttttgcacttgtttgttctgcaagactgatattttgagttccaacttttatcgcacactattttaaaggacaccattcattatttttaccattagaataaaatccctataaaacgtggccatgcaatcactggttgtaaactgatggggcagaatgttgtaggatggattgggtcaagaactaataaagcttacttatgacaatgtagtaattcatgaagttattgttccttatgttcatggagtttgttctgcaagttttttccccatctatggttgagcagaggttcctggagaccatgaaggccatacagggggcactgatagtgtcctcaagcattcagatcattctgggctacagccagctgtggggtattttctccagcccagtggggatgactccag

SEQ ID NO: 1987 - DNA, 2208 bp, Zea Mays
tcttgcaaccgaaggaaccaaaccaggcggccaagccgcggacccccgcatccccggtgcggcgcagcggttcctgcctcgtgcacgtctgtataacccgacggagcgggcgcccgaggacgacgagggaggaaggcagccagtcagccagaggaacctagagccagtcccgtcccgtccatcagccgccacaccacaaacacccaccactctgctctcgcccgcttgctttctctcccccgctccagcttatggcggaggcggcgccagcagccggcggcggcatcggggacatcctcgccacgagcgatcgggacttcctcgtccgcaactccggcgagcaggaggttcacgcccaagcttattgaagtatacgaaaaactggcctcacagggcaagagcttcgaggtcgtctttgcttcggccgatcgcaatgaggaagctttcaatgaatactttgcaaagatgccatggttggctgtccccttttctgacagtgaaggccgtgaggcccttgatggccagttcaaggtctctggtatcccacacctggtcatccttgatgcaaaaactggtgaagtttacactgaagatggtgttgaattcgtgagtgagtatggcgtggaggcttaccctttcacaccagatcggatcaatgaactgaaggaacaggaaaaggcagaaaaggagaatcaaactattcaaagcgtgcttggcacatctactcgagactatctcatttcaaacaagggagacaaggtacccatctctgagcttgaggggaagtatgttggtctttgctttgtggtggatggctttccaccactcgctgaattcactgaggtgcttgctaagatctatgagaaactcaaagaagtgggagagaaatttgaagttgtagctgtatccttggacagtgaagagtcatcatttaatgagagttttgcaaagatgccttggcttgcaattcctcaaggtgacattaagtgtcagacgctggttcgttactttgagcttagttctcttccaacactagttctgattggccctgatgggaagacactgaacaacaatgtcgccgacataattgacgaccatggttttgaggcatgggagggcttccccttcagtgctgagaagctggaaattcttgctgagaaggcaaagattaaagctgcatcacagaccttggagtccattctaatcagtggtcatttagactttgtcattggaaaagatggtgcaaaggttcctgtatcagaacttgttgggaagactgtccttgtttacttctcagcaaaatggtgcccaccatgccgtgccttcctgcccacacttgtcaaggagtacaacaagatcaaagagaagaacagtgattttgagatcgtcttcatctctagtgacgaggatcagagctcattcgatgattttttctctgaaatgccatggcttgctgtaccctgggaagatgaaaggaaagcatcgctgaagaaaaccttcaagatccgtggaatcccttcacttgtcgccatcggacctactgggcagacagtcagcagggacgcaaagtcccagctgatgatccacggtgctgatgctttcccattcaccgaggagagacttgaggagctacagaagaagctggatgagatggcgaaggggtggcctcagaagctgaagcatgagctgcatgacgagcacgaacttgtcctgctgcgccgtggtacgtaccgctgtgatggttgtaacgagatgggcagcagctggtcctacaggtgcgacgagtgtgactttgacctgcaccccaagtgcgcgttgggtgaggaaaagatgggcgaggaagcccctgctgggtatgtgtgcgagggaggcgtgtgcaggaaggcctaatctgaatgctgtgaaggatgacaataatcgtgagatggctgtgttttgatgtaaggtttttcggccgttgatgtttgtgtgttaataaatagtagttgcaggagcaaatgtgtgtatgcaaaactatgtgagtattgtgtcagatcaaagtaatggttttgctgcatggtatttctggtcttaatcatatgatgttgttggcatttttttgccttatattcctgcaatcttgcatgctagacattgttttggttttcgatcgacatgttcggatttgggaaggatggtcaggaatgaagtgattagtttggtagttcg

SEQ ID NO: 1988 - DNA, 2384 bp, Zea Mays
gtacggccgcgcgcggggtgctccacgcgtccagcgcgagccaggcgtccttcctttccttctccccgccgtcgtcgtgtcctcatccagccgtgcaggcagtggcggtggaccggagatctccgctccagctccgattgagcccaagagaagtcgttggtgcagacagccttggattggatgtggaatgaggcgatggcatctgacggatcatcctcctctaccttccgggggttgtacggcaacgtccacggcccggcggtgctcactggcgcggcgttcgcgctcgtggcgctcctcatctcgctctggctcatcctgcagcacctcagatcctacagcgatccagctgaacagaagtggatcatagctgtgctgttcatggtgcctgtttatgcctgcgaatcgataatctcactgtggaactcgaagctctctctggcctgtgatatattacggaattgttacgaagcctttgctctgtacgccttcggacgatacttggtggcttgccttgttctctagagggatcgaatcgctgtagtgtaatcttgtgatgatcagctacgtacatatctatgctctccccactcgccacagctctctgaattaacagctgtgtgctcacttcttgttacatgactactacacttgaggcggggaacggcaagtgttccgtctgcttgagagcaggaagagggacgagctgagccaggagttgctagacaaggcacgagctcgtaaccgcggcggagcgtacagtttcttctgtgaccctgacgctctgggagagaacctgtacacgattataaagttcggccttgttcaatacatgattctcaagacactatgcgctctcttggcgttggtcttggagccttttggagcctatggagatggcgaattcaagtggaattacgggtatccttacattgccgctgtcataaacttcagccagacatgggccttgtattgccttgtgaagttttacaacgcgacgcatgaaaagctacaggcgataaggccactagccaagttcataagctttaaggccatcgtgtttgccacttggtggcagggagtcggcattgcgatcatctgccaaactggactcctgcccaaagagggcaaagtgcagaacgcgctacaggacttcctcatctgcatcgagtgtagatggctatcgcagcggtagcgcatgcctacgtcttcaccgtggagccgtaccagcacgtccctgctctacctcctgatcacggggaagtcatgtgtcaggaaagcaaaatggaggtggaggtggatgtcgacgacgatacaggcggtacaccagcttccattgcgcagcaggagacccatgtcgaagctccaggagggacgagcatcaaggagagcgtgcaggatgtcgtcctcggcggcggccagcatgttgtcaaggatgtcgcgcttacgatctcacaagcgatcgggcccgtggaaaagggcgtcgggaagatccaggagaaattccaccacatctcgctgaagccaggggacaagaaagagcctcaagttgctgtggaggagcacgtaactgagaacgtggtggatggcaaacctgctgttgcggtcaacgcggaggttgaagtccaacagaaggcgcaggatcgtcgtggcgaggaagaaggtgtgcaactcaaaagaacagagaaggaaggacgattgtcacacctgagagtgccatggtggaagatgcaaaggaagcgggagcaggtgcaggagcaagcggagtcgaaggctgaagctgtgcgagggccggacggtgaacaggggtgattgtgttggcctgcatctaaatgggctgtaagaccaactccagcagcctccgtatacggctctccatccccttttttcactgcgcagtacactattcatcagtccagcagactccgtatccctctccctaaaaagcacgctgtgtacttatactcctcttttccacgtcttctctcctctccgtacaagtctgagaaatggtgcaattaaaagccccgatagagtgtaaatacggagtctgttggaatgcaccatgcaaaaaaaccactttatctatgatcacgtctgcttattttacggataccttattttacggatatggagccatgctggagttggtttaagtggtgtgtggatgaattgtggagtgtgtcggcccaacagggtcagttctggtgtttaaaggagttgtaacagacttaagagagaaattaagaagaaaatagagaactcaccacagaacgttgcgtcgaccctctctggcggcgaaaacgtgctcacgtcccggcgaacctccctcttgccggcggccaggggccatcacaacgatgcagcatcgatctgaaggattt

SEQ ID NO: 1989 - DNA, 2440 bp, Zea Mays
ccgcgcgcggggtgctccacgcgtccagcgcgagccaggcgtccttcctttccttctccccgccgtcgtcgtgtcctcatccagccgtgcaggcagtggcggtggaccggagatctccgctccagctccgattgagcccaagagaagtcgttggtgcagacagccttggattggatgtggaatgaggcgatggcatctgacggatcatcctcctctaccttccgggggttgtacggcaacgtccacggcccggcggtgctcactggcgcggcgttcgcgctcgtggcgctcctcatctcgctctggctcatcctgcagcacctcagatcctacagcgatccagctgaacagaagtggatcatagctgtgctgttcatggtgcctgtttatgcctgcgaatcgataatctcactgtggaactcgaagctctctctggcctgtgatatattacggaattgttacgaagcctttgctctgtacgccttcggacgatacttggtggcttgccttggtatgtaaagcagctgcacagtaataatctgcatatatatatataatcacagcatattttccgttagttctctagagggatcgaatcgctgtagtgtaatcttgtgatgatcagctacgtacatatctatgctctccccactcgccacagctctctgaattaacagctgtgtgctcacttcttgttacatgactactacacttgaggcggggaacggcaagtgttccgtctgcttgagagcaggaagagggacgagctgagccaggagttgctagacaaggcacgagctcgtaaccgcggcggagcgtacagtttcttctgtgaccctgacgctctgggagagaacctgtacacgattataaagttcggccttgttcaatacatgattctcaagacactatgcgctctcttggcgttggtcttggagccttttggagcctatggagatggcgaattcaagtggaattacgggtatccttacattgccgctgtcataaacttcagccagacatgggccttgtattgccttgtgaagttttacaacgcgacgcatgaaaagctacaggcgataaggccactagccaagttcataagctttaaggccatcgtgtttgccacttggtggcagggagtcggcattgcgatcatctgccaaactggactcctgcccaaagagggcaaagtgcagaacgcgctacaggacttcctcatctgcatcgagatggctatcgcagcggtagcgcatgcctacgtcttcaccgtggagccgtaccagcacgtccctgctctacctcctgatcacggggaagtcatgtgtcaggaaagcaaaatggaggtggaggtggatgtcgacgacgatacaggcggtacaccagcttccattgcgcagcaggagacccatgtcgaagctccaggagggacgagcatcaaggagagcgtgcaggatgtcgtcctcggcggcggccagcatgttgtcaaggatgtcgcgcttacgatctcacaagcgatcgggcccgtggaaaagggcgtcgggaagatccaggagaaattccaccacatctcgctgaagccaggggacaagaaagagcctcaagttgctgtggaggagcacgtaactgagaacgtggtggatggcaaacctgctgttgcggtcaacgcggaggttgaagtccaacagaaggcgcaggatcgtcgtggcgaggaagaaggtgtgcaactcaaaagaacagagaaggaaggacgattgtcacacctgagagtgccatggtggaagatgcaaaggaagcgggagcaggtgcaggagcaagcggagtcgaaggctgaagctgtgcgagggccggacggtgaacaggggtgattgtgttggcctgcatctaaatgggctgtaagaccaactccagcagcctccgtatacggctctccatccccttttttcactgcgcagtacactattcatcagtccagcagactccgtatccctctccctaaaaagcacgctgtgtacttatactcctcttttccacgtcttctctcctctccgtacaagtctgagaaatggtgcaattaaaagccccgatagagtgtaaatacggagtctgttggaatgcaccatgcaaaaaaaccactttatctatgatcacgtctgcttattttacggataccttattttacggatatggagccatgctggagttggtttaagtggtgtgtggatgaattgtggagtgtgtcggcccaacagggtcagttctggtgtttaaaggagttgtaacagacttaagagagaaattaagaagaaaatagagaactcaccacagaacgttgcgtcgaccctctctggcggcgaaaacgtgctcacgtcccggcgaacctccctcttgccggcggccaggggccatcacaacgatgcagcatcgatctgaaggattt

SEQ ID NO: 1990 - DNA, 2212 bp, Zea Mays
ctccacgcgtccagcgcgagccaggcgtccttcctttccttctccccgccgtcgtcgtgtcctcatccagccgtgcaggcagtggcggtggaccggagatctccgctccagctccgattgtcgttggtgcagacagccttggattggatgtggaatgaggcgatggcatctgacggatcatcctcctctaccttccgggggttgtacggcaacgtccacggcccggcggtgctcactggcgcggcgttcgcgctcgtggcgctcctcatctcgctctggctcatcctgcagcacctcagatcctacagcgatccagctgaacagaagtggatcatagctgtgctgttcatggtgcctgtttatgcctgcgaatcgataatctcactgtggaactcgaagctctctctggcctgtgatatattacggaattgttacgaagcctttgctctgtacgccttcggacgatacttggtggcttgccttggcggggaacggcaagtgttccgtctgcttgagagcaggaagagggacgagctgagccaggagttgctagacaaggcacgagctcgtaaccgcggcggagcgtacagtttcttctgtgaccctgacgctctgggagagaacctgtacacgattataaagttcggccttgttcaatacatgattctcaagacactatgcgctctcttggcgttggtcttggagccttttggagcctatggagatggcgaattcaagtggaattacgggtatccttacattgccgctgtcataaacttcagccagacatgggccttgtattgccttgtgaagttttacaacgcgacgcatgaaaagctacaggcgataaggccactagccaagttcataagctttaaggccatcgtgtttgccacttggtggcagggagtcggcattgcgatcatctgccaaactggactcctgcccaaagagggcaaagtgcagaacgcgctacaggacttcctcatctgcatcgagtgtagatggctatcgcagcggtagcgcatgcctacgtcttcaccgtggagccgtaccagcacgtccctgctctacctcctgatcacggggaagtcatgtgtcaggaaagcaaaatggaggtggaggtggatgtcgacgacgatacaggcggtacaccagcttccattgcgcagcaggagacccatgtcgaagctccaggagggacgagcatcaaggagagcgtgcaggatgtcgtcctcggcggcggccagcatgttgtcaaggatgtcgcgcttacgatctcacaagcgatcgggcccgtggaaaagggcgtcgggaagatccaggagaaattccaccacatctcgctgaagccaggggacaagaaagagcctcaagttgctgtggaggagcacgtaactgagaacgtggtggatggcaaacctgctgttgcggtcaacgcggaggttgaagtccaacagaaggcgcaggatcgtcgtggcgaggaagaaggtgtgcaactcaaaagaacagagaaggaaggacgattgtcacacctgagagtgccatggtggaagatgcaaaggaagcgggagcaggtgcaggagcaagcggagtcgaaggctgaagctgtgcgagggccggacggtgaacaggggtgattgtgttggcctgcatctaaatgggctgtaagaccaactccagcagcctccgtatacggctctccatccccttttttcactgcgcagtacactattcatcagtccagcagactccgtatccctctccctaaaaagcacgctgtgtacttatactcctcttttccacgtcttctctcctctccgtacaagtctgagaaatggtgcaattaaaagccccgatagagtgtaaatacggagtctgttggaatgcaccatgcaaaaaaaccactttatctatgatcacgtctgcttattttacggataccttattttacggatatggagccatgctggagttggtttaagtggtgtgtggatgaattgtggagtgtgtcggcccaacagggtcagttctggtgtttaaaggagttgtaacagacttaagagagaaattaagaagaaaatagagaactcaccacagaacgttgcgtcgaccctctctggcggcgaaaacgtgctcacgtcccggcgaacctccctcttgccggcggccaggggccatcacaacgatgcagcatcgatctgaaggattt

SEQ ID NO: 1991 - DNA, 2218 bp, Zea Mays
caggcgtccttcctttccttctccccgccgtcgtcgtgtcctcatccagccgtgcaggcagtggcggtggaccggagatctccgctccagctccgattgagcccaagagaagtcgttggtgcagacagccttggattggatgtggaatgaggcgatggcatctgacggatcatcctcctctaccttccgggggttgtacggcaacgtccacggcccggcggtgctcactggcgcggcgttcgcgctcgtggcgctcctcatctcgctctggctcatcctgcagcacctcagatcctacagcgatccagctgaacagaagtggatcatagctgtgctgttcatggtgcctgtttatgcctgcgaatcgataatctcactgtggaactcgaagctctctctggcctgtgatatattacggaattgttacgaagcctttgctctgtacgccttcggacgatacttggtggcttgccttggcggggaacggcaagtgttccgtctgcttgagagcaggaagagggacgagctgagccaggagttgctagacaaggcacgagctcgtaaccgcggcggagcgtacagtttcttctgtgaccctgacgctctgggagagaacctgtacacgattataaagttcggccttgttcaatacgtacgtgacgtgacatgattctcaagacactatgcgctctcttggcgttggtcttggagccttttggagcctatggagatggcgaattcaagtggaattacgggtatccttacattgccgctgtcataaacttcagccagacatgggccttgtattgccttgtgaagttttacaacgcgacgcatgaaaagctacaggcgataaggccactagccaagttcataagctttaaggccatcgtgtttgccacttggtggcagggagtcggcattgcgatcatctgccaaactggactcctgcccaaagagggcaaagtgcagaacgcgctacaggacttcctcatctgcatcgagtgtagatggctatcgcagcggtagcgcatgcctacgtcttcaccgtggagccgtaccagcacgtccctgctctacctcctgatcacggggaagtcatgtgtcaggaaagcaaaatggaggtggaggtggatgtcgacgacgatacaggcggtacaccagcttccattgcgcagcaggagacccatgtcgaagctccaggagggacgagcatcaaggagagcgtgcaggatgtcgtcctcggcggcggccagcatgttgtcaaggatgtcgcgcttacgatctcacaagcgatcgggcccgtggaaaagggcgtcgggaagatccaggagaaattccaccacatctcgctgaagccaggggacaagaaagagcctcaagttgctgtggaggagcacgtaactgagaacgtggtggatggcaaacctgctgttgcggtcaacgcggaggttgaagtccaacagaaggcgcaggatcgtcgtggcgaggaagaaggtgtgcaactcaaaagaacagagaaggaaggacgattgtcacacctgagagtgccatggtggaagatgcaaaggaagcgggagcaggtgcaggagcaagcggagtcgaaggctgaagctgtgcgagggccggacggtgaacaggggtgattgtgttggcctgcatctaaatgggctgtaagaccaactccagcagcctccgtatacggctctccatccccttttttcactgcgcagtacactattcatcagtccagcagactccgtatccctctccctaaaaagcacgctgtgtacttatactcctcttttccacgtcttctctcctctccgtacaagtctgagaaatggtgcaattaaaagccccgatagagtgtaaatacggagtctgttggaatgcaccatgcaaaaaaaccactttatctatgatcacgtctgcttattttacggataccttattttacggatatggagccatgctggagttggtttaagtggtgtgtggatgaattgtggagtgtgtcggcccaacagggtcagttctggtgtttaaaggagttgtaacagacttaagagagaaattaagaagaaaatagagaactcaccacagaacgttgcgtcgaccctctctggcggcgaaaacgtgctcacgtcccggcgaacctccctcttgccggcggccaggggccatcacaacgatgcagcatcgatctgaaggattt

SEQ ID NO: 1992 - DNA, 2620 bp, Zea Mays
cggagatctccgctccagctccgattggtaaggatacccctcttgtatttgcgtggatgcgttgttcgtctccttctctccctgccgccgccactcgaatcctttgtccccctctgtttaaattttttttggggtatttgaactccaatctgtccaacctgtggcgggctcaattcatttgccgcgccgcggagtacttgatctgcagatgatccccccacccaacttcttccgccaagtgttactcaggcgttccctttccctcccctccccctccccctcccctgtggcctgagagctgttctgcagagcccaagagaagtcgttggtgcagacagccttggattggatgtggaatgaggcgatggcatctgacggatcatcctcctctaccttccgggggttgtacggcaacgtccacggcccggcggtgctcactggcgcggcgttcgcgctcgtggcgctcctcatctcgctctggctcatcctgcagcacctcagatcctacagcgatccagctgaacagaagtggatcatagctgtgctgttcatggtgcctgtttatgcctgcgaatcgataatctcactgtggaactcgaagctctctctggcctgtgatatattacggaattgttacgaagcctttgctctgtacgccttcggacgatacttggtggcttgccttggtatgtaaagcagctgcacagtaataatctgcatatatatatataatcacagcatattttccgttagttctctagagggatcgaatcgctgtagtgtaatcttgtgatgatcagctacgtacatatctatgctctccccactcgccacagctctctgaattaacagctgtgtgctcacttcttgttacatgactactacacttgaggcggggaacggcaagtgttccgtctgcttgagagcaggaagagggacgagctgagccaggagttgctagacaaggcacgagctcgtaaccgcggcggagcgtacagtttcttctgtgaccctgacgctctgggagagaacctgtacacgattataaagttcggccttgttcaatacatgattctcaagacactatgcgctctcttggcgttggtcttggagccttttggagcctatggagatggcgaattcaagtggaattacgggtatccttacattgccgctgtcataaacttcagccagacatgggccttgtattgccttgtgaagttttacaacgcgacgcatgaaaagctacaggcgataaggccactagccaagttcataagctttaaggccatcgtgtttgccacttggtggcagggagtcggcattgcgatcatctgccaaactggactcctgcccaaagagggcaaagtgcagaacgcgctacaggacttcctcatctgcatcgagtgtagatggctatcgcagcggtagcgcatgcctacgtcttcaccgtggagccgtaccagcacgtccctgctctacctcctgatcacggggaagtcatgtgtcaggaaagcaaaatggaggtggaggtggatgtcgacgacgatacaggcggtacaccagcttccattgcgcagcaggagacccatgtcgaagctccaggagggacgagcatcaaggagagcgtgcaggatgtcgtcctcggcggcggccagcatgttgtcaaggatgtcgcgcttacgatctcacaagcgatcgggcccgtggaaaagggcgtcgggaagatccaggagaaattccaccacatctcgctgaagccaggggacaagaaagagcctcaagttgctgtggaggagcacgtaactgagaacgtggtggatggcaaacctgctgttgcggtcaacgcggaggttgaagtccaacagaaggcgcaggatcgtcgtggcgaggaagaaggtgtgcaactcaaaagaacagagaaggaaggacgattgtcacacctgagagtgccatggtggaagatgcaaaggaagcgggagcaggtgcaggagcaagcggagtcgaaggctgaagctgtgcgagggccggacggtgaacaggggtgattgtgttggcctgcatctaaatgggctgtaagaccaactccagcagcctccgtatacggctctccatccccttttttcactgcgcagtacactattcatcagtccagcagactccgtatccctctccctaaaaagcacgctgtgtacttatactcctcttttccacgtcttctctcctctccgtacaagtctgagaaatggtgcaattaaaagccccgatagagtgtaaatacggagtctgttggaatgcaccatgcaaaaaaaccactttatctatgatcacgtctgcttattttacggataccttattttacggatatggagccatgctggagttggtttaagtggtgtgtggatgaattgtggagtgtgtcggcccaacagggtcagttctggtgtttaaaggagttgtaacagacttaagagagaaattaagaagaaaatagagaactcaccacagaacgttgcgtcgaccctctctggcggcgaaaacgtgctcacgtcccggcgaacctccctcttgccggcggccaggggccatcacaacgatgcagcatcgatctgaaggattt

SEQ ID NO: 1993 - DNA, 2615 bp, Zea Mays
cggagatctccgctccagctccgattggtaaggatacccctcttgtatttgcgtggatgcgttgttcgtctccttctctccctgccgccgccactcgaatcctttgtccccctctgtttaaattttttttggggtatttgaactccaatctgtccaacctgtggcgggctcaattcatttgccgcgccgcggagtacttgatctgcagatgatccccccacccaacttcttccgccaagtgttactcaggcgttccctttccctcccctccccctccccctcccctgtggcctgagagctgttctgcagagcccaagagaagtcgttggtgcagacagccttggattggatgtggaatgaggcgatggcatctgacggatcatcctcctctaccttccgggggttgtacggcaacgtccacggcccggcggtgctcactggcgcggcgttcgcgctcgtggcgctcctcatctcgctctggctcatcctgcagcacctcagatcctacagcgatccagctgaacagaagtggatcatagctgtgctgttcatggtgcctgtttatgcctgcgaatcgataatctcactgtggaactcgaagctctctctggcctgtgatatattacggaattgttacgaagcctttgctctgtacgccttcggacgatacttggtggcttgccttggtatgtaaagcagctgcacagtaataatctgcatatatatatataatcacagcatattttccgttagttctctagagggatcgaatcgctgtagtgtaatcttgtgatgatcagctacgtacatatctatgctctccccactcgccacagctctctgaattaacagctgtgtgctcacttcttgttacatgactactacacttgaggcggggaacggcaagtgttccgtctgcttgagagcaggaagagggacgagctgagccaggagttgctagacaaggcacgagctcgtaaccgcggcggagcgtacagtttcttctgtgaccctgacgctctgggagagaacctgtacacgattataaagttcggccttgttcaatacatgattctcaagacactatgcgctctcttggcgttggtcttggagccttttggagcctatggagatggcgaattcaagtggaattacgggtatccttacattgccgctgtcataaacttcagccagacatgggccttgtattgccttgtgaagttttacaacgcgacgcatgaaaagctacaggcgataaggccactagccaagttcataagctttaaggccatcgtgtttgccacttggtggcagggagtcggcattgcgatcatctgccaaactggactcctgcccaaagagggcaaagtgcagaacgcgctacaggacttcctcatctgcatcgagatggctatcgcagcggtagcgcatgcctacgtcttcaccgtggagccgtaccagcacgtccctgctctacctcctgatcacggggaagtcatgtgtcaggaaagcaaaatggaggtggaggtggatgtcgacgacgatacaggcggtacaccagcttccattgcgcagcaggagacccatgtcgaagctccaggagggacgagcatcaaggagagcgtgcaggatgtcgtcctcggcggcggccagcatgttgtcaaggatgtcgcgcttacgatctcacaagcgatcgggcccgtggaaaagggcgtcgggaagatccaggagaaattccaccacatctcgctgaagccaggggacaagaaagagcctcaagttgctgtggaggagcacgtaactgagaacgtggtggatggcaaacctgctgttgcggtcaacgcggaggttgaagtccaacagaaggcgcaggatcgtcgtggcgaggaagaaggtgtgcaactcaaaagaacagagaaggaaggacgattgtcacacctgagagtgccatggtggaagatgcaaaggaagcgggagcaggtgcaggagcaagcggagtcgaaggctgaagctgtgcgagggccggacggtgaacaggggtgattgtgttggcctgcatctaaatgggctgtaagaccaactccagcagcctccgtatacggctctccatccccttttttcactgcgcagtacactattcatcagtccagcagactccgtatccctctccctaaaaagcacgctgtgtacttatactcctcttttccacgtcttctctcctctccgtacaagtctgagaaatggtgcaattaaaagccccgatagagtgtaaatacggagtctgttggaatgcaccatgcaaaaaaaccactttatctatgatcacgtctgcttattttacggataccttattttacggatatggagccatgctggagttggtttaagtggtgtgtggatgaattgtggagtgtgtcggcccaacagggtcagttctggtgtttaaaggagttgtaacagacttaagagagaaattaagaagaaaatagagaactcaccacagaacgttgcgtcgaccctctctggcggcgaaaacgtgctcacgtcccggcgaacctccctcttgccggcggccaggggccatcacaacgatgcagcatcgatctgaaggattt

SEQ ID NO: 1994 - DNA, 1486 bp, Zea Mays
aaaacatcaagacaagaaaaatgaatttacctcgtcatagaaattagtggatctcgtgtggccttttccattattattttggagtataagctattatcatgccatctatattactctagcatggtagagcaaaggctatagatattcttgttaatgatcttaaagtctttccgacattcaatgaggagttttataaggagataacacaacttgtcactcttgagaattttaggcatgatagagcaaaggctatagatattcttgtcaatgatcttaaagtattttcgacattcaatgaggagttttataaggagataacacaacttgtgactcttgagaattttagaatgtgaaccgcaagttggcagtacaaacgaactctgaatttgtcatgttctcaaactatccagaactgctgcaatcacatgccactatccacctcgagcagaggtagacaacgatgctctccctactcgcctgctcaccattccgcctaccccctacccgttgtggcgctcgccggaagagcatgaccaccgcgaccatcatgatacggagcggagcaagaatcggaagccgacgcagcaagggtggtatctcagcactgagaattttcaacacgcggttggattttggggtgcaatgacttcaaatgtaaccttccagtcaaggaatgtgctaagcaagaaatttatggtatatccttacatgccttctatttttgagatgaaactaaattagtgcagcaagaatcaaaccaaaggtattgtattcgtatcacctttgtggtcttagaggattctatccacaatctctttctccaactgtatatttcgataaacctaagaacatgcttttgaaacaattagacattcttgaccaaatgaagtttgagatgagcaactcaagctcattagaaatacttacaacagtttagataagatatttgcttattagttaaattttagatgggagttcatattggccaaataaaaaagaactacaaaattataggaacttgacaacagtttaactcttccccagtaaatgtatctgcgaacatatggcatttttagcaaagaagaataattgttttattatccaaatgaggagataaactatctctacttattgtctacattccacatgggatttcatattgcctaaagaaatgatatctcttgtgaagtacaagagcaagaatgttgttcatgtgaaatttgttttcaattttcattccaccttctgctcgtctaactcaattaaatcagttcctaagtctagaaaaagtgcaaacgttgtagaagctatcataatattgcatctacaagaaggttggtaggcagaccaagacgtggaggacagtagcccagtttgctgtcagatcgagcaccacgagacaggacttcctgtcgcaagacagggtcatggatgttgggcatccactcgggctaaagaaaggttgtttacatgaggtttaagtaat

SEQ ID NO: 1995 - DNA, 1318 bp, Zea Mays
cttattcttagtttaacttgggcaaacaaggtcattttcgaaatcagtacaaaatctgggcagattctgatactggactttgaaaaatcataactcctaaactacttaacctatggtcataaaatttttacacaagtaaaataaagaagttatctacaactttcctatataaaatttctacagaaaacatggtttacttctttgaactagctgcataactaaaattggtcatgcagtcccaaacaacaagcattcaatttagttcctattttggttaaccacggcttaccaacatatctatcaaagaattcctcgcctaatcaacaccatcctctgtgttttataacatccatttaattatactcgacatatgtactctctaagcactcctcataaaatttgcacctaatacctaaacttcccctaaaacaacacttctactatccaatcatgacgtcaataaaaatcatggcacacaacccaattatttcatcatacatcaaacacagctacaataataattatctaaccaaaccatttattaacaaaataaccgtagaaacgacttagctcaccacatcatgatccgacttgattttttttttgcaagaacgacgacagcctttgattgaagtcttctatcgaacatctggcgagcgatgcgcatagaccttctcttcatcacccaaccctggggttcctctctccaacaacgccaaggatttcagtccacatcaaacacacaaacacatatagttaatatcaagatgcaggtaccaaatggggatcgaacaaggcatgaacaacaagcctcaccgatgaggaacacaatatgtggactgcgcacaagactggcggggtcgcggataagaaacgacgacaattccttggttctcccatttcgtcgaacacctagagcacgccgaatgggatggacgacgtcgctgccggggctgcgcaggcacgtcgtgagagggcagggcacagagggagggcgagctcgccataggagcagctggaggcggccatgggaaacatcaagagggtggtgccctagcttctggcgtgggggctgatgcccaggagccgagcgtggctaacagaggaggcagtttagtgctgcagcatctgcgtggggagggagcaaggaagggtgccggcgtgtttaggagatggatatgagaagcctccagatcgtagacatgtgctggagtagggcgtgtccgtgtgtgataagaacaaaaggagagagaacgtgtacatgtgacgtgctggatagggagaagggaagaagcatccatcgtatgaataaagggag

SEQ ID NO: 1996 - DNA, 688 bp, Zea Mays
ggactgttggtagagatgaagaattagaagcccctcctagtttagggctcctttgaaatgtaggaattgaaaaacataggaataggaaaaacgtaggattgtatgtgcaaatcagaggattgtaaaacgtagtaatattgagtggaaggttgtttggttggggcaaggaaaaaacgaagggttcattttgcatgaatgtcaagcttggataaaaacaatatcaaatgggtgctttatatgtgtttttctctatttaaatttgggtaggacaagccataatgggccattagttgctagcattagcattccacttctcgtgcttcgcgtgtaggaatttttccaagagctctgagtggatgttagaaatcctatggaatcaacacataaagagataaaatcctatggaatataattggtgcatcatgccagccaaactataggataggaaactttcctattccagcattattccttcaaaattcctgtaatccaaagaagcccttaaggttgttgcagcacaggtcaagtcacatttttttccaatttgtcaatatctccaattgaggaaaatccacctccaatgtctgcccccagttccaaaatcatttatttgctacatggatttccaattgtcaacatctgtaggaaggaagagcggcgtccatggcggggagggccgacggccatg

SEQ ID NO: 1997 - DNA, 2689 bp, Zea Mays
cgaagtctgattatcgtattcgcacgccatcgtcatcctagggccaaggaaacgccaccgctccagtcatatccccgccgcccgcgccgccgaaggccgaaccctcgtcgcctcccctgcccacgcccgccgcctccagcaggaccacaccgccggattcgacttttttgtcctcgccctctccccctcctctcgtctcctttgatggcgtcgaggggaggctcctccggctttatcgagtattttcataacagcacaaagcgtcatggcagcaatagagagaacacaagtcagcaaggcatgaatgctatcagggtgcaaaaagaaatgaaaaaagaatgggcaagacctggaagagttttcaatagaaatattactagaggaggctactctcgaagttcattgcctggagtcacacaggaatttcgtgttgtcaaagataacagaattaaactgaaagaagttagtgagactttgccagaagcatctcagaacggcgattctagcaatgaatgtgctttttcaaatgttagagataaatgctcaaccaaaaagcttgctgcccaacaccacttggttacttgcaatgttaatgggcatggagcggcccatgctgacaatggtatcaaaattgcggctcaagcccatgacaaggaagtcaagccttctattgtccgaaaaatggaacaatatgaagggacacaagcatcattggttggatctcatgcagttcttggaaagggcaaccagaacacggtggacactgcagcatcagggaaaaataattttggtggcgaactttgctgttcttcatcagatccaatccatgtgccctctcctggttctaaatcagctggaacttttggagccataaagcgtgaagttggagtagttggtgctaggcaaaggccagctgatagtgcagcaatatacacatctacttctaatggcttagtcaaagtggtatcagcaccaaaggttagcccacatttggaatggaagcccaaatcagtaagccccagcactgctgcacctcctggtgctccatcacctgttgatgatggaagtaaaacagaagtgtctgctttgtctaagaagctttcacatgctaatgtatcacatgaacatgtcattataccggagcacatcaggataccagattctgaaagaactcatttcatcttcggttcttttgaatctgaaatttatccaaaggcttctttagcagcctattatgatgctgtggctaaagaagacttgaatgatcactctccatcaagcgtggcagcattgggtttcacatcaactgatgggactcttaatgataggatggataatgttggttcctgcagtccacttccacagtcagagcctgctgtttcagtttctgaacatgagcagtcattgacggagtgtgtggatgttcggagccctggtgttgtcggtggaacaaatgagacgatttcaagcaaggtaacacattctcaacctcgactccagcatcaggaagctgcacagaattttaaggcatatgagccagattctggttatgggatgtcatttattactaaagttgatggtgaagcagcccaaggtatagcttattcatctgaggctatggttttacattctgtaaatggctatcagttacctgcatctacagcaactcaacaaccagtgccccagatgttttctcaacaattccaagcacctcagtatccaaactttttgccatatcggcatgttttctcaccacagtttgggtctctaatggttgttccaaactattcaagcaaccatgcatttcctcagttgccacatgccagcagctatctggtaatgccaaatggagcctcacaactagctgccaatggcatgaaatatggatcaaaccatcagtataagcaagtatttcaaggagcccctgctggatatggctacggaaatcataatggttaccctaacggtgttattggcggcacaggtgctattgaggatatgaatatgagtaaatataaggacaactgcctctatgcacccaatccacaggtggaaacagcagatgtatggattcaaagtcagaaagagagtcccaatatgccatctgcaccgttctacaatatggtgggacaaccagtgtctccacatgcagcatacttaccaccacaaagtggccacactgccttcagtcccgccccttcccatcctggtcacttgcagtacccgggctttgtgcatgcactgcagccaacatccatgaccatggtgcagaacccgcagaccatgatacatcagccggctgcaccgccattggcaggaaatctaggcctggacatgtcggccatggttcctggaaatcaagtaggagcgtttcaacataaccagcttgcccatcttggctggaccacacaatccttttgagattttggtgtgcttctatggctggataagtgaaatttcggttccgtgtggatagaacctaattgaagtgatatgctgtaatatgcaggataggcctgatgaataccaggtttttctttgttttaattataaaaggggaaccgttttttcgtgccgttgtgatttgcaagaacgtgtttaatgttcacttccagtttttgttccaaaattttgttgtaagtgctagtttggaaactcaaattctctttcgggattagaatgaccctac

SEQ ID NO: 1998 - DNA, 2552 bp, Zea Mays
gtctgattatcgtattcgcacgccatcgtcatcctagggccaaggaaacgccaccgctccagtcatatccccgccgcccgcgccgccgaaggccgaaccctcgtcgcctcccctgcccacgcccgccgcctccagcaggaccacaccgccggattcgacttttttgtcctcgccctctccccctcctctcgtctcctttgatggcgtcgaggggaggctcctccggctttatcgagtattttcataacagcacaaagcgtcatggcagcaatagagagaacacaagtcagcaaggcatgaatgctatcagggtgcaaaaagaaatgaaaaaagaatgggcaagacctggaagagttttcaatagaaatattactagaggaggctactctcgaagttcattgcctgctcaaccaaaaagcttgctgcccaacaccacttggttacttgcaatgttaatgggcatggagcggcccatgctgacaatggtatcaaaattgcggctcaagcccatgacaaggaagtcaagccttctattgtccgaaaaatggaacaatatgaagggacacaagcatcattggttggatctcatgcagttcttggaaagggcaaccagaacacggtggacactgcagcatcagggaaaaataattttggtggcgaactttgctgttcttcatcagatccaatccatgtgccctctcctggttctaaatcagctggaacttttggagccataaagcgtgaagttggagtagttggtgctaggcaaaggccagctgatagtgcagcaatatacacatctacttctaatggcttagtcaaagtggtatcagcaccaaaggttagcccacatttggaatggaagcccaaatcagtaagccccagcactgctgcacctcctggtgctccatcacctgttgatgatggaagtaaaacagaagtgtctgctttgtctaagaagctttcacatgctaatgtatcacatgaacatgtcattataccggagcacatcaggataccagattctgaaagaactcatttcatcttcggttcttttgaatctgaaatttatccaaaggcttctttagcagcctattatgatgctgtggctaaagaagacttgaatgatcactctccatcaagcgtggcagcattgggtttcacatcaactgatgggactcttaatgataggatggataatgttggttcctgcagtccacttccacagtcagagcctgctgtttcagtttctgaacatgagcagtcattgacggagtgtgtggatgttcggagccctggtgttgtcggtggaacaaatgagacgatttcaagcaaggtaacacattctcaacctcgactccagcatcaggaagctgcacagaattttaaggcatatgagccagattctggttatgggatgtcatttattactaaagttgatggtgaagcagcccaaggtatagcttattcatctgaggctatggttttacattctgtaaatggctatcagttacctgcatctacagcaactcaacaaccagtgccccagatgttttctcaacaattccaagcacctcagtatccaaactttttgccatatcggcatgttttctcaccacagtttgggtctctaatggttgttccaaactattcaagcaaccatgcatttcctcagttgccacatgccagcagctatctggtaatgccaaatggagcctcacaactagctgccaatggcatgaaatatggatcaaaccatcagtataagcaagtatttcaaggagcccctgctggatatggctacggaaatcataatggttaccctaacggtgttattggcggcacaggtgctattgaggatatgaatatgagtaaatataaggacaactgcctctatgcacccaatccacaggtggaaacagcagatgtatggattcaaagtcagaaagagagtcccaatatgccatctgcaccgttctacaatatggtgggacaaccagtgtctccacatgcagcatacttaccaccacaaagtggccacactgccttcagtcccgccccttcccatcctggtcacttgcagtacccgggctttgtgcatgcactgcagccaacatccatgaccatggtgcagaacccgcagaccatgatacatcagccggctgcaccgccattggcaggaaatctaggcctggacatgtcggccatggttcctggaaatcaagtaggagcgtttcaacataaccagcttgcccatcttggctggaccacacaatccttttgagattttggtgtgcttctatggctggataagtgaaatttcggttccgtgtggatagaacctaattgaagtgatatgctgtaatatgcaggataggcctgatgaataccaggtttttctttgttttaattataaaaggggaaccgttttttcgtgccgttgtgatttgcaagaacgtgtttaatgttcacttccagtttttgttccaaaattttgttgtaagtgctagtttggaaactcaaattctctttcgggattagaatgaccctac

SEQ ID NO: 1999 - DNA, 2458 bp, Zea Mays
cgtcatcctagggccaaggaaacgccaccgctccagtcatatccccgccgcccgcgccgccgaaggccgaaccctcgtcgcctcccctgcccacgcccgccgcctccagcaggaccacaccgccggattcgacttttttgtcctcgccctctccccctcctctcgtctcctttgatggcgtcgaggggaggctcctccggctttatcgagtattttcataacagcacaaagcgtcatggcagcaatagagagaacacaagtcagcaaggcatgaatgctatcagggtgcaaaaagaaatgaaaaaagaatgggcaagacctggaagagttttcaatagaaatattactagaggaggctactctcgaagttcattgcctgctcaaccaaaaagcttgctgcccaacaccacttggttacttgcaatgttaatgggcatggagcggcccatgctgacaatggtatcaaaattgcggctcaagcccatgacaaggaagtcaagccttctattgtccgaaaaatggaacaatatgaagggacacaagcatcattggttggatctcatgcagttcttggaaagggcaaccagaacacggtggacactgcagcatcagggaaaaataattttggtggcgaactttgctgttcttcatcagatccaatccatgtgccctctcctggttctaaatcagctggaacttttggagccataaagcgtgaagttggagtagttggtgctaggcaaaggccagctgatagtgcagcaatatacacatctacttctaatggcttagtcaaagtggtatcagcaccaaaggttagcccacatttggaatggaagcccaaatcagtaagccccagcactgctgcacctcctggtgctccatcacctgttgatgatggaagtaaaacagaagtgtctgctttgtctaagaagctttcacatgctaatgtatcacatgaacatgtcattataccggagcacatcaggataccagattctgaaagaactcatttcatcttcggttcttttgaatctgaaatttatccaaaggcttctttagcagcctattatgatgctgtggctaaagaagacttgaatgatcactctccatcaaggatggataatgttggttcctgcagtccacttccacagtcagagcctgctgtttcagtttctgaacatgagcagtcattgacggagtgtgtggatgttcggagccctggtgttgtcggtggaacaaatgagacgatttcaagcaaggtaacacattctcaacctcgactccagcatcaggaagctgcacagaattttaaggcatatgagccagattctggttatgggatgtcatttattactaaagttgatggtgaagcagcccaaggctatggttttacattctgtaaatggctatcagttacctgcatctacagcaactcaacaaccagtgccccagatgttttctcaacaattccaagcacctcagtatccaaactttttgccatatcggcatgttttctcaccacagtttgggtctctaatggttgttccaaactattcaagcaaccatgcatttcctcagttgccacatgccagcagctatctggtaatgccaaatggagcctcacaactagctgccaatggcatgaaatatggatcaaaccatcagtataagcaagtatttcaaggagcccctgctggatatggctacggaaatcataatggttaccctaacggtgttattggcggcacaggtgctattgaggatatgaatatgagtaaatataaggacaactgcctctatgcacccaatccacaggtggaaacagcagatgtatggattcaaagtcagaaagagagtcccaatatgccatctgcaccgttctacaatatggtgggacaaccagtgtctccacatgcagcatacttaccaccacaaagtggccacactgccttcagtcccgccccttcccatcctggtcacttgcagtacccgggctttgtgcatgcactgcagccaacatccatgaccatggtgcagaacccgcagaccatgatacatcagccggctgcaccgccattggcaggaaatctaggcctggacatgtcggccatggttcctggaaatcaagtaggagcgtttcaacataaccagcttgcccatcttggctggaccacacaatccttttgagattttggtgtgcttctatggctggataagtgaaatttcggttccgtgtggatagaacctaattgaagtgatatgctgtaatatgcaggataggcctgatgaataccaggtttttctttgttttaattataaaaggggaaccgttttttcgtgccgttgtgatttgcaagaacgtgtttaatgttcacttccagtttttgttccaaaattttgttgtaagtgctagtttggaaactcaaattctctttcgggattagaatgaccctac

SEQ ID NO: 2000 - DNA, 2567 bp, Zea Mays
cgtcatcctagggccaaggaaacgccaccgctccagtcatatccccgccgcccgcgccgccgaaggccgaaccctcgtcgcctcccctgcccacgcccgccgcctccagcaggaccacaccgccggattcgacttttttgtcctcgccctctccccctcctctcgtctcctttgatggcgtcgaggggaggctcctccggctttatcgagtattttcataacagcacaaagcgtcatggcagcaatagagagaacacaagtcagcaaggcatgaatgctatcagggtgcaaaaagaaatgaaaaaagaatgggcaagacctggaagagttttcaatagaaatattactagaggaggctactctcgaagttcattgcctggagtcacacaggaatttcgtgttgtcaaagataacagaattaaactgaaagaagttagtgagactttgccagaagcatctcagaacggcgattctagcaatgaatgtgctttttcaaatgttagagataaatgctcaaccaaaaagcttgctgcccaacaccacttggttacttgcaatgttaatgggcatggagcggcccatgctgacaatggtatcaaaattgcggctcaagcccatgacaaggaagtcaagccttctattgtccgaaaaatggaacaatatgaagggacacaagcatcattggttggatctcatgcagttcttggaaagggcaaccagaacacggtggacactgcagcatcagggaaaaataattttggtggcgaactttgctgttcttcatcagatccaatccatgtgccctctcctggttctaaatcagctggaacttttggagccataaagcgtgaagttggagtagttggtgctaggcaaaggccagctgatagtgcagcaatatacacatctacttctaatggcttagtcaaagtggtatcagcaccaaaggttagcccacatttggaatggaagcccaaatcagtaagccccagcactgctgcacctcctggtgctccatcacctgttgatgatggaagtaaaacagaagtgtctgctttgtctaagaagctttcacatgctaatgtatcacatgaacatgtcattataccggagcacatcaggataccagattctgaaagaactcatttcatcttcggttcttttgaatctgaaatttatccaaaggcttctttagcagcctattatgatgctgtggctaaagaagacttgaatgatcactctccatcaagtccacttccacagtcagagcctgctgtttcagtttctgaacatgagcagtcattgacggagtgtgtggatgttcggagccctggtgttgtcggtggaacaaatgagacgatttcaagcaaggtaacacattctcaacctcgactccagcatcaggaagctgcacagaattttaaggcatatgagccagattctggttatgggatgtcatttattactaaagttgatggtgaagcagcccaaggctatggttttacattctgtaaatggctatcagttacctgcatctacagcaactcaacaaccagtgccccagatgttttctcaacaattccaagcacctcagtatccaaactttttgccatatcggcatgttttctcaccacagtttgggtctctaatggttgttccaaactattcaagcaaccatgcatttcctcagttgccacatgccagcagctatctggtaatgccaaatggagcctcacaactagctgccaatggcatgaaatatggatcaaaccatcagtataagcaagtatttcaaggagcccctgctggatatggctacggaaatcataatggttaccctaacggtgttattggcggcacaggtgctattgaggatatgaatatgagtaaatataaggacaactgcctctatgcacccaatccacaggtggaaacagcagatgtatggattcaaagtcagaaagagagtcccaatatgccatctgcaccgttctacaatatggtgggacaaccagtgtctccacatgcagcatacttaccaccacaaagtggccacactgccttcagtcccgccccttcccatcctggtcacttgcagtacccgggctttgtgcatgcactgcagccaacatccatgaccatggtgcagaacccgcagaccatgatacatcagccggctgcaccgccattggcaggaaatctaggcctggacatgtcggccatggttcctggaaatcaagtaggagcgtttcaacataaccagcttgcccatcttggctggaccacacaatccttttgagattttggtgtgcttctatggctggataagtgaaatttcggttccgtgtggatagaacctaattgaagtgatatgctgtaatatgcaggataggcctgatgaataccaggtttttctttgttttaattataaaaggggaaccgttttttcgtgccgttgtgatttgcaagaacgtgtttaatgttcacttccagtttttgttccaaaattttgttgtaagtgctagtttggaaactcaaattctctttcgggattagaatgaccctac

SEQ ID NO: 2001 - DNA, 2591 bp, Zea Mays
cgtcatcctagggccaaggaaacgccaccgctccagtcatatccccgccgcccgcgccgccgaaggccgaaccctcgtcgcctcccctgcccacgcccgccgcctccagcaggaccacaccgccggattcgacttttttgtcctcgccctctccccctcctctcgtctcctttgatggcgtcgaggggaggctcctccggctttatcgagtattttcataacagcacaaagcgtcatggcagcaatagagagaacacaagtcagcaaggcatgaatgctatcagggtgcaaaaagaaatgaaaaaagaatgggcaagacctggaagagttttcaatagaaatattactagaggaggctactctcgaagttcattgcctggagtcacacaggaatttcgtgttgtcaaagataacagaattaaactgaaagaagttagtgagactttgccagaagcatctcagaacggcgattctagcaatgaatgtgctttttcaaatgttagagataaatgctcaaccaaaaagcttgctgcccaacaccacttggttacttgcaatgttaatgggcatggagcggcccatgctgacaatggtatcaaaattgcggctcaagcccatgacaaggaagtcaagccttctattgtccgaaaaatggaacaatatgaagggacacaagcatcattggttggatctcatgcagttcttggaaagggcaaccagaacacggtggacactgcagcatcagggaaaaataattttggtggcgaactttgctgttcttcatcagatccaatccatgtgccctctcctggttctaaatcagctggaacttttggagccataaagcgtgaagttggagtagttggtgctaggcaaaggccagctgatagtgcagcaatatacacatctacttctaatggcttagtcaaagtggtatcagcaccaaaggttagcccacatttggaatggaagcccaaatcagtaagccccagcactgctgcacctcctggtgctccatcacctgttgatgatggaagtaaaacagaagtgtctgctttgtctaagaagctttcacatgctaatgtatcacatgaacatgtcattataccggagcacatcaggataccagattctgaaagaactcatttcatcttcggttcttttgaatctgaaatttatccaaaggcttctttagcagcctattatgatgctgtggctaaagaagacttgaatgatcactctccatcaaggatggataatgttggttcctgcagtccacttccacagtcagagcctgctgtttcagtttctgaacatgagcagtcattgacggagtgtgtggatgttcggagccctggtgttgtcggtggaacaaatgagacgatttcaagcaaggtaacacattctcaacctcgactccagcatcaggaagctgcacagaattttaaggcatatgagccagattctggttatgggatgtcatttattactaaagttgatggtgaagcagcccaaggctatggttttacattctgtaaatggctatcagttacctgcatctacagcaactcaacaaccagtgccccagatgttttctcaacaattccaagcacctcagtatccaaactttttgccatatcggcatgttttctcaccacagtttgggtctctaatggttgttccaaactattcaagcaaccatgcatttcctcagttgccacatgccagcagctatctggtaatgccaaatggagcctcacaactagctgccaatggcatgaaatatggatcaaaccatcagtataagcaagtatttcaaggagcccctgctggatatggctacggaaatcataatggttaccctaacggtgttattggcggcacaggtgctattgaggatatgaatatgagtaaatataaggacaactgcctctatgcacccaatccacaggtggaaacagcagatgtatggattcaaagtcagaaagagagtcccaatatgccatctgcaccgttctacaatatggtgggacaaccagtgtctccacatgcagcatacttaccaccacaaagtggccacactgccttcagtcccgccccttcccatcctggtcacttgcagtacccgggctttgtgcatgcactgcagccaacatccatgaccatggtgcagaacccgcagaccatgatacatcagccggctgcaccgccattggcaggaaatctaggcctggacatgtcggccatggttcctggaaatcaagtaggagcgtttcaacataaccagcttgcccatcttggctggaccacacaatccttttgagattttggtgtgcttctatggctggataagtgaaatttcggttccgtgtggatagaacctaattgaagtgatatgctgtaatatgcaggataggcctgatgaataccaggtttttctttgttttaattataaaaggggaaccgttttttcgtgccgttgtgatttgcaagaacgtgtttaatgttcacttccagtttttgttccaaaattttgttgtaagtgctagtttggaaactcaaattctctttcgggattagaatgaccctac

SEQ ID NO: 2002 - DNA, 2639 bp, Zea Mays
cgtcatcctagggccaaggaaacgccaccgctccagtcatatccccgccgcccgcgccgccgaaggccgaaccctcgtcgcctcccctgcccacgcccgccgcctccagcaggaccacaccgccggattcgacttttttgtcctcgccctctccccctcctctcgtctcctttgatggcgtcgaggggaggctcctccggctttatcgagtattttcataacagcacaaagcgtcatggcagcaatagagagaacacaagtcagcaaggcatgaatgctatcagggtgcaaaaagaaatgaaaaaagaatgggcaagacctggaagagttttcaatagaaatattactagaggaggctactctcgaagttcattgcctggagtcacacaggaatttcgtgttgtcaaagataacagaattaaactgaaagaagttagtgagactttgccagaagcatctcagaacggcgattctagcaatgaatgtgctttttcaaatgttagagataaatgctcaaccaaaaagcttgctgcccaacaccacttggttacttgcaatgttaatgggcatggagcggcccatgctgacaatggtatcaaaattgcggctcaagcccatgacaaggaagtcaagccttctattgtccgaaaaatggaacaatatgaagggacacaagcatcattggttggatctcatgcagttcttggaaagggcaaccagaacacggtggacactgcagcatcagggaaaaataattttggtggcgaactttgctgttcttcatcagatccaatccatgtgccctctcctggttctaaatcagctggaacttttggagccataaagcgtgaagttggagtagttggtgctaggcaaaggccagctgatagtgcagcaatatacacatctacttctaatggcttagtcaaagtggtatcagcaccaaaggttagcccacatttggaatggaagcccaaatcagtaagccccagcactgctgcacctcctggtgctccatcacctgttgatgatggaagtaaaacagaagtgtctgctttgtctaagaagctttcacatgctaatgtatcacatgaacatgtcattataccggagcacatcaggataccagattctgaaagaactcatttcatcttcggttcttttgaatctgaaatttatccaaaggcttctttagcagcctattatgatgctgtggctaaagaagacttgaatgatcactctccatcaagcgtggcagcattgggtttcacatcaactgatgggactcttaatgataggatggataatgttggttcctgcagtccacttccacagtcagagcctgctgtttcagtttctgaacatgagcagtcattgacggagtgtgtggatgttcggagccctggtgttgtcggtggaacaaatgagacgatttcaagcaaggtaacacattctcaacctcgactccagcatcaggaagctgcacagaattttaaggcatatgagccagattctggttatgggatgtcatttattactaaagttgatggtgaagcagcccaaggctatggttttacattctgtaaatggctatcagttacctgcatctacagcaactcaacaaccagtgccccagatgttttctcaacaattccaagcacctcagtatccaaactttttgccatatcggcatgttttctcaccacagtttgggtctctaatggttgttccaaactattcaagcaaccatgcatttcctcagttgccacatgccagcagctatctggtaatgccaaatggagcctcacaactagctgccaatggcatgaaatatggatcaaaccatcagtataagcaagtatttcaaggagcccctgctggatatggctacggaaatcataatggttaccctaacggtgttattggcggcacaggtgctattgaggatatgaatatgagtaaatataaggacaactgcctctatgcacccaatccacaggtggaaacagcagatgtatggattcaaagtcagaaagagagtcccaatatgccatctgcaccgttctacaatatggtgggacaaccagtgtctccacatgcagcatacttaccaccacaaagtggccacactgccttcagtcccgccccttcccatcctggtcacttgcagtacccgggctttgtgcatgcactgcagccaacatccatgaccatggtgcagaacccgcagaccatgatacatcagccggctgcaccgccattggcaggaaatctaggcctggacatgtcggccatggttcctggaaatcaagtaggagcgtttcaacataaccagcttgcccatcttggctggaccacacaatccttttgagattttggtgtgcttctatggctggataagtgaaatttcggttccgtgtggatagaacctaattgaagtgatatgctgtaatatgcaggataggcctgatgaataccaggtttttctttgttttaattataaaaggggaaccgttttttcgtgccgttgtgatttgcaagaacgtgtttaatgttcacttccagtttttgttccaaaattttgttgtaagtgctagtttggaaactcaaattctctttcgggattagaatgaccctac

SEQ ID NO: 2003 - DNA, 2587 bp, Zea Mays
cgtcatcctagggccaaggaaacgccaccgctccagtcatatccccgccgcccgcgccgccgaaggccgaaccctcgtcgcctcccctgcccacgcccgccgcctccagcaggaccacaccgccggattcgacttttttgtcctcgccctctccccctcctctcgtctcctttgatggcgtcgaggggaggctcctccggctttatcgagtattttcataacagcacaaagcgtcatggcagcaatagagagaacacaagtcagcaaggcatgaatgctatcagggtgcaaaaagaaatgaaaaaagaatgggcaagacctggaagagttttcaatagaaatattactagaggaggctactctcgaagttcattgcctggagtcacacaggaatttcgtgttgtcaaagataacagaattaaactgaaagaagttagtgagactttgccagaagcatctcagaacggcgattctagcaatgaatgtgctttttcaaatgttagagataaatgctcaaccaaaaagcttgctgcccaacaccacttggttacttgcaatgttaatgggcatggagcggcccatgctgacaatggtatcaaaattgcggctcaagcccatgacaaggaagtcaagccttctattgtccgaaaaatggaacaatatgaagggacacaagcatcattggttggatctcatgcagttcttggaaagggcaaccagaacacggtggacactgcagcatcagggaaaaataattttggtggcgaactttgctgttcttcatcagatccaatccatgtgccctctcctggttctaaatcagctggaacttttggagccataaagcgtgaagttggagtagttggtgctaggcaaaggccagctgatagtgcagcaatatacacatctacttctaatggcttagtcaaagtggtatcagcaccaaaggttagcccacatttggaatggaagcccaaatcagtaagccccagcactgctgcacctcctggtgctccatcacctgttgatgatggaagtaaaacagaagtgtctgctttgtctaagaagctttcacatgctaatgtatcacatgaacatgtcattataccggagcacatcaggataccagattctgaaagaactcatttcatcttcggttcttttgaatctgaaatttatccaaaggcttctttagcagcctattatgatgctgtggctaaagaagacttgaatgatcactctccatcaagtccacttccacagtcagagcctgctgtttcagtttctgaacatgagcagtcattgacggagtgtgtggatgttcggagccctggtgttgtcggtggaacaaatgagacgatttcaagcaaggtaacacattctcaacctcgactccagcatcaggaagctgcacagaattttaaggcatatgagccagattctggttatgggatgtcatttattactaaagttgatggtgaagcagcccaaggtatagcttattcatctgaggctatggttttacattctgtaaatggctatcagttacctgcatctacagcaactcaacaaccagtgccccagatgttttctcaacaattccaagcacctcagtatccaaactttttgccatatcggcatgttttctcaccacagtttgggtctctaatggttgttccaaactattcaagcaaccatgcatttcctcagttgccacatgccagcagctatctggtaatgccaaatggagcctcacaactagctgccaatggcatgaaatatggatcaaaccatcagtataagcaagtatttcaaggagcccctgctggatatggctacggaaatcataatggttaccctaacggtgttattggcggcacaggtgctattgaggatatgaatatgagtaaatataaggacaactgcctctatgcacccaatccacaggtggaaacagcagatgtatggattcaaagtcagaaagagagtcccaatatgccatctgcaccgttctacaatatggtgggacaaccagtgtctccacatgcagcatacttaccaccacaaagtggccacactgccttcagtcccgccccttcccatcctggtcacttgcagtacccgggctttgtgcatgcactgcagccaacatccatgaccatggtgcagaacccgcagaccatgatacatcagccggctgcaccgccattggcaggaaatctaggcctggacatgtcggccatggttcctggaaatcaagtaggagcgtttcaacataaccagcttgcccatcttggctggaccacacaatccttttgagattttggtgtgcttctatggctggataagtgaaatttcggttccgtgtggatagaacctaattgaagtgatatgctgtaatatgcaggataggcctgatgaataccaggtttttctttgttttaattataaaaggggaaccgttttttcgtgccgttgtgatttgcaagaacgtgtttaatgttcacttccagtttttgttccaaaattttgttgtaagtgctagtttggaaactcaaattctctttcgggattagaatgaccctac

SEQ ID NO: 2004 - DNA, 2478 bp, Zea Mays
cgtcatcctagggccaaggaaacgccaccgctccagtcatatccccgccgcccgcgccgccgaaggccgaaccctcgtcgcctcccctgcccacgcccgccgcctccagcaggaccacaccgccggattcgacttttttgtcctcgccctctccccctcctctcgtctcctttgatggcgtcgaggggaggctcctccggctttatcgagtattttcataacagcacaaagcgtcatggcagcaatagagagaacacaagtcagcaaggcatgaatgctatcagggtgcaaaaagaaatgaaaaaagaatgggcaagacctggaagagttttcaatagaaatattactagaggaggctactctcgaagttcattgcctgctcaaccaaaaagcttgctgcccaacaccacttggttacttgcaatgttaatgggcatggagcggcccatgctgacaatggtatcaaaattgcggctcaagcccatgacaaggaagtcaagccttctattgtccgaaaaatggaacaatatgaagggacacaagcatcattggttggatctcatgcagttcttggaaagggcaaccagaacacggtggacactgcagcatcagggaaaaataattttggtggcgaactttgctgttcttcatcagatccaatccatgtgccctctcctggttctaaatcagctggaacttttggagccataaagcgtgaagttggagtagttggtgctaggcaaaggccagctgatagtgcagcaatatacacatctacttctaatggcttagtcaaagtggtatcagcaccaaaggttagcccacatttggaatggaagcccaaatcagtaagccccagcactgctgcacctcctggtgctccatcacctgttgatgatggaagtaaaacagaagtgtctgctttgtctaagaagctttcacatgctaatgtatcacatgaacatgtcattataccggagcacatcaggataccagattctgaaagaactcatttcatcttcggttcttttgaatctgaaatttatccaaaggcttctttagcagcctattatgatgctgtggctaaagaagacttgaatgatcactctccatcaaggatggataatgttggttcctgcagtccacttccacagtcagagcctgctgtttcagtttctgaacatgagcagtcattgacggagtgtgtggatgttcggagccctggtgttgtcggtggaacaaatgagacgatttcaagcaaggtaacacattctcaacctcgactccagcatcaggaagctgcacagaattttaaggcatatgagccagattctggttatgggatgtcatttattactaaagttgatggtgaagcagcccaaggtatagcttattcatctgaggctatggttttacattctgtaaatggctatcagttacctgcatctacagcaactcaacaaccagtgccccagatgttttctcaacaattccaagcacctcagtatccaaactttttgccatatcggcatgttttctcaccacagtttgggtctctaatggttgttccaaactattcaagcaaccatgcatttcctcagttgccacatgccagcagctatctggtaatgccaaatggagcctcacaactagctgccaatggcatgaaatatggatcaaaccatcagtataagcaagtatttcaaggagcccctgctggatatggctacggaaatcataatggttaccctaacggtgttattggcggcacaggtgctattgaggatatgaatatgagtaaatataaggacaactgcctctatgcacccaatccacaggtggaaacagcagatgtatggattcaaagtcagaaagagagtcccaatatgccatctgcaccgttctacaatatggtgggacaaccagtgtctccacatgcagcatacttaccaccacaaagtggccacactgccttcagtcccgccccttcccatcctggtcacttgcagtacccgggctttgtgcatgcactgcagccaacatccatgaccatggtgcagaacccgcagaccatgatacatcagccggctgcaccgccattggcaggaaatctaggcctggacatgtcggccatggttcctggaaatcaagtaggagcgtttcaacataaccagcttgcccatcttggctggaccacacaatccttttgagattttggtgtgcttctatggctggataagtgaaatttcggttccgtgtggatagaacctaattgaagtgatatgctgtaatatgcaggataggcctgatgaataccaggtttttctttgttttaattataaaaggggaaccgttttttcgtgccgttgtgatttgcaagaacgtgtttaatgttcacttccagtttttgttccaaaattttgttgtaagtgctagtttggaaactcaaattctctttcgggattagaatgaccctac

SEQ ID NO: 2005 - DNA, 2651 bp, Zea Mays
cgtcatcctagggccaaggaaacgccaccgctccagtcatatccccgccgcccgcgccgccgaaggccgaaccctcgtcgcctcccctgcccacgcccgccgcctccagcaggaccacaccgccggattcgacttttttgtcctcgccctctccccctcctctcgtctcctttgatggcgtcgaggggaggctcctccggctttatcgagtattttcataacagcacaaagcgtcatggcagcaatagagagaacacaagtcagcaaggcatgaatgctatcagggtgcaaaaagaaatgaaaaaagaatgggcaagacctggaagagttttcaatagaaatattactagaggaggctactctcgaagttcattgcctggagtcacacaggaatttcgtgttgtcaaagataacagaattaaactgaaagaagttagtgagactttgccagaagcatctcagaacggcgattctagcaatgaatgtgctttttcaaatgttagagataaatgtaccacatctgttcattatgtcgttatcctgtttctgaagctcaaccaaaaagcttgctgcccaacaccacttggttacttgcaatgttaatgggcatggagcggcccatgctgacaatggtatcaaaattgcggctcaagcccatgacaaggaagtcaagccttctattgtccgaaaaatggaacaatatgaagggacacaagcatcattggttggatctcatgcagttcttggaaagggcaaccagaacacggtggacactgcagcatcagggaaaaataattttggtggcgaactttgctgttcttcatcagatccaatccatgtgccctctcctggttctaaatcagctggaacttttggagccataaagcgtgaagttggagtagttggtgctaggcaaaggccagctgatagtgcagcaatatacacatctacttctaatggcttagtcaaagtggtatcagcaccaaaggttagcccacatttggaatggaagcccaaatcagtaagccccagcactgctgcacctcctggtgctccatcacctgttgatgatggaagtaaaacagaagtgtctgctttgtctaagaagctttcacatgctaatgtatcacatgaacatgtcattataccggagcacatcaggataccagattctgaaagaactcatttcatcttcggttcttttgaatctgaaatttatccaaaggcttctttagcagcctattatgatgctgtggctaaagaagacttgaatgatcactctccatcaaggatggataatgttggttcctgcagtccacttccacagtcagagcctgctgtttcagtttctgaacatgagcagtcattgacggagtgtgtggatgttcggagccctggtgttgtcggtggaacaaatgagacgatttcaagcaaggtaacacattctcaacctcgactccagcatcaggaagctgcacagaattttaaggcatatgagccagattctggttatgggatgtcatttattactaaagttgatggtgaagcagcccaaggtatagcttattcatctgaggctatggttttacattctgtaaatggctatcagttacctgcatctacagcaactcaacaaccagtgccccagatgttttctcaacaattccaagcacctcagtatccaaactttttgccatatcggcatgttttctcaccacagtttgggtctctaatggttgttccaaactattcaagcaaccatgcatttcctcagttgccacatgccagcagctatctggtaatgccaaatggagcctcacaactagctgccaatggcatgaaatatggatcaaaccatcagtataagcaagtatttcaaggagcccctgctggatatggctacggaaatcataatggttaccctaacggtgttattggcggcacaggtgctattgaggatatgaatatgagtaaatataaggacaactgcctctatgcacccaatccacaggtggaaacagcagatgtatggattcaaagtcagaaagagagtcccaatatgccatctgcaccgttctacaatatggtgggacaaccagtgtctccacatgcagcatacttaccaccacaaagtggccacactgccttcagtcccgccccttcccatcctggtcacttgcagtacccgggctttgtgcatgcactgcagccaacatccatgaccatggtgcagaacccgcagaccatgatacatcagccggctgcaccgccattggcaggaaatctaggcctggacatgtcggccatggttcctggaaatcaagtaggagcgtttcaacataaccagcttgcccatcttggctggaccacacaatccttttgagattttggtgtgcttctatggctggataagtgaaatttcggttccgtgtggatagaacctaattgaagtgatatgctgtaatatgcaggataggcctgatgaataccaggtttttctttgttttaattataaaaggggaaccgttttttcgtgccgttgtgatttgcaagaacgtgtttaatgttcacttccagtttttgttccaaaattttgttgtaagtgctagtttggaaactcaaattctctttcgggattagaatgaccctac

SEQ ID NO: 2006 - DNA, 2416 bp, Zea Mays
caactccatgccctgtgttaccccccgccactagagttgggaatgggaattgttaatgccagggcctagatatttaatagtattttcataacagcacaaagcgtcatggcagcaatagagagaacacaagtcagcaaggcatgaatgctatcagggtgcaaaaagaaatgaaaaaagaatgggcaagacctggaagagttttcaatagaaatattactagaggaggctactctcgaagttcattgcctgtaccacatctgttcattatgtcgttatcctgtttctgaagctcaaccaaaaagcttgctgcccaacaccacttggttacttgcaatgttaatgggcatggagcggcccatgctgacaatggtatcaaaattgcggctcaagcccatgacaaggaagtcaagccttctattgtccgaaaaatggaacaatatgaagggacacaagcatcattggttggatctcatgcagttcttggaaagggcaaccagaacacggtggacactgcagcatcagggaaaaataattttggtggcgaactttgctgttcttcatcagatccaatccatgtgccctctcctggttctaaatcagctggaacttttggagccataaagcgtgaagttggagtagttggtgctaggcaaaggccagctgatagtgcagcaatatacacatctacttctaatggcttagtcaaagtggtatcagcaccaaaggttagcccacatttggaatggaagcccaaatcagtaagccccagcactgctgcacctcctggtgctccatcacctgttgatgatggaagtaaaacagaagtgtctgctttgtctaagaagctttcacatgctaatgtatcacatgaacatgtcattataccggagcacatcaggataccagattctgaaagaactcatttcatcttcggttcttttgaatctgaaatttatccaaaggcttctttagcagcctattatgatgctgtggctaaagaagacttgaatgatcactctccatcaagcgtggcagcattgggtttcacatcaactgatgggactcttaatgataggatggataatgttggttcctgcagtccacttccacagtcagagcctgctgtttcagtttctgaacatgagcagtcattgacggagtgtgtggatgttcggagccctggtgttgtcggtggaacaaatgagacgatttcaagcaaggtaacacattctcaacctcgactccagcatcaggaagctgcacagaattttaaggcatatgagccagattctggttatgggatgtcatttattactaaagttgatggtgaagcagcccaaggctatggttttacattctgtaaatggctatcagttacctgcatctacagcaactcaacaaccagtgccccagatgttttctcaacaattccaagcacctcagtatccaaactttttgccatatcggcatgttttctcaccacagtttgggtctctaatggttgttccaaactattcaagcaaccatgcatttcctcagttgccacatgccagcagctatctggtaatgccaaatggagcctcacaactagctgccaatggcatgaaatatggatcaaaccatcagtataagcaagtatttcaaggagcccctgctggatatggctacggaaatcataatggttaccctaacggtgttattggcggcacaggtgctattgaggatatgaatatgagtaaatataaggacaactgcctctatgcacccaatccacaggtggaaacagcagatgtatggattcaaagtcagaaagagagtcccaatatgccatctgcaccgttctacaatatggtgggacaaccagtgtctccacatgcagcatacttaccaccacaaagtggccacactgccttcagtcccgccccttcccatcctggtcacttgcagtacccgggctttgtgcatgcactgcagccaacatccatgaccatggtgcagaacccgcagaccatgatacatcagccggctgcaccgccattggcaggaaatctaggcctggacatgtcggccatggttcctggaaatcaagtaggagcgtttcaacataaccagcttgcccatcttggctggaccacacaatccttttgagattttggtgtgcttctatggctggataagtgaaatttcggttccgtgtggatagaacctaattgaagtgatatgctgtaatatgcaggataggcctgatgaataccaggtttttctttgttttaattataaaaggggaaccgttttttcgtgccgttgtgatttgcaagaacgtgtttaatgttcacttccagtttttgttccaaaattttgttgtaagtgctagtttggaaactcaaattctctttcgggattagaatgaccctac

SEQ ID NO: 2007 - DNA, 2475 bp, Zea Mays
catgccctgtgttaccccccgccactagagttgggaatgggaattgttaatgccagggcctagatatttaatagtattttcataacagcacaaagcgtcatggcagcaatagagagaacacaagtcagcaaggcatgaatgctatcagggtgcaaaaagaaatgaaaaaagaatgggcaagacctggaagagttttcaatagaaatattactagaggaggctactctcgaagttcattgcctggagtcacacaggaatttcgtgttgtcaaagataacagaattaaactgaaagaagttagtgagactttgccagaagcatctcagaacggcgattctagcaatgaatgtgctttttcaaatgttagagataaatgctcaaccaaaaagcttgctgcccaacaccacttggttacttgcaatgttaatgggcatggagcggcccatgctgacaatggtatcaaaattgcggctcaagcccatgacaaggaagtcaagccttctattgtccgaaaaatggaacaatatgaagggacacaagcatcattggttggatctcatgcagttcttggaaagggcaaccagaacacggtggacactgcagcatcagggaaaaataattttggtggcgaactttgctgttcttcatcagatccaatccatgtgccctctcctggttctaaatcagctggaacttttggagccataaagcgtgaagttggagtagttggtgctaggcaaaggccagctgatagtgcagcaatatacacatctacttctaatggcttagtcaaagtggtatcagcaccaaaggttagcccacatttggaatggaagcccaaatcagtaagccccagcactgctgcacctcctggtgctccatcacctgttgatgatggaagtaaaacagaagtgtctgctttgtctaagaagctttcacatgctaatgtatcacatgaacatgtcattataccggagcacatcaggataccagattctgaaagaactcatttcatcttcggttcttttgaatctgaaatttatccaaaggcttctttagcagcctattatgatgctgtggctaaagaagacttgaatgatcactctccatcaaggatggataatgttggttcctgcagtccacttccacagtcagagcctgctgtttcagtttctgaacatgagcagtcattgacggagtgtgtggatgttcggagccctggtgttgtcggtggaacaaatgagacgatttcaagcaaggtaacacattctcaacctcgactccagcatcaggaagctgcacagaattttaaggcatatgagccagattctggttatgggatgtcatttattactaaagttgatggtgaagcagcccaaggtatagcttattcatctgaggctatggttttacattctgtaaatggctatcagttacctgcatctacagcaactcaacaaccagtgccccagatgttttctcaacaattccaagcacctcagtatccaaactttttgccatatcggcatgttttctcaccacagtttgggtctctaatggttgttccaaactattcaagcaaccatgcatttcctcagttgccacatgccagcagctatctggtaatgccaaatggagcctcacaactagctgccaatggcatgaaatatggatcaaaccatcagtataagcaagtatttcaaggagcccctgctggatatggctacggaaatcataatggttaccctaacggtgttattggcggcacaggtgctattgaggatatgaatatgagtaaatataaggacaactgcctctatgcacccaatccacaggtggaaacagcagatgtatggattcaaagtcagaaagagagtcccaatatgccatctgcaccgttctacaatatggtgggacaaccagtgtctccacatgcagcatacttaccaccacaaagtggccacactgccttcagtcccgccccttcccatcctggtcacttgcagtacccgggctttgtgcatgcactgcagccaacatccatgaccatggtgcagaacccgcagaccatgatacatcagccggctgcaccgccattggcaggaaatctaggcctggacatgtcggccatggttcctggaaatcaagtaggagcgtttcaacataaccagcttgcccatcttggctggaccacacaatccttttgagattttggtgtgcttctatggctggataagtgaaatttcggttccgtgtggatagaacctaattgaagtgatatgctgtaatatgcaggataggcctgatgaataccaggtttttctttgttttaattataaaaggggaaccgttttttcgtgccgttgtgatttgcaagaacgtgtttaatgttcacttccagtttttgttccaaaattttgttgtaagtgctagtttggaaactcaaattctctttcgggattagaatgaccctac

SEQ ID NO: 2008 - DNA, 2418 bp, Zea Mays
taccccccgccactagagttgggaatgggaattgttaatgccagggcctagatatttaatagtattttcataacagcacaaagcgtcatggcagcaatagagagaacacaagtcagcaaggcatgaatgctatcagggtgcaaaaagaaatgaaaaaagaatgggcaagacctggaagagttttcaatagaaatattactagaggaggctactctcgaagttcattgcctgtaccacatctgttcattatgtcgttatcctgtttctgaagctcaaccaaaaagcttgctgcccaacaccacttggttacttgcaatgttaatgggcatggagcggcccatgctgacaatggtatcaaaattgcggctcaagcccatgacaaggaagtcaagccttctattgtccgaaaaatggaacaatatgaagggacacaagcatcattggttggatctcatgcagttcttggaaagggcaaccagaacacggtggacactgcagcatcagggaaaaataattttggtggcgaactttgctgttcttcatcagatccaatccatgtgccctctcctggttctaaatcagctggaacttttggagccataaagcgtgaagttggagtagttggtgctaggcaaaggccagctgatagtgcagcaatatacacatctacttctaatggcttagtcaaagtggtatcagcaccaaaggttagcccacatttggaatggaagcccaaatcagtaagccccagcactgctgcacctcctggtgctccatcacctgttgatgatggaagtaaaacagaagtgtctgctttgtctaagaagctttcacatgctaatgtatcacatgaacatgtcattataccggagcacatcaggataccagattctgaaagaactcatttcatcttcggttcttttgaatctgaaatttatccaaaggcttctttagcagcctattatgatgctgtggctaaagaagacttgaatgatcactctccatcaagcgtggcagcattgggtttcacatcaactgatgggactcttaatgataggatggataatgttggttcctgcagtccacttccacagtcagagcctgctgtttcagtttctgaacatgagcagtcattgacggagtgtgtggatgttcggagccctggtgttgtcggtggaacaaatgagacgatttcaagcaaggtaacacattctcaacctcgactccagcatcaggaagctgcacagaattttaaggcatatgagccagattctggttatgggatgtcatttattactaaagttgatggtgaagcagcccaaggtatagcttattcatctgaggctatggttttacattctgtaaatggctatcagttacctgcatctacagcaactcaacaaccagtgccccagatgttttctcaacaattccaagcacctcagtatccaaactttttgccatatcggcatgttttctcaccacagtttgggtctctaatggttgttccaaactattcaagcaaccatgcatttcctcagttgccacatgccagcagctatctggtaatgccaaatggagcctcacaactagctgccaatggcatgaaatatggatcaaaccatcagtataagcaagtatttcaaggagcccctgctggatatggctacggaaatcataatggttaccctaacggtgttattggcggcacaggtgctattgaggatatgaatatgagtaaatataaggacaactgcctctatgcacccaatccacaggtggaaacagcagatgtatggattcaaagtcagaaagagagtcccaatatgccatctgcaccgttctacaatatggtgggacaaccagtgtctccacatgcagcatacttaccaccacaaagtggccacactgccttcagtcccgccccttcccatcctggtcacttgcagtacccgggctttgtgcatgcactgcagccaacatccatgaccatggtgcagaacccgcagaccatgatacatcagccggctgcaccgccattggcaggaaatctaggcctggacatgtcggccatggttcctggaaatcaagtaggagcgtttcaacataaccagcttgcccatcttggctggaccacacaatccttttgagattttggtgtgcttctatggctggataagtgaaatttcggttccgtgtggatagaacctaattgaagtgatatgctgtaatatgcaggataggcctgatgaataccaggtttttctttgttttaattataaaaggggaaccgttttttcgtgccgttgtgatttgcaagaacgtgtttaatgttcacttccagtttttgttccaaaattttgttgtaagtgctagtttggaaactcaaattctctttcgggattagaatgaccctac

SEQ ID NO: 2009 - DNA, 2525 bp, Zea Mays
gggaattgttaatgccagggcctagatatttaatagtattttcataacagcacaaagcgtcatggcagcaatagagagaacacaagtcagcaaggcatgaatgctatcagggtgcaaaaagaaatgaaaaaagaatgggcaagacctggaagagttttcaatagaaatattactagaggaggctactctcgaagttcattgcctggagtcacacaggaatttcgtgttgtcaaagataacagaattaaactgaaagaagttagtgagactttgccagaagcatctcagaacggcgattctagcaatgaatgtgctttttcaaatgttagagataaatgtaccacatctgttcattatgtcgttatcctgtttctgaagctcaaccaaaaagcttgctgcccaacaccacttggttacttgcaatgttaatgggcatggagcggcccatgctgacaatggtatcaaaattgcggctcaagcccatgacaaggaagtcaagccttctattgtccgaaaaatggaacaatatgaagggacacaagcatcattggttggatctcatgcagttcttggaaagggcaaccagaacacggtggacactgcagcatcagggaaaaataattttggtggcgaactttgctgttcttcatcagatccaatccatgtgccctctcctggttctaaatcagctggaacttttggagccataaagcgtgaagttggagtagttggtgctaggcaaaggccagctgatagtgcagcaatatacacatctacttctaatggcttagtcaaagtggtatcagcaccaaaggttagcccacatttggaatggaagcccaaatcagtaagccccagcactgctgcacctcctggtgctccatcacctgttgatgatggaagtaaaacagaagtgtctgctttgtctaagaagctttcacatgctaatgtatcacatgaacatgtcattataccggagcacatcaggataccagattctgaaagaactcatttcatcttcggttcttttgaatctgaaatttatccaaaggcttctttagcagcctattatgatgctgtggctaaagaagacttgaatgatcactctccatcaagcgtggcagcattgggtttcacatcaactgatgggactcttaatgataggatggataatgttggttcctgcagtccacttccacagtcagagcctgctgtttcagtttctgaacatgagcagtcattgacggagtgtgtggatgttcggagccctggtgttgtcggtggaacaaatgagacgatttcaagcaaggtaacacattctcaacctcgactccagcatcaggaagctgcacagaattttaaggcatatgagccagattctggttatgggatgtcatttattactaaagttgatggtgaagcagcccaaggtatagcttattcatctgaggctatggttttacattctgtaaatggctatcagttacctgcatctacagcaactcaacaaccagtgccccagatgttttctcaacaattccaagcacctcagtatccaaactttttgccatatcggcatgttttctcaccacagtttgggtctctaatggttgttccaaactattcaagcaaccatgcatttcctcagttgccacatgccagcagctatctggtaatgccaaatggagcctcacaactagctgccaatggcatgaaatatggatcaaaccatcagtataagcaagtatttcaaggagcccctgctggatatggctacggaaatcataatggttaccctaacggtgttattggcggcacaggtgctattgaggatatgaatatgagtaaatataaggacaactgcctctatgcacccaatccacaggtggaaacagcagatgtatggattcaaagtcagaaagagagtcccaatatgccatctgcaccgttctacaatatggtgggacaaccagtgtctccacatgcagcatacttaccaccacaaagtggccacactgccttcagtcccgccccttcccatcctggtcacttgcagtacccgggctttgtgcatgcactgcagccaacatccatgaccatggtgcagaacccgcagaccatgatacatcagccggctgcaccgccattggcaggaaatctaggcctggacatgtcggccatggttcctggaaatcaagtaggagcgtttcaacataaccagcttgcccatcttggctggaccacacaatccttttgagattttggtgtgcttctatggctggataagtgaaatttcggttccgtgtggatagaacctaattgaagtgatatgctgtaatatgcaggataggcctgatgaataccaggtttttctttgttttaattataaaaggggaaccgttttttcgtgccgttgtgatttgcaagaacgtgtttaatgttcacttccagtttttgttccaaaattttgttgtaagtgctagtttggaaactcaaattctctttcgggattagaatgaccctac

SEQ ID NO: 2010 - DNA, 1701 bp, Zea Mays
tgagcaataagcaatctcatcatgttattaataaaaaagttagcccacatttggaatggaagcccaaatcagtaagccccagcactgctgcacctcctggtgctccatcacctgttgatgatggaagtaaaacagaagtgtctgctttgtctaagaagctttcacatgctaatgtatcacatgaacatgtcattataccggagcacatcaggataccagattctgaaagaactcatttcatcttcggttcttttgaatctgaaatttatccaaaggcttctttagcagcctattatgatgctgtggctaaagaagacttgaatgatcactctccatcaaggatggataatgttggttcctgcagtccacttccacagtcagagcctgctgtttcagtttctgaacatgagcagtcattgacggagtgtgtggatgttcggagccctggtgttgtcggtggaacaaatgagacgatttcaagcaaggtaacacattctcaacctcgactccagcatcaggaagctgcacagaattttaaggcatatgagccagattctggttatgggatgtcatttattactaaagttgatggtgaagcagcccaaggtatagcttattcatctgaggctatggttttacattctgtaaatggctatcagttacctgcatctacagcaactcaacaaccagtgccccagatgttttctcaacaattccaagcacctcagtatccaaactttttgccatatcggcatgttttctcaccacagtttgggtctctaatggttgttccaaactattcaagcaaccatgcatttcctcagttgccacatgccagcagctatctggtaatgccaaatggagcctcacaactagctgccaatggcatgaaatatggatcaaaccatcagtataagcaagtatttcaaggagcccctgctggatatggctacggaaatcataatggttaccctaacggtgttattggcggcacaggtgctattgaggatatgaatatgagtaaatataaggacaactgcctctatgcacccaatccacaggtggaaacagcagatgtatggattcaaagtcagaaagagagtcccaatatgccatctgcaccgttctacaatatggtgggacaaccagtgtctccacatgcagcatacttaccaccacaaagtggccacactgccttcagtcccgccccttcccatcctggtcacttgcagtacccgggctttgtgcatgcactgcagccaacatccatgaccatggtgcagaacccgcagaccatgatacatcagccggctgcaccgccattggcaggaaatctaggcctggacatgtcggccatggttcctggaaatcaagtaggagcgtttcaacataaccagcttgcccatcttggctggaccacacaatccttttgagattttggtgtgcttctatggctggataagtgaaatttcggttccgtgtggatagaacctaattgaagtgatatgctgtaatatgcaggataggcctgatgaataccaggtttttctttgttttaattataaaaggggaaccgttttttcgtgccgttgtgatttgcaagaacgtgtttaatgttcacttccagtttttgttccaaaattttgttgtaagtgctagtttggaaactcaaattctctttcgggattagaatgaccctac

SEQ ID NO: 2011 - DNA, 1717 bp, Zea Mays
aaaaaagttagcccacatttggaatggaagcccaaatcagtaagccccagcactgctgcacctcctggtgctccatcacctgttgatgatggaagtaaaacagaagtgtctgctttgtctaagaagctttcacatgctaatgtatcacatgaacatgtcattataccggagcacatcaggataccagattctgaaagaactcatttcatcttcggttcttttgaatctgaaatttatccaaaggcttctttagcagcctattatgatgctgtggctaaagaagacttgaatgatcactctccatcaagcgtggcagcattgggtttcacatcaactgatgggactcttaatgataggatggataatgttggttcctgcagtccacttccacagtcagagcctgctgtttcagtttctgaacatgagcagtcattgacggagtgtgtggatgttcggagccctggtgttgtcggtggaacaaatgagacgatttcaagcaaggtaacacattctcaacctcgactccagcatcaggaagctgcacagaattttaaggcatatgagccagattctggttatgggatgtcatttattactaaagttgatggtgaagcagcccaaggtatagcttattcatctgaggctatggttttacattctgtaaatggctatcagttacctgcatctacagcaactcaacaaccagtgccccagatgttttctcaacaattccaagcacctcagtatccaaactttttgccatatcggcatgttttctcaccacagtttgggtctctaatggttgttccaaactattcaagcaaccatgcatttcctcagttgccacatgccagcagctatctggtaatgccaaatggagcctcacaactagctgccaatggcatgaaatatggatcaaaccatcagtataagcaagtatttcaaggagcccctgctggatatggctacggaaatcataatggttaccctaacggtgttattggcggcacaggtgctattgaggatatgaatatgagtaaatataaggacaactgcctctatgcacccaatccacaggtggaaacagcagatgtatggattcaaagtcagaaagagagtcccaatatgccatctgcaccgttctacaatatggtgggacaaccagtgtctccacatgcagcatacttaccaccacaaagtggccacactgccttcagtcccgccccttcccatcctggtcacttgcagtacccgggctttgtgcatgcactgcagccaacatccatgaccatggtgcagaacccgcagaccatgatacatcagccggctgcaccgccattggcaggaaatctaggcctggacatgtcggccatggttcctggaaatcaagtaggagcgtttcaacataaccagcttgcccatcttggctggaccacacaatccttttgagattttggtgtgcttctatggctggataagtgaaatttcggttccgtgtggatagaacctaattgaagtgatatgctgtaatatgcaggataggcctgatgaataccaggtttttctttgttttaattataaaaggggaaccgttttttcgtgccgttgtgatttgcaagaacgtgtttaatgttcacttccagtttttgttccaaaattttgttgtaagtgctagtttggaaactcaaattctctttcgggattagaatgaccctac

SEQ ID NO: 2012 - DNA, 1589 bp, Zea Mays
gaagggttccggagacctgctctcctgatcgcagatgcacctctgcggtcgggacgaagggaactaaaaggcggctcagctatgaagagaggcgaaagcgaactgggatctgggatgatttggaggctggctgccgggctccttttatagggccgagtccgcgaccccagtgcttatccgcccacgaaaatctcgcaatcagttgagattttatagggatcggttaggataagcgtaacagccaagaaaccaaaaaatcaaacggcaaaaggtagccgcgcccccgcaaggcgaggggccggatttcggcggaccattcacgcgcatgtcgtgcgcccttcgccccgcccggcccggccaggccaggcgaggcgaggcgagcgagcgcgcgcgcgcgtgtggctctccacacactctcctctcatccatgacttggtgagtgagtgtggcttacatatttaagctagctctactccactagagctagcaatatggtgctattggtttcacctatccctttgccatccacttatatgggcttttgagattttcctgggatttattagaaattcttaattgggccaagcccataaatcctaacaagtttttccagctacccactatttttccagggttgtgcttcttatagtgctgatccatattatggcggggtgtgggcaggatacgcttcaaatggaattgtccatccccaaattagtggtgcagcaaacactagggtaccattgccagttgggcctgcagcagaggaacccatatttgtcaatgcaaagcaatacaatgctatcctccggaggaggcaaaaacgcgcaaaactggaggcccaaaataaactggtgaaaggtcggaagccatatctccatgaatctcggcatcgtcatgcaatgaagcgagtccgtggaccagggggcgtttcctcaacaaaaaggagctccaggagcagcagctgaaggcactgccttcacttcagactccaacaggtggggtcagcaaaatggcctttggcaggaacctatgccctgaaagcagcacatctcactcgccttcgacgagctctacaatctcgagtgcttcaaactggagtggcacgctagctcatcaagagcacgttagcttcgcatctgctaataaattcctccccagcatgaacttccacgcggagaatggaggtgaaaagatggccatcaatggcgtccgccaccacacccctgtcctgaggtgaacaacctcaactgtgggggtgctgtgctggtaccatcactggcgcgctccggtgtgcccgtggcaattcatccttggcttatgatgtatcttatagtaatttgctttcactttcatatggaacttgtctcagattaaactcggtgatatttattgcaactggatgactgaaataatctcatgtttcttacaagtgtgtgagccaagacccgtttatcttgtaaaagtttacataggtcaatgcccatttatgttgctagaaggctatctccagtagcttactcatccacatacttatattcaaacctcactctatgaatgatgcggtctatatttttggatgatcttat

SEQ ID NO: 2013 - DNA, 1178 bp, Zea Mays
gcttacatatttaagctagctctactccactagagctagcaatatggtgctattggtttcacctatccctttgccatccacttatatgggcttttgagattttcctgggatttattagaaattcttaattgggccaagcccataaatcctaacaagtttttccagctacccactatttttccagggttgtgcttcttatagtgctgatccatattatggcggggtgtgggcaggatacgcttcaaatggaattgtccatccccaaattagtggtgcagcaaacactagggtaccattgccagttgggcctgcagcagaggaacccatatttgtcaatgcaaagcaatacaatgctatcctccggaggaggcaaaaacgcgcaaaactggaggcccaaaataaactggtgaaaggtcggaagccagcatattcctgtcatgcaaattaagttggatacaccatatctccatgaatctcggcatcgtcatgcaatgaagcgagtccgtggaccagggggcgtttcctcaacaaaaaggagctccaggagcagcagctgaaggcactgccttcacttcagactccaacaggtggggtcagcaaaatggcctttggcaggaacctatgccctgaaagcagcacatctcactcgccttcgacgagctctacaatctcgagtgcttcaaactggagtggcacgctagctcatcaagagcacgttagcttcgcatctgctaataaattcctccccagcatgaacttccacgcggagaatggaggtgaaaagatggccatcaatggcgtccgccaccacacccctgtcctgaggtgaacaacctcaactgtgggggtgctgtgctggtaccatcactggcgcgctccggtgtgcccgtggcaattcatccttggcttatgatgtatcttatagtaatttgctttcactttcatatggaacttgtctcagattaaactcggtgatatttattgcaactggatgactgaaataatctcatgtttcttacaagtgtgtgagccaagacccgtttatcttgtaaaagtttacataggtcaatgcccatttatgttgctagaaggctatctccagtagcttactcatccacatacttatattcaaacctcactctatgaatgatgcggtctatatttttggatgatcttat

SEQ ID NO: 2014 - DNA, 1808 bp, Zea Mays
cgctgctctctctgcgcagcagcgcattcgtcgcccgccgtcaggcttctcagatccagcgtgggctgacaccgtcgtgtcttcgactgctactccacccacatcctccgcgcttgtcgcagccatcgccaccatccaggcagccgttgccgcttcccaggagcacgaacgcgccgcgtctcttgccttggagcaagaacgtgccatgggtgccgccctcaccgcccagatggccaccgcgcaacgtctcctcctcggtcgcagccccaccatgctggtcgcccatgacgatctcccgatcacttccgaggctccccatgtctctgggctcgacgccaccaccatcgtcgccctccacgcccaggccgtcgaggttcacaacattcggtccctttgtgtctgcggtgttggatccgacgtcctcccactaccctcgctggcgcgctcaggtgctcctcacgcttcggcggttcgccctcgccgaccacgttctctacgacctcgtcaccccgctgtcaccatcgtgggcccagatggacagtgtggtcctcttttggctcaacaacaccatcaccgtcgagctacaggacatcgtccgcgaccaggcggacaccgctcgccagttgtggctagctcttgaggaccagttcttcaggaaccgggaggcctgggcgctccacctcgacgaccagttccacctgttctctcagggggatctctccgtgggggagtactgccgccagatgaagggcatggcggactccctccgggacctcggcgagccggtcgccgaccgtaccgtggtgttaaaccttttgcgtggccttagcccccgctacagtcacctgaaggctttgattaagaggaccgtgccctttcccaccttccatgtcgtgtggaacaagcttcttctcgaggagctcatcatggagactgaggcacccgctccggccccgcccctctacagctctcctcccggcggtcaggcgccttcgagggagcaggcccctcgctctctgtcgatcggggctcctacccgccctccacccgcagtccctgcggctcctcgttcggcttccaccgccaacggaggtcgtcgctcccgcaagggcggtcgcgggggtggcggctccacccgaggtggtcccttcggccaaggtggcggccaggcgtggccatcattctacaacccctggaccaggaccatctccatgtggtcgggccaggcctctagtgcctcctatcctccggtgctggcgctcctgacagcgcctccctacggcgtgcctcccacgcctccctatggcgtgccaccaacgactctggcaccattccagctctcgccctcgtggaccaccacatcgacgccttggtccccgctggctggaggatggaactctgcctccctcgtcgccgccttcagcaccatggcgatgaccccacccccctccgactgggtggtcgactcaggtgcttcctaccacaccactcccactgcaggcacgctctctcggtcccatcccatccattcctcccacccctcctcgatcgttgttggaaacagtgccactttgctagtcacctcagtaggtgcctcggttctccctgggccgttcggcgttctcgtagcccctcacatcactcataatcttattttgtttgtcggttcaccaccgacaactcttgttccatttttgacccctctgttttttctgtgaaggatctgaccaccaggacccctctcgcccgctgtgacaactcaggggccctctacaggctctgccctaaccccaccgtatgaaagtttt

SEQ ID NO: 2015 - DNA, 2516 bp, Zea Mays
cgctgctctctctgcgcagcagcgcattcgtcgcccgccgtcaggcttctcagatccagcgtgggctgacaccgtcgtgtcttcgactgctactccacccacatcctccgcgcttgtcgcagccatcgccaccatccaggcagccgttgccgcttcccaggagcacgaacgcgccgcgtctcttgccttggagcaagaacgtgccatgggtgccgccctcaccgcccagatggccaccgcgcaacgtctcctcctcggtcgcagccccaccatgctggtcgcccatgacgatctcccgatcacttccgaggctccccatgtctctgggctcgacgccaccaccatcgtcgccctccacgcccaggccgtcgaggttcacaacattcggtccctttgtgtctgcggtgttggatccgacgtcctcccactaccctcgctggcgcgctcaggtgctcctcacgcttcggcggttcgccctcgccgaccacgttctctacgacctcgtcaccccgctgtcaccatcgtgggcccagatggacagtgtggtcctcttttggctcaacaacaccatcaccgtcgagctacaggacatcgtccgcgaccaggcggacaccgctcgccagttgtggctagctcttgaggaccagttcttcaggaaccgggaggcctgggcgctccacctcgacgaccagttccacctgttctctcagggggatctctccgtgggggagtactgccgccagatgaagggcatggcggactccctccgggacctcggcgagccggtcgccgaccgtaccgtggtgttaaaccttttgcgtggccttagcccccgctacagtcacctgaaggctttgattaagaggaccgtgccctttcccaccttccatgtcgtgtggaacaagcttcttctcgaggagctcatcatggagactgaggcacccgctccggccccgcccctctacagctctcctcccggcggtcaggcgccttcgagggagcaggcccctcgctctctgtcgatcggggctcctacccgccctccacccgcagtccctgcggctcctcgttcggcttccaccgccaacggaggtcgtcgctcccgcaagggcggtcgcgggggtggcggctccacccgaggtggtcccttcggccaaggtggcggccaggcgtggccatcattctacaacccctggaccaggaccatctccatgtggtcgggccaggcctctagtgcctcctatcctccggtgctggcgctcctgacagcgcctccctacggcgtgcctcccacgcctccctatggcgtgccaccaacgactctggcaccattccagctctcgccctcgtggaccaccacatcgacgccttggtccccgctggctggaggatggaactctgcctccctcgtcgccgccttcagcaccatggcgatgaccccacccccctccgactgggtggtcgactcaggtgcttcctaccacaccactcccactgcaggcacgctctctcggtcccatcccatccattcctcccacccctcctcgatcgttgttggaaacagtgccactttgctagtcacctcagtaggtgcctcggttctccctgggccgttcggcgttctcgtagcccctcacatcactcataatcttattttgtttgtcggttcaccaccgacaactcttgttccatttttgacccctctgttttttctgtgaaggatctgaccaccaggacccctctcgcccgctgtgacaactcaggggccctctacaggctctgccctaaccccaccgccatatctccatgaatctcggcatcgtcatgcaatgaagcgagtccgtggaccagggggcgtttcctcaacaaaaaggagctccaggagcagcagctgaaggcactgccttcacttcagactccaacaggtggggtcagcaaaatggcctttggcaggaacctatgccctgaaagcagcacatctcactcgccttcgacgagctctacaatctcgagtgcttcaaactggagtggcacgctagctcatcaagagcacgttagcttcgcatctgctaataaattcctccccagcatgaacttccacgcggagaatggaggtgaaaagatggccatcaatggcgtccgccaccacacccctgtcctgaggtgaacaacctcaactgtgggggtgctgtgctggtaccatcactggcgcgctccggtgtgcccgtggcaattcatccttggcttatgatgtatcttatagtaatttgctttcactttcatatggaacttgtctcagattaaactcggtgatatttattgcaactggatgactgaaataatctcatgtttcttacaagtgtgtgagccaagacccgtttatcttgtaaaagtttacataggtcaatgcccatttatgttgctagaaggctatctccagtagcttactcatccacatacttatattcaaacctcactctatgaatgatgcggtctatatttttggatgatcttat

SEQ ID NO: 2016 - DNA, 1466 bp, Zea Mays
ttcatctagtttcccactgttatgtccaatactccctctggtcataaaacatatagtttaggacaatttagttaaatctttaaaactacaaacatcaataatgtttaattgttgatttaaaaacatgcaagttatatatagatttgtattaaaaaaatcggttgaatctcataaattttaagtaattcaagaatatattgtagaagaaattagtggtcaatgatttgcatcaaagaccatgcgaagtcaaatgtgacaactacttctgaccatatgagagtatttttgtagaaaaaatcatttcaccgaaataatagtgactttcataccttaacacatcactctttttctccattttccttgtgtagatttttttctctcgaatatacaggagagttgtgtatcattgcattaagaacaaacatatagattacaattatgttttgtttgcttaaacatcacttattgttacctaaacaaccattctaggatgctttctctgctccactgctttcccttgataatgaaagaaccaataaacttctttgcatgttatgattcgtctcatggcataatcatgtgtcaacctcttattattctatggctctacacttctacctcactaggatcttttcgtactgaaattattctattcagttatgtcatttagctattgaataacatagtgcttcttttctgaaagcatcagccagcatattcctgtcatgcaaattaagttggatacaccatatctccatgaatctcggcatcgtcatgcaatgaagcgagtccgtggaccagggggcgtttcctcaacaaaaaggagctccaggagcagcagctgaaggcactgccttcacttcagactccaacaggtggggtcagcaaaatggcctttggcaggaacctatgccctgaaagcagcacatctcactcgccttcgacgagctctacaatctcgagtgcttcaaactggagtggcacgctagctcatcaagagcacgttagcttcgcatctgctaataaattcctccccagcatgaacttccacgcggagaatggaggtgaaaagatggccatcaatggcgtccgccaccacacccctgtcctgaggtgaacaacctcaactgtgggggtgctgtgctggtaccatcactggcgcgctccggtgtgcccgtggcaattcatccttggcttatgatgtatcttatagtaatttgctttcactttcatatggaacttgtctcagattaaactcggtgatatttattgcaactggatgactgaaataatctcatgtttcttacaagtgtgtgagccaagacccgtttatcttgtaaaagtttacataggtcaatgcccatttatgttgctagaaggctatctccagtagcttactcatccacatacttatattcaaacctcactctatgaatgatgcggtctatatttttggatgatcttat

SEQ ID NO: 2017 - DNA, 1962 bp, Zea Mays
tgttcacaaagcaatcgccaagaacatcgatgtccattcgaccattcctgacaacccatatcccaatcaatctaccacctctccggccgttccacactgatcggatggcggccttgaccttccacccggccgcctgcttcttcccacgaccacgagaggcagcagcgacaacgaagcagccgctccaccattactgctcgcctctccggaccctcgtccctagaactacaagaccgtgccttctcagggccaggtcctccaacgggctcccgcagaccggcggcgcctcgttcggcagcagcaacgaggtgctggatgggacgccgacgggagatggggcaccggggcaggggcagcggggagggagcaccgtcagcatcacggtcgtcggcgcctccggcgacctcgccaagaagaagatcttcccggctctcttcgccttgttctacgagggctggctcccggagtgttcggctatgcccgtagcgagatgaacgaccaagagctcaggaacatgattagcatgaccctgacgtgccgaatcgacaaaagtgagaactgcggcgacaagatggaacagttcctgaagaggtgcttctaccagtctgggcagtacaactcggaggaggggtttgcggagttagacagaaagctcaaagaaaaagaggcaggcaggctaccgaacaggctattttacctgtcgatcccgccaaacatattcgtggatgtggttagatccgctagccgcaccgcgtcgtcttcaagcgggtggacaagatttatagtggagaagccattcggccgtgactcggagtcctccggcgagctcactcggtccttgaagaagtacttggtcgaggagcaaatattcaggatcgaccattacctgggcaaggaactggttgagaatctctccgtcctccgcttctccaacctcgtcttcgagccgctgtggtcgaggaactacatccggaacgtgcagctcatattctctgaagatttcggcaccgagggtcgaggcggctacttcgacaactacggcatcatccgggacatcatgcagaaccacctgctgcagatcctggccctgttcgccatggagaccccggtgagcctggacgccgaggacatccgcaacgagaaggtgaaggtgctgaggtccatgaggcagctgaagctcgaggacgtggtggtgggccagtacaagggccactccaagggcggcaagtcgtacccgggctacgccgacgaccccaccgtgcccaagggcagcgtcacgcccaccttcgccgccgccgcgctcttcatcgacaacgcgcgctgggacggtgtgccgttcctgatgaaggcaggcaaggcgctgcacacacgacgcgcggagatccgggtgcagttccggcgcgtgccgggaaacctgtaccggcggaacatcggcgcggacctggacaaggcgaccaacgagctggtgctccgggtgcagcccgacgaggccatctacctcaaggtcaacaacaaggtgcccgggctgggcatgcgcctcgaccgcagcaacctcaacctgctctactccgagcgctaccgccgcgagatccccgacgcgtacgagcgccttctgctggacgccatggagggcgagcgccgcctcttcatccggagcgacgagctcgacgccgcctgggccatcttcacgcccgcgctcagggagctggaggacaggaaagtggcgccggagctctacccgtacggcagcaggggccccgtcggcgcgcactacctcgccgccaactacaacgtcaggtggggagacatcaccagcgatgacgacggcgccttctagctctagacagagacatgcatccatcgattcgtgacgctacgccttattgtggaagggacacgcagttgtatccaatccaatcaaatttaacaaaaatggcaagggggcttggcacagaataagaa

SEQ ID NO: 2018 - DNA, 1953 bp, Zea Mays
tgttcacaaagcaatcgccaagaacatcgatgtccattcgaccattcctgacaacccatatcccaatcaatctaccacctctccggccgttccacactgatcggatggcggccttgaccttccacccggccgcctgcttcttcccacgaccacgagaggcagcagcgacaacgaagcagccgctccaccattactgctcgcctctccggaccctcgtccctagaactacaagaccgtgccttctcagggccaggtcctccaacgggctcccgcagaccggcggcgcctcgttcggcagcagcaacgaggtgctggatgggacgccgacgggagatggggcaccggggcaggggcagcggggagggagcaccgtcagcatcacggtcgtcggcgcctccggcgacctcgccaagaagaagatcttcccggctctcttcgccttgttctacgagggctggctcccggagcattttacagtgttcggctatgcccgtagcgagatgaacgaccaagagctcaggaacatgattagcatgaccctgacgtgccgaatcgacaaaagatggaacagttcctgaagaggtgcttctaccagtctgggcagtacaactcggaggaggggtttgcggagttagacagaaagctcaaagaaaaagaggcaggcaggctaccgaacaggctattttacctgtcgatcccgccaaacatattcgtggatgtggttagatccgctagccgcaccgcgtcgtcttcaagcgggtggacaagatttatagtggagaagccattcggccgtgactcggagtcctccggcgagctcactcggtccttgaagaagtacttggtcgaggagcaaatattcaggatcgaccattacctgggcaaggaactggttgagaatctctccgtcctccgcttctccaacctcgtcttcgagccgctgtggtcgaggaactacatccggaacgtgcagctcatattctctgaagatttcggcaccgagggtcgaggcggctacttcgacaactacggcatcatccgggacatcatgcagaaccacctgctgcagatcctggccctgttcgccatggagaccccggtgagcctggacgccgaggacatccgcaacgagaaggtgaaggtgctgaggtccatgaggcagctgaagctcgaggacgtggtggtgggccagtacaagggccactccaagggcggcaagtcgtacccgggctacgccgacgaccccaccgtgcccaagggcagcgtcacgcccaccttcgccgccgccgcgctcttcatcgacaacgcgcgctgggacggtgtgccgttcctgatgaaggcaggcaaggcgctgcacacacgacgcgcggagatccgggtgcagttccggcgcgtgccgggaaacctgtaccggcggaacatcggcgcggacctggacaaggcgaccaacgagctggtgctccgggtgcagcccgacgaggccatctacctcaaggtcaacaacaaggtgcccgggctgggcatgcgcctcgaccgcagcaacctcaacctgctctactccgagcgctaccgccgcgagatccccgacgcgtacgagcgccttctgctggacgccatggagggcgagcgccgcctcttcatccggagcgacgagctcgacgccgcctgggccatcttcacgcccgcgctcagggagctggaggacaggaaagtggcgccggagctctacccgtacggcagcaggggccccgtcggcgcgcactacctcgccgccaactacaacgtcaggtggggagacatcaccagcgatgacgacggcgccttctagctctagacagagacatgcatccatcgattcgtgacgctacgccttattgtggaagggacacgcagttgtatccaatccaatcaaatttaacaaaaatggcaagggggcttggcacagaataagaa

SEQ ID NO: 2019 - DNA, 2475 bp, Zea Mays
aaataaagttaaatacattcccttgccttcctcagcggctcctcgtcctcggctcctcccgctcccctccgcactgtgtcgagccgagcgtgccgctggccgaccttggcaccttgcccgcgcccgcccgagccccgacgctgcctgaagcagcaagtgacagctcccctgggcgagccggtttactaccagcacggtgagcttcggtcgggcggagcagacgacaggcagcacaccaaggtagatcgacgggctctacacggacccgatctgcctctatgctgcaacctggattttcttcttccaatcaccaccacagcgcaacgcctgaacggccgtcgctgccggctacgccaggtgctcaggtcttattcggccccttcgccggcgacgagcgccaccaggatgcgtccgagactaagttgatgaagcagcctacttgggtcttctttgagaaagaatcggtaactgacttaagagaacaaattctccaactcattcagcatgattgtaaggatcaagaggaaaaatcacgggcagagctactggagaagctcaacagatgtaaaagagatacacttatcgaactgtgtcgctcgtttgatttaattggctcaagagctaataggaaggaggaacttgtattgtttctgatggaattcattaaggatcactgttctggtagtgatgtcataaactcggataagaaatacaagaaaagaaagcgtgtcagagaagaggaaaatttgtctgctggtaaaccttcaaagaaaaagaaacgagagggtgaagaggaagcagaggatagagtaaaacattctgactgtgatttgctggacaacaaatattcatgtgctgatagtaagaatggaaaattcccaaatgaacagaccaactttgagccttctgggaggataaattactctgtatcagagaatttagatggagcatcactcagtgaagcgccaattcctacagatgagcaagcaataataaccacaccacctacaaagtttgttacagctgctgaggatgatagtactgacgtgaaggctttacaaaggaaaatgtcttctattgccaagaaaaaaacgacttctaaggaagattgcaaagtcaaattgtgtggtaatcgggagtctaaaggagacacaaagcctcgaaaacaagtaatcaaaccaagtaaagatgagctgagggaagctgtctttcttatcttggatactgcggactttgccactgtgagatacactatgacctttggcgatgttgtaaaagaagtcgacaaatactttggcaaggatctgtttgagagaaagccactaataaggtcgcttatagaagaggagctctttaggctagcagacgaggcagagaagaaggaactggaagagtcggaagcagcagaggcgaaggctagagccgagcaagctgccaaggagatggcacaagttcaaacagttgaattggttatcaacgagcaaaatgtacttgaagatggtcgagatagcaacaccaaagacagtctaaagaacgcaaatgacagtgctaacaagaaatgtatcgatggtggggcttctgtggagtatggtttcaatgaaaacagctgttacgctgctgaaggttcagaagagcacaaagttgatgatgataataaaaacataactaaggatggcaatggtggaaaggtcgcagttgcacccactgcaaacactgattgtaccttacaactacagggttcaagcaacgtcgaagctgagacgactatgaagagcaatgttggaaccctagaagcgtcaaaagatggagaagtgagagatgccagaaatggagaaaacaatggcactgaagatggtgggaatgaaggaatcaggagtgggaatgttggtagcaatgcagaagctgaagagtctcacggtcatggaaataatgaacgcgcagaacataccgaagatgacaaggctcaggaatgtagccacaatgagaacagtgcaagtgtaggaatccttggcgatggagacggtgaagctagagaaggcgatataaatgcggaagcggaacaaagtcaagcagacggtggcggcaatagtaaagcggaagatgctgagcacaatgaaaacaccaaaactgacgccaattcaagcaagaatggtactactgctgctgggaatggaaagaccgatgttgacgtgaagggcgcaacagcgatggcgcagctgaaggaagccctgtgtgatgagatggatgtagattgcaagggaggtggagtaggaccccggttatgtagatcgtagaagttgatttaggatccccagttgagagattatcagtgacgctttaactcttgtatttgtatgatagcttatgcgtagcttagatttgatgtgtatagcactggactactggagatctggaatacgggaatccaaacattaccttgtggaaattgagctttattgggggttggtattgtat

SEQ ID NO: 2020 - DNA, 2111 bp, Zea Mays
aaataaagttaaatacattcccttgccttcctcagcggctcctcgtcctcggctcctcccgctcccctccgcactgtgtcgagccgagcgtgccgctggccgaccttggcaccttgcccgcgcccgcccgagccccgacgctgcctgaagcagcaagtgacagctcccctgggcgagccggtttactaccagcacggtgagcttcggtcgggcggagcagacgacaggcagcacaccaaggtagatcgacgggctctacacggacccgatctgcctctatgctgcaacctggattttcttcttccaatcaccaccacagcgcaacgcctgaacggccgtcgctgccggctacgccaggtgctcaggtcttattcggccccttcgccggcgacgagcgccaccaggatgcgtccgagactaagttgatgaagcagcctacttgggtcttctttgagaaagaatcggtaactgacttaagagaacaaattctccaactcattcagcatgattgtaaggatcaagaggaaaaatcacgggcagagctactggagaagctcaacagatgtaaaagagatacacttatcgaactgtgtcgctcgtttgatttaattggctcaagagctaataggaaggaggaacttgtattgtttctgatggaattcattaaggatcactgttctggtagtgatgtcataaactcggataagaaatacaagaaaagaaagcgtgtcagagaagaggaaaatttgtctgctggtaaaccttcaaaggtaatcgggagtctaaaggagacacaaagcctcgaaaacaagtaatcaaaccaagtaaagatgagctgagggaagctgtctttcttatcttggatactgcggactttgccactgtgagaatgacctttggcgatgttgtaaaagaagtcgacaaatactttggcaaggatctgtttgagagaaagccactaataaggtcgcttatagaagaggagctctttaggctagcagacgaggcagagaagaaggaactggaagagtcggaagcagcagaggcgaaggctagagccgagcaagctgccaaggagatggcacaagttcaaacagttgaattggttatcaacgagcaaaatgtacttgaagatggtcgagatagcaacaccaaagacagtctaaagaacgcaaatgacagtgctaacaagaaatgtatcgatggtggggcttctgtggagtatggtttcaatgaaaacagctgttacgctgctgaaggttcagaagagcacaaagttgatgatgataataaaaacataactaaggatggcaatggtggaaaggtcgcagttgcacccactgcaaacactgattgtaccttacaactacagggttcaagcaacgtcgaagctgagacgactatgaagagcaatgttggaaccctagaagcgtcaaaagatggagaagtgagagatgccagaaatggagaaaacaatggcactgaagatggtgggaatgaaggaatcaggagtgggaatgttggtagcaatgcagaagctgaagagtctcacggtcatggaaataatgaacgcgcagaacataccgaagatgacaaggctcaggaatgtagccacaatgagaacagtgcaagtgtaggaatccttggcgatggagacggtgaagctagagaaggcgatataaatgcggaagcggaacaaagtcaagcagacggtggcggcaatagtaaagcggaagatgctgagcacaatgaaaacaccaaaactgacgccaattcaagcaagaatggtactactgctgctgggaatggaaagaccgatgttgacgtgaagggcgcaacagcgatggcgcagctgaaggaagccctgtgtgatgagatggatgtagattgcaagggaggtggagtaggaccccggttatgtagatcgtagaagttgatttaggatccccagttgagagattatcagtgacgctttaactcttgtatttgtatgatagcttatgcgtagcttagatttgatgtgtatagcactggactactggagatctggaatacgggaatccaaacattaccttgtggaaattgagctttattgggggttggtattgtat

SEQ ID NO: 2021 - DNA, 2463 bp, Zea Mays
aaataaagttaaatacattcccttgccttcctcagcggctcctcgtcctcggctcctcccgctcccctccgcactgtgtcgagccgagcgtgccgctggccgaccttggcaccttgcccgcgcccgcccgagccccgacgctgcctgaagcagcaagtgacagctcccctgggcgagccggtttactaccagcacggtgagcttcggtcgggcggagcagacgacaggcagcacaccaaggtagatcgacgggctctacacggacccgatctgcctctatgctgcaacctggattttcttcttccaatcaccaccacagcgcaacgcctgaacggccgtcgctgccggctacgccaggtgctcaggtcttattcggccccttcgccggcgacgagcgccaccaggatgcgtccgagactaagttgatgaagcagcctacttgggtcttctttgagaaagaatcggtaactgacttaagagaacaaattctccaactcattcagcatgattgtaaggatcaagaggaaaaatcacgggcagagctactggagaagctcaacagatgtaaaagagatacacttatcgaactgtgtcgctcgtttgatttaattggctcaagagctaataggaaggaggaacttgtattgtttctgatggaattcattaaggatcactgttctggtagtgatgtcataaactcggataagaaatacaagaaaagaaagcgtgtcagagaagaggaaaatttgtctgctggtaaaccttcaaagaaaaagaaacgagagggtgaagaggaagcagaggatagagtaaaacattctgactgtgatttgctggacaacaaatattcatgtgctgatagtaagaatggaaaattcccaaatgaacagaccaactttgagccttctgggaggataaattactctgtatcagagaatttagatggagcatcactcagtgaagcgccaattcctacagatgagcaagcaataataaccacaccacctacaaagtttgttacagctgctgaggatgatagtactgacgtgaaggctttacaaaggaaaatgtcttctattgccaagaaaaaaacgacttctaaggaagattgcaaagtcaaattgtgtggtaatcgggagtctaaaggagacacaaagcctcgaaaacaagtaatcaaaccaagtaaagatgagctgagggaagctgtctttcttatcttggatactgcggactttgccactatgacctttggcgatgttgtaaaagaagtcgacaaatactttggcaaggatctgtttgagagaaagccactaataaggtcgcttatagaagaggagctctttaggctagcagacgaggcagagaagaaggaactggaagagtcggaagcagcagaggcgaaggctagagccgagcaagctgccaaggagatggcacaagttcaaacagttgaattggttatcaacgagcaaaatgtacttgaagatggtcgagatagcaacaccaaagacagtctaaagaacgcaaatgacagtgctaacaagaaatgtatcgatggtggggcttctgtggagtatggtttcaatgaaaacagctgttacgctgctgaaggttcagaagagcacaaagttgatgatgataataaaaacataactaaggatggcaatggtggaaaggtcgcagttgcacccactgcaaacactgattgtaccttacaactacagggttcaagcaacgtcgaagctgagacgactatgaagagcaatgttggaaccctagaagcgtcaaaagatggagaagtgagagatgccagaaatggagaaaacaatggcactgaagatggtgggaatgaaggaatcaggagtgggaatgttggtagcaatgcagaagctgaagagtctcacggtcatggaaataatgaacgcgcagaacataccgaagatgacaaggctcaggaatgtagccacaatgagaacagtgcaagtgtaggaatccttggcgatggagacggtgaagctagagaaggcgatataaatgcggaagcggaacaaagtcaagcagacggtggcggcaatagtaaagcggaagatgctgagcacaatgaaaacaccaaaactgacgccaattcaagcaagaatggtactactgctgctgggaatggaaagaccgatgttgacgtgaagggcgcaacagcgatggcgcagctgaaggaagccctgtgtgatgagatggatgtagattgcaagggaggtggagtaggaccccggttatgtagatcgtagaagttgatttaggatccccagttgagagattatcagtgacgctttaactcttgtatttgtatgatagcttatgcgtagcttagatttgatgtgtatagcactggactactggagatctggaatacgggaatccaaacattaccttgtggaaattgagctttattgggggttggtattgtat

SEQ ID NO: 2022 - DNA, 2192 bp, Zea Mays
aaataaagttaaatacattcccttgccttcctcagcggctcctcgtcctcggctcctcccgctcccctccgcactgtgtcgagccgagcgtgccgctggccgaccttggcaccttgcccgcgcccgcccgagccccgacgctgcctgaagcagcaagtgacagctcccctgggcgagccggtttactaccagcacggtgagcttcggtcgggcggagcagacgacaggcagcacaccaaggtagatcgacgggctctacacggacccgatctgcctctatgctgcaacctggattttcttcttccaatcaccaccacagcgcaacgcctgaacggccgtcgctgccggctacgccaggtgctcaggtcttattcggccccttcgccggcgacgagcgccaccaggatgcgtccgagactaagttgatgaagcagcctacttgggtcttctttgagaaagaatcggtaactgacttaagagaacaaattctccaactcattcagcatgattgtaaggatcaagaggaaaaatcacgggcagagctactggagaagctcaacagatgtaaaagagatacacttatcgaactgtgtcgctcgtttgatttaattggctcaagagctaataggaaggaggaacttgtattgtttctgatggaattcattaaggatcactgttctggtagtgatgtcataaactcggataagaaatacaagaaaagaaagcgtgtcagagaagaggaaaatttgtctgctggtaaaccttcaaagaaaaagaaacgagagggtgaagaggaagcagaggatagagtaaaacattctgactgtgatttgctggacaacaaatattcatgtgctgatagtaagaatggaaaattcccaaatgaacagaccaactttgagccttctgggaggataaattactctgtatcagagaatttagatggagcatcactcagtgaagcgccaattcctacagatgagcaagcaataataaccacaccacctacaaagtttgttacagctgctgaggatgatagtactgacgtgaaggctttacaaaggaaaatgtcttctattgccaagaaaaaaacgacttctaaggaagattgcaaagtcaaattgtgtggtaatcgggagtctaaaggagacacaaagcctcgaaaacaagtaatcaaaccaagtaaagatgagctgagggaagctgtctttcttatcttggatactgcggactttgccactgtgagatacactatgacctttggcgatgttgtaaaagaagtcgacaaatactttggcaaggatctgtttgagagaaagccactaataaggtcgcttatagaagaggagctctttaggctagcagacgaggcagagaagaaggaactggaagagtcggaagcagcagaggcgaaggctagagccgagcaagctgccaaggagatggcacaagttcaaacagttgaattggttatcaacgagcaaaatgtacttgaagatggtcgagatagcaacaccaaagacagtctaaagaacgcaaatgacagtgctaacaagaaatgtatcgatggtggggcttctgtggagtatggtttcaatgaaaacagctgttacgctgctgaaggttcagaagagcacaaagttgatgatgataataaaaacataactaaggatggcaatggtggaaaggtcgcagttgcacccactgcaaacactgattgtaccttacaactacagggttcaagcaacgtcgaagctgagacgactatgaagagcaatgttggaaccctagaagcgtcaaaagatggagaagtgagagatgccagaaatggagaaaacaatggcactgaagatggtgggaatgaaggaatcaggagtgggaatgttggtagcaatgcagaagctgaagagtctcacggtcatggaaataatgaacgcgcagaacataccgaagatgacaaggctcaggaatgtagccacaatgagaacagtgcaagtgtaggaatccttggcgatggagacggtgaagctagagaaggcgatataaatgcggaagcggaacaaagtcaagcagacggtggcggcaatagtaaagcggaagatgctgagcacaatgaaaacaccaaaactgacgccaattcaagcaagaatggtactactgctgctgggagtttgaatatgaggatgtggatg

SEQ ID NO: 2023 - DNA, 2064 bp, Zea Mays
aaataaagttaaatacattcccttgccttcctcagcggctcctcgtcctcggctcctcccgctcccctccgcactgtgtcgagccgagcgtgccgctggccgaccttggcaccttgcccgcgcccgcccgagccccgacgctgcctgaagcagcaagtgacagctcccctgggcgagccggtttactaccagcacggtgagcttcggtcgggcggagcagacgacaggcagcacaccaaggtgctcaggtcttattcggccccttcgccggcgacgagcgccaccaggatgcgtccgagactaagttgatgaagcagcctacttgggtcttctttgagaaagaatcggtaactgacttaagagaacaaattctccaactcattcagcatgattgtaaggatcaagaggaaaaatcacgggcagagctactggagaagctcaacagatgtaaaagagatacacttatcgaactgtgtcgctcgtttgatttaattggctcaagagctaataggaaggaggaacttgtattgtttctgatggaattcattaaggatcactgttctggtagtgatgtcataaactcggataagaaatacaagaaaagaaagcgtgtcagagaagaggaaaatttgtctgctggtaaaccttcaaagaaaaagaaacgagagggtgaagaggaagcagaggatagagtaaaacattctgactgtgatttgctggacaacaaatattcatgtgctgatagtaagaatggaaaattcccaaatgaacagaccaactttgagccttctgggaggataaattactctgtatcagagaatttagatggagcatcactcagtgaagcgccaattcctacagatgagcaagcaataataaccacaccacctacaaagtttgttacagctgctgaggatgatagtactgacgtgaaggctttacaaaggaaaatgtcttctattgccaagaaaaaaacgacttctaaggaagattgcaaagtcaaattgtgtggtaatcgggagtctaaaggagacacaaagcctcgaaaacaagtaatcaaaccaagtaaagatgagctgagggaagctgtctttcttatcttggatactgcggactttgccactatgacctttggcgatgttgtaaaagaagtcgacaaatactttggcaaggatctgtttgagagaaagccactaataaggtcgcttatagaagaggagctctttaggctagcagacgaggcagagaagaaggaactggaagagtcggaagcagcagaggcgaaggctagagccgagcaagctgccaaggagatggcacaagttcaaacagttgaattggttatcaacgagcaaaatgtacttgaagatggtcgagatagcaacaccaaagacagtctaaagaacgcaaatgacagtgctaacaagaaatgtatcgatggtggggcttctgtggagtatggtttcaatgaaaacagctgttacgctgctgaaggttcagaagagcacaaagttgatgatgataataaaaacataactaaggatggcaatggtggaaaggtcgcagttgcacccactgcaaacactgattgtaccttacaactacagggttcaagcaacgtcgaagctgagacgactatgaagagcaatgttggaaccctagaagcgtcaaaagatggagaagtgagagatgccagaaatggagaaaacaatggcactgaagatggtgggaatgaaggaatcaggagtgggaatgttggtagcaatgcagaagctgaagagtctcacggtcatggaaataatgaacgcgcagaacataccgaagatgacaaggctcaggaatgtagccacaatgagaacagtgcaagtgtaggaatccttggcgatggagacggtgaagctagagaaggcgatataaatgcggaagcggaacaaagtcaagcagacggtggcggcaatagtaaagcggaagatgctgagcacaatgaaaacaccaaaactgacgccaattcaagcaagaatggtactactgctgctgtggagtttgaatatgaggatgtggatg

SEQ ID NO: 2024 - DNA, 2076 bp, Zea Mays
aaataaagttaaatacattcccttgccttcctcagcggctcctcgtcctcggctcctcccgctcccctccgcactgtgtcgagccgagcgtgccgctggccgaccttggcaccttgcccgcgcccgcccgagccccgacgctgcctgaagcagcaagtgacagctcccctgggcgagccggtttactaccagcacggtgagcttcggtcgggcggagcagacgacaggcagcacaccaaggtgctcaggtcttattcggccccttcgccggcgacgagcgccaccaggatgcgtccgagactaagttgatgaagcagcctacttgggtcttctttgagaaagaatcggtaactgacttaagagaacaaattctccaactcattcagcatgattgtaaggatcaagaggaaaaatcacgggcagagctactggagaagctcaacagatgtaaaagagatacacttatcgaactgtgtcgctcgtttgatttaattggctcaagagctaataggaaggaggaacttgtattgtttctgatggaattcattaaggatcactgttctggtagtgatgtcataaactcggataagaaatacaagaaaagaaagcgtgtcagagaagaggaaaatttgtctgctggtaaaccttcaaagaaaaagaaacgagagggtgaagaggaagcagaggatagagtaaaacattctgactgtgatttgctggacaacaaatattcatgtgctgatagtaagaatggaaaattcccaaatgaacagaccaactttgagccttctgggaggataaattactctgtatcagagaatttagatggagcatcactcagtgaagcgccaattcctacagatgagcaagcaataataaccacaccacctacaaagtttgttacagctgctgaggatgatagtactgacgtgaaggctttacaaaggaaaatgtcttctattgccaagaaaaaaacgacttctaaggaagattgcaaagtcaaattgtgtggtaatcgggagtctaaaggagacacaaagcctcgaaaacaagtaatcaaaccaagtaaagatgagctgagggaagctgtctttcttatcttggatactgcggactttgccactgtgagatacactatgacctttggcgatgttgtaaaagaagtcgacaaatactttggcaaggatctgtttgagagaaagccactaataaggtcgcttatagaagaggagctctttaggctagcagacgaggcagagaagaaggaactggaagagtcggaagcagcagaggcgaaggctagagccgagcaagctgccaaggagatggcacaagttcaaacagttgaattggttatcaacgagcaaaatgtacttgaagatggtcgagatagcaacaccaaagacagtctaaagaacgcaaatgacagtgctaacaagaaatgtatcgatggtggggcttctgtggagtatggtttcaatgaaaacagctgttacgctgctgaaggttcagaagagcacaaagttgatgatgataataaaaacataactaaggatggcaatggtggaaaggtcgcagttgcacccactgcaaacactgattgtaccttacaactacagggttcaagcaacgtcgaagctgagacgactatgaagagcaatgttggaaccctagaagcgtcaaaagatggagaagtgagagatgccagaaatggagaaaacaatggcactgaagatggtgggaatgaaggaatcaggagtgggaatgttggtagcaatgcagaagctgaagagtctcacggtcatggaaataatgaacgcgcagaacataccgaagatgacaaggctcaggaatgtagccacaatgagaacagtgcaagtgtaggaatccttggcgatggagacggtgaagctagagaaggcgatataaatgcggaagcggaacaaagtcaagcagacggtggcggcaatagtaaagcggaagatgctgagcacaatgaaaacaccaaaactgacgccaattcaagcaagaatggtactactgctgctgtggagtttgaatatgaggatgtggatg

SEQ ID NO: 2025 - DNA, 2180 bp, Zea Mays
aaataaagttaaatacattcccttgccttcctcagcggctcctcgtcctcggctcctcccgctcccctccgcactgtgtcgagccgagcgtgccgctggccgaccttggcaccttgcccgcgcccgcccgagccccgacgctgcctgaagcagcaagtgacagctcccctgggcgagccggtttactaccagcacggtgagcttcggtcgggcggagcagacgacaggcagcacaccaaggtagatcgacgggctctacacggacccgatctgcctctatgctgcaacctggattttcttcttccaatcaccaccacagcgcaacgcctgaacggccgtcgctgccggctacgccaggtgctcaggtcttattcggccccttcgccggcgacgagcgccaccaggatgcgtccgagactaagttgatgaagcagcctacttgggtcttctttgagaaagaatcggtaactgacttaagagaacaaattctccaactcattcagcatgattgtaaggatcaagaggaaaaatcacgggcagagctactggagaagctcaacagatgtaaaagagatacacttatcgaactgtgtcgctcgtttgatttaattggctcaagagctaataggaaggaggaacttgtattgtttctgatggaattcattaaggatcactgttctggtagtgatgtcataaactcggataagaaatacaagaaaagaaagcgtgtcagagaagaggaaaatttgtctgctggtaaaccttcaaagaaaaagaaacgagagggtgaagaggaagcagaggatagagtaaaacattctgactgtgatttgctggacaacaaatattcatgtgctgatagtaagaatggaaaattcccaaatgaacagaccaactttgagccttctgggaggataaattactctgtatcagagaatttagatggagcatcactcagtgaagcgccaattcctacagatgagcaagcaataataaccacaccacctacaaagtttgttacagctgctgaggatgatagtactgacgtgaaggctttacaaaggaaaatgtcttctattgccaagaaaaaaacgacttctaaggaagattgcaaagtcaaattgtgtggtaatcgggagtctaaaggagacacaaagcctcgaaaacaagtaatcaaaccaagtaaagatgagctgagggaagctgtctttcttatcttggatactgcggactttgccactatgacctttggcgatgttgtaaaagaagtcgacaaatactttggcaaggatctgtttgagagaaagccactaataaggtcgcttatagaagaggagctctttaggctagcagacgaggcagagaagaaggaactggaagagtcggaagcagcagaggcgaaggctagagccgagcaagctgccaaggagatggcacaagttcaaacagttgaattggttatcaacgagcaaaatgtacttgaagatggtcgagatagcaacaccaaagacagtctaaagaacgcaaatgacagtgctaacaagaaatgtatcgatggtggggcttctgtggagtatggtttcaatgaaaacagctgttacgctgctgaaggttcagaagagcacaaagttgatgatgataataaaaacataactaaggatggcaatggtggaaaggtcgcagttgcacccactgcaaacactgattgtaccttacaactacagggttcaagcaacgtcgaagctgagacgactatgaagagcaatgttggaaccctagaagcgtcaaaagatggagaagtgagagatgccagaaatggagaaaacaatggcactgaagatggtgggaatgaaggaatcaggagtgggaatgttggtagcaatgcagaagctgaagagtctcacggtcatggaaataatgaacgcgcagaacataccgaagatgacaaggctcaggaatgtagccacaatgagaacagtgcaagtgtaggaatccttggcgatggagacggtgaagctagagaaggcgatataaatgcggaagcggaacaaagtcaagcagacggtggcggcaatagtaaagcggaagatgctgagcacaatgaaaacaccaaaactgacgccaattcaagcaagaatggtactactgctgctgggagtttgaatatgaggatgtggatg

SEQ ID NO: 2026 - DNA, 500 bp, Zea Mays
gacaagaaccctcgcgtgttgttcgtgtcatctccccacgttgggggtgggttagtgggtaggattcaatcgtacaggccagatccagtgcaggaggatcggtctttgatgctgctgcttcaccaaacaatgaaatgctcttgatgcatgattcaggagctaggaggatatctattgtcgtcgagttacatgaagttgactttcctctgctgctgttgtgctcagtgtggatgacattgtgctgcctcaggtacatcatctattccacttttctgaagcttattctagcaaaaaaaaccattcacatgcgtccatggctggtttgatgtttttgtacaataaattttcagaaaatgtactaacatggtttgatgtttttggatatcagttatactttattttcccgagtgggactaccttaaaaaaaatcaaccacatgcttccatggctggtagtagcttcattttgctcacgtatacaacttacatttctaaacacac

SEQ ID NO: 2027 - DNA, 1232 bp, Zea Mays
ctactttttccttaaacataaattatatttttataactatctggcagttattgatctatcactgccttactacatgttacctatctggcaattatgagatgcctattcttttcatatgtaaatcctaaaatattcgaatccattttatatgtaaatcctaaaattttcgaatccaaagccacccattacaatattatgtactgaaattatatcttttacttatgtgtcactctgcatttttttaagattaaaaaaaaattcttccttattttatacatggttaaacaccaaccttcatgattcactggatattcttagtattatctctaacaaaagaatttataaagttctttccccacaaatgcaaatataggtattagcttattgattttaaattggttattaaatgtctggcatggatctcctccctgctcacgggcctcaccatcctcaatggcgagtgtaaaacttcgcaccaacacactcgacaagcttgatggcgacccctacgtcaacatccgcatgggcaagatgctttgtgtgcataaatcgtctacagttaccatctggacttttttagccatgtttgagagatgtgacggagtttggatttcacataaaaaatgcaatgtcaacctcaacaccttgatgaacatgttcagtgtgcttggtgatggtggtggccttggtggtcgaaatgcttctaatggctctggaccgccatgcttgcgtctgccgcgggacgtccacgccgccatcgcccgtgagcagctccgacagcctcatcgtcgcgttgcacctgcacttgtgtcgcaggctcgggttaccgtcggtgctcacgccgaggaaggcatgatccatgcggagcagcccaaggcgcgatgccacctccgctgtcacgcatgatgagctgcttcgcctctggcaccgccttgttccttcgcgatctcacattggacggtggatgaacttgggcttccaagatccgtaatacaagctgcggacaaaacctgtaaacatgctggatgaactggagcagctattgaaagctgttgcaacatcttcgttggagctaatgatacatttaatcctagacttgatggcaaagaacgggtgcaattttttgtctctctatttcctatttatgttgcacaaataattgtttccttttgttatccaaacaaataattacttccttctctccacccttttctccagttgtagcgagtgag

SEQ ID NO: 2028 - DNA, 428 bp, Zea Mays
tcttagtattatctctaacaaaagaatttataaagttctttccccacaaatgcaaatataggtattagcttattgattttaaattggttattaaatgtctggcatggatctcctccctgctcacgggcctcaccatcctcaatggcgagtgtaaaacttcgcaccaacacactcgacaagcttgatggcgacccctacgtcaacatccgcatgggcaagatgctttgtgtgcataaatcgtctacagttaccatctggacttttttagccatgtttgagagatgtgacggagtttggatttcacataaaaaatgcaatgtcaacctcaacaccttgatgaacatgttcagtgtgcttggtgatggtggtggccttggtggtcgaaatgcttctaatggtccctttatgtggcacacatgaatacctac

SEQ ID NO: 2029 - DNA, 1866 bp, Zea Mays
aatcggttccgttcctagctcaccgtccgctagctggctctccatccatccagcccaccgtatatatgccaagccctcacaccaaccgtcaggccatctccttccgctatcccctacccccttccctttctctatatacaaactaaagaggcaccgtctcccacaacatctctctttctcttcctccttccccaagtcggcgcggtagcttcccgtgtaccgtacacagcaggatcctccgccttccttgtgttccgcgcttccacaacagtttaccgcaaggaaggaaccatggacatgaactccaacgccaacaacagcactgccgcagcagcatcggctcccatcaacaaccagcaggctgtggtgtcatccccaaccagaaaggagcaagccaggaaccccaagaaggcgcgggcggcgccgcagcaggcgggcggcagcggggagcctaggccgcggcctccgccggacgcggcgcacagctgcccgcgctgctcctccaccaacacaaagttctgctactacaacaactacaacctgacgcagccgcgctacttctgcaagacgtgccgccgctactggacacacggcggcaccctccgcaacgtccccgtcggcggcggctgccgcaggaacaagcgcgcctccagctcctcgtccccgtttccgggcccctccagcaccgccgccaccagcgccgcgatggagaagaccgtcagcacgcggctgatgctgatggcgaccagcaccatggcgatgccctccccgacggcaggcctgtttgttcccgatgacatgtccccggcattcacgccgacgacgggcggtagcggcttcgacgacctcgccggcatggacgagcagcaccagcagggcttcctgcccttctcgccgctgtccctgtccgaccaggcgccggagctggctcctggaggagggggtgacacgacgccgtctttcctggacatgctgacaggagggtatctcgatggcggcggctacggcggcatgagcggtggcagcgatgcgatggacatgccgttctcgctgcctgagatggggcccccgacaactgatccaatgccgtttcagctccagtggacgtcatcagagcttgacaactacatcaacgacgacggtggttatgcagcaggaccagccgccggagtgcagcagcagcagcagcagcagcagcagcagattaatggtggtgatcaccagaagcaggacgagaacaaagaggcggggaacggcaaaggcaacgacgacggcggcggcgggtcgtcgtcggtgtacagcttctggatgaacaccagcggcagcgacggggcagaggggtagtgcgccactgccagtgccagccacaggaggaggcgaaagtgctgctgcaaactccctcgcatcatctggtcggtgcaagtgcagcagacatccttcgtcgacgcaatcaaatcatcaaaaggtggcaacagggagtgaaagggggaagaagttcaccatccagcgtagaggatagggtgcatgttcatgtttgatttatctgcattgtggtcggtcgtggttgcaagtcatcttgcaccaccctttgttttggttcagtttgcatgcgttcgttcgtcagagttttacttgcagcagtctttggatcgccggcagagattagttaggtatctatgctttgttttcgtcagttcgttctggataatgtcttaataattcctcagtttatttctttgttaactagtcgtcgtctaaaccttttcgtgtgtagtatttagtttggacgcgtcgttcaagcgggctgtgttagcctgcgttatatctgcttgatgacaataatttgttgctgcagatgaatgtctt

SEQ ID NO: 2030 - DNA, 1211 bp, Zea Mays
cccatttccccgctgggaacccagccttttccctgtgccagcagcctacgtgacaatattccaccggcaaaaaatttgccctgtttggaaggcggatccgtgggggcatcagcccaccccgagcccagcttccgcgtggaaagacgccctgcctctggacgtcggacaaccatcgctccgattgtctcgtctattcctcatctcgtggatggtggcggcgtcctatctctgttgctgttgatgatttcttgaacgcacgacgaacgcgagctatgtcgaaccctaccaaatcacagccatgtcaaaggaaggtgcaagggcgtcctggaactcaacatatgagaagggtttagtcgatgtactacatgacaacaaagataacccaaagttgaagggtcaaaatggatggaattcagagggatggaagtgtatcactgctaagtttaatgaaaggttctctttggctcatttcacaaaacaacaattacaagagaaggacaaagaacttaaatcaagttataaagcagtaagagattcaagaaaagaaagttggactggttggaatgactccctatgtatgatattagctgaaccagaggtttgggcaaggttgattagtgctcacccaaaggttgcaaggtttcgcaagaagccatttcctcttttctactctttagaagcactttatgaaggtgagtgtcaacaaagaaccacaatgttcgaagaatgtggctaaagcacaaaatcagagtgctaagtggaagcaacacttgaagctgacatggagaagaaaaatggaacaacaatccacatgaagcttgtaaaaaagaagttaaactaataatttattctagtgtcaaagttcataatgactggacttgtactctgttattatgctataataatttgttgaatattagatgatcatgtcatgtgctgttttttttacatttttagtgatgtttcattgtgtttttgtttttctaaatatttcctatttttctttgatttttatgattttttgaagaattttgtctccagagaggtttttagccccttgtttgccaaacagtgagtgacaggaaaatacattaaagtgggaaaaatcctcccagggaattaaagtgtcatttaaaatcctcttggtggataatttccctaggttttttgtctatttattgccaaattagcccttaatgtagttattcaac

SEQ ID NO: 2031 - DNA, 1311 bp, Zea Mays
cctgtgccagcagcctacgtgacaatattccaccggcaaaaaatttgccctgtttggaaggcggatccgtgggggcatcagcccaccccgagcccagcttccgcgtggaaagacgccctgcctctggacgtcggacaaccatcgctccgattgtctcgtctattcctcatctcgtggatggtggcggcgtcctatctctgttgctgttgatgatttcttgaacgcacgacgaacgcgagctatgtcgaaccctaccaaatcacagattccctcggtcggtccccaaccatagcggctgtcaaatccccagatcaaatgcttattcggtgggtgcagagataaaactgtcgcatgcttcctccctcgcaggccgggtccaaggaaacctgctagctgccatgtcaaaggaaggtgcaagggcgtcctggaactcaacatatgagaagggtttagtcgatgtactacatgacaacaaagataacccaaagttgaagggtcaaaatggatggaattcagagggatggaagtgtatcactgctaagtttaatgaaaggttctctttggctcatttcacaaaacaacaattacaagagaaggacaaagaacttaaatcaagttataaagcagtaagagattcaagaaaagaaagttggactggttggaatgactccctatgtatgatattagctgaaccagaggtttgggcaaggttgattagtgctcacccaaaggttgcaaggtttcgcaagaagccatttcctcttttctactctttagaagcactttatgaaggtgagtgtcaacaaagaaccacaatgttcgaagaatgtggctaaagcacaaaatcagagtgctaagtggaagcaacacttgaagctgacatggagaagaaaaatggaacaacaatccacatgaagcttgtaaaaaagaagttaaactaataatttattctagtgtcaaagttcataatgactggacttgtactctgttattatgctataataatttgttgaatattagatgatcatgtcatgtgctgttttttttacatttttagtgatgtttcattgtgtttttgtttttctaaatatttcctatttttctttgatttttatgattttttgaagaattttgtctccagagaggtttttagccccttgtttgccaaacagtgagtgacaggaaaatacattaaagtgggaaaaatcctcccagggaattaaagtgtcatttaaaatcctcttggtggataatttccctaggttttttgtctatttattgccaaattagcccttaatgtagttattcaac

SEQ ID NO: 2032 - DNA, 1225 bp, Zea Mays
tgacaatattccaccggcaaaaaatttgccctgtttggaaggcggatccgtgggggcatcagcccaccccgagcccagcttccgcgtggaaagacgccctgcctctggacgtcggacaaccatcgctccgattgtctcgtctattcctcatctcgtggatggtggcggcgtcctatctctgttgctgttgatgatttcttgaacgcacgacgaacgcgagctatgtcgaaccctaccaaatcacagattccctcggtcggtccccaaccatagcggctgtcaaatccccagatcaaatgcttattcggtgggtgcagagataaaactgtcgcatgcttcctccctcgcaggccgggtccaaggaaacctgctagctgccatgtcaaaggaaggtgcaagggcgtcctggaactcaacatatgagaagggtttagtcgatgtactacatgacaacaaagataacccaaagttgaagggtcaaaatggatggaattcagagggatggaagtgtatcactgctaagtttaatgaaaggttctctttggctcatttcacaaaacaacaattacaagagaaggacaaagaacttaaatcaagttataaagcagtaagagattcaagaaaagaaagttggactggttggaatgactccctatgtatgatattagctgaaccagaggtttgggcaaggctcacccaaaggttgcaaggtttcgcaagaagccatttcctcttttctactctttagaagcactttatgaagagtgctaagtggaagcaacacttgaagctgacatggagaagaaaaatggaacaacaatccacatgaagcttgtaaaaaagaagttaaactaataatttattctagtgtcaaagttcataatgactggacttgtactctgttattatgctataataatttgttgaatattagatgatcatgtcatgtgctgttttttttacatttttagtgatgtttcattgtgtttttgtttttctaaatatttcctatttttctttgatttttatgattttttgaagaattttgtctccagagaggtttttagccccttgtttgccaaacagtgagtgacaggaaaatacattaaagtgggaaaaatcctcccagggaattaaagtgtcatttaaaatcctcttggtggataatttccctaggttttttgtctatttattgccaaattagcccttaatgtagttattcaac

SEQ ID NO: 2033 - DNA, 1161 bp, Zea Mays
caatattccaccggcaaaaaatttgccctgtttggaaggcggatccgtgggggcatcagcccaccccgagcccagcttccgcgtggaaagacgccctgcctctggacgtcggacaaccatcgctccgattgtctcgtctattcctcatctcgtggatggtggcggcgtcctatctctgttgctgttgatgatttcttgaacgcacgacgaacgcgagctatgtcgaaccctaccaaatcacagagataaaactgtcgcatgcttcctccctcgcaggccgggtccaaggaaacctgctagctgccatgtcaaaggaaggtgcaagggcgtcctggaactcaacatatgagaagggtttagtcgatgtactacatgacaacaaagataacccaaagttgaagggtcaaaatggatggaattcagagggatggaagtgtatcactgctaagtttaatgaaaggttctctttggctcatttcacaaaacaacaattacaagagaaggacaaagaacttaaatcaagttataaagcagtaagagattcaagaaaagaaagttggactggttggaatgactccctatgtatgatattagctgaaccagaggtttgggcaaggttgattagtgctcacccaaaggttgcaaggtttcgcaagaagccatttcctcttttctactctttagaagcactttatgaagagtgctaagtggaagcaacacttgaagctgacatggagaagaaaaatggaacaacaatccacatgaagcttgtaaaaaagaagttaaactaataatttattctagtgtcaaagttcataatgactggacttgtactctgttattatgctataataatttgttgaatattagatgatcatgtcatgtgctgttttttttacatttttagtgatgtttcattgtgtttttgtttttctaaatatttcctatttttctttgatttttatgattttttgaagaattttgtctccagagaggtttttagccccttgtttgccaaacagtgagtgacaggaaaatacattaaagtgggaaaaatcctcccagggaattaaagtgtcatttaaaatcctcttggtggataatttccctaggttttttgtctatttattgccaaattagcccttaatgtagttattcaac

SEQ ID NO: 2034 - DNA, 414 bp, Zea Mays
aaaaaatttgccctgtttggaaggcggatccgtgggggcatcagcccaccccgagcccagcttccgcgtggaaagacgccctgcctctggacgtcggacaaccatcgctccgattgtctcgtctattcctcatctcgtggatggtggcggcgtcctatctctgttgctgttgatgatttcttgaacgcacgacgaacgcgagctatgtcgaaccctaccaaatcacagattccctcggtcggtccccaaccatagcggctgtcaaatccccagatcaaatgcttattcggtgggtgcagagataaaactgtcgcatgcttcctccctcgcaggccgggtccaaggaaacctgctagctgataatgggttcttgggaggagcatgttaggcggtttttgttggaggaggaagaag

SEQ ID NO: 2035 - DNA, 2022 bp, Zea Mays
ttggggttggggcgcgtgtgcgctccatttcacttcaccgttcgagtgggcaaaaagcagaatcctgcctttccaactccaagggggagttgccattcctgtcatccggtgtggcctttgggagagggagagagaaggaaggggaggcttcttccgttccggcagcggctccctccgctttcggttctttgcaagatcgagcgagcgcaatcatcgatcgctgccatcatcaccagcattagcggatggagaggcggattattcttcttgggacagtgacgacgagtaccagaaattcatccaaaacatgaaccctccaagggtcaccatcgacaacacatcatgtccaaatgctacagtcatccatgtggacagcgcgaacaagtatgggatactgttggaggtagtgcaggtcctcaccgacctcaagctcatagtcaagaaggcatacatatcctcagacgggggatggttcatggacgtcttcactgtgacgaaccaaagtgggcacaagataacggacgaatctgtgctgcaaggaataaaagactacatttacaagtctatcgggcctgactcctgcttccttccctcgcggaggagagccgtcggggtggagccgtcctccgaccacaccctgatagagctaacggggaccgacaggccgggcctcctctcggaggtgagcgcggtgctcacgagcctggagtgcaacgtggtgagcgcggagctgtggacgcacaacgggagagccgccgccgtgatgcaggtcaccgacagggagtccgggctggcggtctcggacgcggagagggtcggcaggatcaaggggcggctctacaacgtgttcagagggaggagccgggacgccaagaccgcggtcgcgacgacgggcgccacccacccggagcggaggctgcaccagatgatgttcgaggaccgggactacgagaggcgcggcaaggacgatggcagggcggcggcgagcggcagcaaccccggtccggtggtttcggtcgtgaactggcttcagaaatactactccgtggtgacggtccggtgcagggaccggcccaagctcctgttcgacacggtgtgcaccctgacggacatgcagtacgtggtgttccatggcagcgtggataccgagggccccgaagcttaccaggactactacatcaggcacatcgatgggtgtcccgtcaattcggaggccgagaggaagaggatcatccagtgccttgaagcagccatagaacggagagtgtccgagggcctgaagctagagctgtcgacaggcgacagggtgggtctgctgtcggacgtgacgcgcatcttccgcgagaacggcctgacggtgacgagagcggaggtctcgaccaggggcgacgaggcggtcaacaccttctacgtccgcgacgcggccgggagcgccgtcgagctgaggacgctggaggccatccgccaggagattggccagaccgttctccaggtgaaggggcaccccgagcagccgaagccgccggtagccgcgcaggactcgcccaccaggttcctcttcagcagcctgttgttcagaccgaggtcgctgtgcaacctcgggccctgatgatgagttccagctccagttccagctagcgcagcgcgtgcatgagaattgagaactgtctgttgtcgggagatgctgctgtaccccaagggcccaagggcaagagttgtacaacgcgatcaggagtgttcattcgtcagaagctcagaacaggtgaccagaagtcgtttaaagcgaagcccacacccaacagctggtgaatactgaatacaccctatagcatcgtccaccgttgagtagtgaaaggtgtagttctgtaaggctatctccagtcctgtcgacatggtggtgccccattgcaagtatgattcattcaagcttgctgtaaatactgcctcccacggccatctccatctatttattctctagacatcagcagcggtcactgatggcgttgcctcttggggatattc

SEQ ID NO: 2036 - DNA, 6914 bp, Zea Mays
gtttattgactacgtgatgtggagaaccaaagcgaagtcgaccacaagatgtcgttgcgcgtgagcttctccacaagatgatgctgatgaacgaacctgaagatggatactctgaaagagtgccaagacaaaggatgatcgtcaagtggacgccatctaacaaacactaacctagtgtttattccaggcaagccccggtgcattcgccacctccttgtgttttaaaatctttatcaccttggttgatgcattaggtgataggagttgtgtgttaaaccgttgatgcattttcttccttgaaaattgattacccttccttgatacccgttttgaaaagaattttttgatgcttagcctttctctagaaaaacaaaatgttttgttttaaaacaaaaggtgatgcttcaagtgggatgggatgttttcaaaaataaaaacttgatggtggatccatcatggccatgatggattcaacatcggaaaagatgtacctctgccaggtaccaaactttgggtttaaattataaagctgagaccgggcgggtgacttgcacgagaaaggagtctcgatgtagtgtcttcgtctgagtcgtttaaggaccgtaccgattgttggcctgctgatctaggaccctttatctggccacatacctcgtcatgggtaagcttgaacccggctattccaaacatgaaaagacaatcgcgcactgggagtggagagatggcgagagtggcacgtaccctcctgacaaaggaccgcctaaaaggggtggtgtgctctcgggtggcgcggacctgttcatgtggtggaggatccgtgggaatggtagacatgtgcaaaagagttaagagaagcatatgtcgtgtggttggagatccccagctgggtattaatcgattcagatcgccgaacttctcggatatgaagactggatcttcgaccctcatcgtagataacaagcgaaacaaaggttggattttaaaagaaagctagtgtaggacaagtgaatgctctacattaggcaaatctagattcagaaaaagtacttaacttatgatgtaaaattttggcttaaggacccacttctagtaagcttttctgcaaatgagtctttgattcttgataagccataccttgaatccctctagccagcatacccttgagagtcttttctttagtcgggtaagtcttgctgagtaattccgtactcagtgttttattccctgttgtttttcaggttctaactttgtgctattgttgatggtgttaagtgccggtgggctcggccttcttataagtctaagtaactcttctatacttcttattgaggatgttcacttgagctagcatatattttaaaactataaataatttataatagtttaaagttatttctttgaaccacttctgtaaccactccgataaatataatgtaaaacttgatgtaacttgtaaaatttggtaaaaagatttccgctgcaaaatgttggtgtgtgatttgtgtttacttaatcttgtgatcctggttgttcgtggtttatccggggtccctgggacactcggacagatcctgttaagttatctggtgcatatgcatagccgtctgaggtctttgagacaagggcaggtgcatgtgggcccaataacttgggaggttctgccacagctggtatcggagcaggattaagtatatacggtcacatacgacttttcaaaacaaaagttttggtttcgaaaaacctattttcaactaaacacattgtttggctttgaaaaatagttttgaaaaactataatgctagcgacatcctctattaagccctaagttaaggactatcaggtggcttatttaaaaaccactaacccacaactgggggtattgcatacatgtgtattgttatttttgaggccattcagttttgaatggatcgacgctcaaggtaaggtgagatgtgagagcatgaccgaacaaacgtcggtctaggggagtgcttaattgtggcgcttgattatatacatgttccacatatgtatatatgaaggctacgatgtggagtatttacttttccgagaattcagtaccccatggatgtgtatgggtatacagacatgagaatactgagaagtgtaatgtacttgtaacgatgcacctacgctcaggtaagaaggtgagttaccataatgagttgccctatggttaaagtgtggcaacggcgcctatgtgtggctcggcgcttaatgaagagctggcctccatatagcaatatatggagtataaattgtgataaactgttatgtgtgacttgcatcattgggaattgggctgtgatggatttttctgcaggtacactaacctcgaaaacgtatgtgtagctgacgactagcaaaatactgtgagagtcgtaagtatgccaccgagatagaacgctactgccacagtatgttggcaaaatcagtgaggacgtataggacgagcatgcatcctaattgttgcatcatgtttgccacctatacacccaaaatgcttctctcatctttattctagtaaccattgattgtagataatgtggtgtaaggctgaattatgaacttcgatgaaataggtgtcctccattctttaggtaatctattaaggtcttatatggtgtttgcttttgtgcttgatgtgtcgatagaaggttagtgacttgtttgcctaaacccagaattaggccatgttcttatttagtgaaccatgacccaaaacttaaatttttccgttatcacttcaggaccaaacacataaaaataaatgcctagataatttctttgttggacctaaagtgtacccagcttaaaacaaaaatttcgagtcatgtctccatcctaaaccatgtccttgttcggttggtgcaagctgatgtaccttatccagtttgcctgtttttaaggaccgccatgttactttatcaacctaacctaggaaagacatgtcggaccattttcttgtatttgatgcctttggtttccccatacctatcgaaggcataccaatttaatccttgaccttgtgatctctatgatgggcacagaaatatgcttggggctgaattaacagtctcccatcgtactccctcctcaatttatttttggttatggccgtgccttattcatttcatcgggccatgatctattggctctctacttgtagccattttgacaggtagagtctctttgtacattgtcacccttgcccaattcaattgtgtcgcgtgagatttcttattggttatgtctgataatggtgttatgactaaaacctgtggtgccgtgacgaaaccgagggccttctgtgtgtgcgcacatggttgcgctactcggcacacgctagtatcacagttagtagtcataatccattatgagattatatcaatatgttatctttcatagacctcctccttgaaacaatttctatgttgtttgtgaagtggtcaagcaacatctgtcatctccggtggatcaaaagggcataccactttcatgtgtggtcttatttcttttgatcttggtagtgactactcatgcaagttccctttacgtcctttgtgtaaaggtgaagccttggagctttttagtgtcgagagacaactgattagctctcaaaatggagattggattttccctgctgttgagatgcaggagtttattcattcgctctcctatttaatccatgtatttcctaactaagtgggtagttcatctcgcatgaagaaacggatgaacaacctgaccaaatggatttctacccaaatgcatgaccttttgcttgcaaatgtgagctctcgaccgttggcttaccgatggtactgagaggacttgctcaatgtcaaaagtagttcaacaagttggttttactaacttgtaactgctttgtgaacaaaggttgagtttagagatcgttttatcgatttgcctgggctcatcttggttcaacccatcttaaggaagtactttcaaaaatcaagattaagtcggtcgataaccacctaattatcgctctagtcatgccttgaatgtctctcgtatgcttttccagcatgtgtgatcaagtcgagccatgatcagtgctggataaaatggactggttgtaaagtccgtatctatagatccctccgctggtgattctctcgaatctataccatctttcgtggacttgaattctcgggttagccatatgttaaccgcgacagtattcgacatccacccctgtcccctgtgctatgaacttatcgtaaccacttgttggtaaacctctttctttgtgttttacctaagaggttgcaactgattctgtttgggtaaagtcgtatatctaccgcttgctcaacagactcagatagtacagtgtcatcagaaaaagcaaactgcacacatggaaccttatgtgttcacctggcagagatcatctctattgttggaaatctccaaattagcttaaggcgatacatgttatgtccactagagaaacaacatcctgagacacttgccttcgctcagaactgccttataatatcgctgatatgtacatgggttacatgcttctctactcttgaaagtctttcgctccgaatctcgggacgagattcttttaaggggggagggctgtaacaccccaggtgtttatattctgctcgacaacgagtacggatttaagcacgtgatatcagtaaataagacgggcactaaggtctaattatttttgcctatcgcgattttaatatcgcatctgtttcgtttgtcgcgagtgcgacatcgttattatttttatctgtccgggctcttcctgaattttcttgctgttcggaacatatttgttctgaaaatcggtgcgtccggtgattatttaaaattcgtcgctcgcgaatacgaattcggaagctcgactcactcggatgatttttatcctgggcaaattaattcgaactcgacgactaaggttttcggtgcaaataattttgttcccacttgtcaaccgagacagctcattcgaggatttataattgaaatttattcgtttatctgtcctaaattaaatcaagcgcagtctaaatttgtcgaagccgaaattaatttgatccggtccgtgcgtttcttgtctcgatctaattttcttcaaatagaaataatggatacgaattaatctgactccgaagtattcatcaaatcctgtctaaatattattgtctatcttgttctggttctaccttttatacatcttttagatcttaatgtcagaacctcaaaatatctatattttgattttattaaaaaaagagaaagaagattttttttcaaatcatcttctaggatcggccttatctcatctacggccatccttacgtaacctctcatccatatccagagcctgctcgatctctatcgcttcacctgatattccccatcgtacttgatgcaagcacagagctatccctaatccgtttccacgtacactcctcacggctcgtcaccaagcgtcgcttccatctctagattttctttctgctgtgccgtcaccgcttccctcttcaaaaatctcatcacccgtcggccttatcctgccgccgtcttcatcttcctcgctgctgcgctcgtgcccacacggagcatcagttctggcgcagcagaagcagccatcctcgcccaggctttgctcggcctcctctccatctctctgcgtcggcctctcctgcctgctgctcggtcccaagctccctgtgcgcgcggtactcttccttcccatgttactgcgcgctctacctttcttcccatctccctgcgctcgccgcggctccctgctgcactgcagctcgccgcgcggctctcatggcgtgctcctctctgccgagcggctcttccccacgatgccgtcgaatcccgtcttcctctgctcgcgcgggccgcgcccctgcttcccctccctagccgagctcgccggccggccgctcgcccctgtgccttcgctcagctcgccatggaggttgtccgccatggtactctgcatcccgagctcccgtgctcgcgcggcttcctgctcgtcggttcttagactgaagctcgcccggcgcgcccatctctctgtctccccaacgctcgccatcgtctcctgtctggtcgcgccctgctccgccgtcgtgttctagccgcgcgtgctctggtggccgtcgtgctgatcgccggctgaaacccctttagtgcctgacactgcatctccctggtgttcgcctctgttttcccctggcgccgagcccctccatcctgtcctagcagcaaaagcccagccactgcgcaagctacctgctcgatagaatgttcagccgctcgtcagatctgcgcagtccctgcacgatgtcgcaaaatccgctcgttgtcgatgccgcgcttcgtgcatcgtgtgttcgacgaaaatctccagcatgtggacagcacacgccacgtgggttacagcatcaggtacaatccagtggtaagaattcgtcatgacgttgtgtggctaggagatgggaggtaggtcagtgttgagcaccaaaatgaggtgcggacggtccggccctgaggccggacggtccgcggtccggacggtccgcgcctgtgggccggacggtccgcgcacgcgcagaatagattagagttccgagttttgtgctatgtttgttagctatatccgcggaattagctcggaatccggtcgtgtaaagggtccagcccccctcctctataaaaagagaggcctacggccgatttgtaatcatcaacaatcgaataaatacaacttttattcgcattttatcctaggagtaattctagtctagtttaggtttagcctcccaatccccaaattcttcgtctctcttcggctctacgtcgattagaggag

SEQ ID NO: 2037 - DNA, 913 bp, Zea Mays
cgtgcatcgcgctaaggaacatgtccatcggggatgtgtgtcctaaggaatccgaagagcctccaaatgcacaagatcaaccatcctcctccacgcaagcatctccaccaactcaaaatgaggatgaggctcaagttgatgaaggagaagatcaagcaaatgagccacctcaagatgacagcaataatcgagggggagaggcaaatgatcaagacaaggaggatgaagaacaaagaccgccacacccaagagtccaccaagcaatccaacgagatcaccccgtcaacaccatcctcggcgacattcataagggggtaactactagatctcgtgttgcacatttttgtgaacattactcttttgtttcctctattgagccacacagggtagaggaagcactacaagattcagattgggtggtggcgatgcaagaggagctcaacaacttcactcgaaatgagctgtgtaatcgaccgttgagatgcgcttgtcgacagcagcccttgaacactgtgccggcactgccaccccccacgcctgattgcgatcgttgcttgcaagttgcaactggtgcttcacgacagcagaggagccgatggcgatgaagaagctaaggctacacgaaacttgtggcttctgactagctcattggaagctagcttcttgttcttctatccaatcttttttactctactatatcatctatacgcatgtgtccttttttgtgtgtgtgtgtgtgtagagagagagagtgaaagtgagaacatacttccatatgtataacgggcggccagcatttctgattgctgccatatacagtactctctttatcctgaaacatacttctctaaggcaagccctacgtttttctacaaagtacttataagatatagtcaattaatatactttttac

SEQ ID NO: 2038 - DNA, 1808 bp, Zea Mays
catggatctaacaagcacaaccactgccttcttatccggtctgatactgatccttgtgtcacttgttgctcacaaagccagaacaagcagatccatgaagaggaggcctcctggtccacgggcgctccccttcatcggatgcatccaccacgtgctcacctcgcagccgcaggccgccctacgtgacctggctcagaagcatggcccggtgatgtacctgaagctggggcaggtggacaccgtcgtcatctcctcgccgacggcggcgcaggaggcgctccgggagaaggacagaagcctggcgtcgcggccgagcttgctcggctcggagatcatctgctacggcaaccgcgacatcgccttcgcgccctacggcgactactggcgctcgctgcgcaagatgtgcacggtcgagctcctcaacgcttccaaggtgaggcggttcgcggccatcagggacagcgagaccatgtccctggtcagggagatacgccgcgcctgcgccgccgccagcggagagcccgtggacctcggcggcctgctcctgtcgtgcaccaactccgtaaccggaagggcagcgttcggcaaccgctgcagcagggagctcacggcggatttcctgtccgccatctccgtggtgataagcaacatctcggggctctgcgtctcggacctcttcccgtcgctgcggttcgtggacgccctcaccggcaccaaacgccgcctgcggagggcgcaccagcggctcgaagacgtgtttgccaggatcatctctgacggggaggcacggcgggcggaaaggaaggggactggtgctggtgcaggaggagacgacgacgacgacgaccttctaagcgtcatgctgaggattcgcgacgagggatttattcacaggagggacggagacgacttcgtcggtggccgagtggctcatggcggagctgatgaggaaccccgacgcaatgcacaaggcgcaagacgaggtgcggcaagcattcgagcacagcagccccgacgagcacgaagcccagatggacaagctgcgctacaccaagacggtgatcaaggagaccctgaggctgtacccgcccctcccgctgctcctccctcgccagtgccgagagacctgcgacatcggcgggttccaggtggccaagggcagcagggtgatcgtgaacgcatgggcgatcgcgaggagcccggcgcactgggacgacgccgacaggttcatgcctgaaagatttgagcgcgacgatagcgcggcaggttattccagggctactactgatggcactacacagtttgagtacctgccgtttgggcacgggaggaggatttgcccgggcatgggcttcggcttgtccaccttggagatcctagttgcgcggctcctctactactttgactggagccttccggaaggaatgcaggtggtggacctggacatggacatgactgtcggtgcgtcggccaggaggaccaacaaactgcacctagtggcctcgccgtatcaagtgcccacgtagatttcatatgatggttgcagttttgcaaccaaaagttgtgcctctttttcttttcctggcttctttcctatcctgcggaaatcaaataaggccttgttcggttatctcttaatccatgtggattgagttggattgggtgggtttaaatcccaaacaagtcaaagttcttctaaattttttccaatcccgctcaatccatatataatgggaataaccgaacaagacctaaacagtttacgtattcactaccaactccagcagcctccgtatccaactctccgg

SEQ ID NO: 2039 - DNA, 825 bp, Zea Mays
aactcggctcgtgaaaaaatcaattcaaaaaagctgatccacgccgcgccaaacacgaacacatgagccgatgagtcaagaacatttcgttcatctctaccaacaaatagaaacaagggaaaaaaatgaaagaaacagccacaattgactgcagctcacatcgatttatcaatggagctgcagcaaagacacatcttggcatgttgcgatttggatttatacagacagctttagaaccatacatacatgaccgcttttacacatcttacaccgcagcaccctacaatcttcagtttcagcatctgacaatcaatatacacaatgtggcatacggtggatatatctcaacttctcatgggcaagctgcaggctgcaagagttcgttagactgattttacaggagctagtttcagcatccgaactaaagcatgaactgttatagaccagcaaggtggaatctgaactgttatagaccagcaaggtggaattcttggctagtttgggaactccatttttccaagggatttctattttctcaaagaaaaatgaactaatttcccttgtaaaaatggggttcccaaactgctctaaaccatagaactcaggtttcctcgcttccgtcagtatcagatgggtacagaaaatgtaacggagcatccacttgaccatctctgtactgtatttgattacctgcagaaccattttgaccaaatgagatgaagacagcagcttcacaaccttatcaagatatagaattactacaagtgaagttgagcaatagaaaaaaaaacatattcttcctcataaggcagtgcaagtccagtg

SEQ ID NO: 2040 - DNA, 1200 bp, Zea Mays
ccgtcggatctccatccgacgaccaaacgccgaaccccgtcatatataaatttacgctccgcctgccacgccgctcctccaaaccctagtctcagagcagccgcatccacaacctgcctctctcgtcccctggcggcgtccgcggcaggatggcggaatctacggcgaggacggtgaaggatgtcaacccgcacgagttcgtcaaggcctactccgcccacctcaagcgctccggcaagatggagctccctgagtgggttgacattgtgaagactgcgaggttcaaggagcttcctccttatgatcctgactggtactacatcagggctgcatccattgcaaggaagatctacggtggccgccagaggaatggctcccgcccaccacacttctgcaagagcagtggtgctgttgcacgcaacatcctgcagcagctgcagattatgggcatcatcgatgtcgatcccaagggtggacgcctcatcaccaaccagggaaggcgtgatctggaccaagtggctggaagggtcgctgttgaagcgtgagcagtgtcatctttggtttcaatggtgtcatgtttgatggttgagaaggctgcgctctatttgctcttttgggttaggattttcgagttcagaggactttaaggtttattgcatctagctatggcgccacactatgttccccgagtacctaatgtgatatcaagactcaattctcgaatctaagatatatgtttgcaaagtgtctgaccagatggcaaggacacagaagaacaaagccactgctcaccatcttggtcttctgaaggtgaaggatttgatgtgacgaagagtggagatgcacgtgttggtttagttggctttccttcgattgggaaatcaacattgttgaacaagctgacagggacattttcagaggacattgagagtgatgacgaggaccttgattttgaggttgatgatggagctgaggatgaacctaaagcatgatgcggaagatgccccagccgaacctgctatcaagacagttgtggccctggctgcgccacctaaagatacagaaagacagttgtctaaaaaggagatgaaaaataaggaactagcagaacttgatgtagtattggctgagctcggactttctgggatttgagcatcgctgcacaggatggtgagagtcatacatgttgccgttaaaact

SEQ ID NO: 2041 - DNA, 828 bp, Zea Mays
tatacgtcggttttaggcaaaatctaacagtattttgaagatcccccagcatttcatctatgcagggcctatatgagatggagctccctgagtgggttgacattgtgaagactgcgaggttcaaggagcttcctccttatgatcctgactggtactacatcagggctgcatccattgcaaggaagatctacctaaggcaaggcatcggtgtgggtggctttcagaagatctacggtggccgccagaggaatggctcccgcccaccacacttctgcaagagcagtggtgctgttgcacgcaacatcctgcagcagctgcagattatgggcatcatcgatgtcgatcccaagggtggacgcctcatcaccaaccagggaaggcgtgatctggaccaagtggctggaagggtcgctgttgaagcgtgagcagtgtcatctttggtttcaatggtgtcatgtttgatggttgagaaggctgcgctctatttgctcttttgggttaggattttcgagttcagaggactttaaggtttattgcatctagctatggcgccacactatgttccccgagtacctaatgtgatatcaagactcaattctcgaatctaagatatatgtttgcaaagtgtctgaccagaagcgggtggaaaacaagattttatttccgtatacacattttaagattatgtgagatatacacatttcaagattatgtgttatgtggggctggctattcattgcagacattttaagattgcgtgactgcgtgagggtcacgtgcagctatcaattgagtgaatctatagttcataggttcatgcctaatttt

SEQ ID NO: 2042 - DNA, 4346 bp, Zea Mays
caaaatttgaatagtcttggattattttgaggtatggattgtaatctctactacttattaagtatgtaaaggtagtctgcctctctctgttctgccgttctgccatctagctatctcgatcgtccgatattgccgtggagctcctctcccgtccgatgcacgctccctccagtcctccaccgacgccccacacgcgatgtgccgagatatccgcccccacgactcgcgagtccatcgccaccgacgcccgatccatggaaggaacctcctcccaccttcctctgctccaccctccctctcctcgcctccatcgtcggtaccggactccttcccttcctcttctccttcacatccctcgccaatatgcctgccgctacctccgccgcgtcgtcgtccccgcgcccgttgtcaacccccgtcgcgcgccccctcccctcgtcgtcatccacaaccccgcttcccctcccgtgatgggatctgggagcagcaagaccaccactgcagacgacctcgaccacccacatgctctcctccggaccgacgtcgaaatcggggtgacgacatcgtcccacagtgtctccccaaagttgggaggcgacgacgacgattccaagtgtgtgaggtgcgtcgacgagcaaaaggggctaggttgtcccagtagtctagggttcgcgtcacggaatcagagcgcttcctagatctggtcgtcgccggcatctaggcaatggtggcgaagaacgtcgtcagtcgaggtcctggagcggtgttgcgaatggactcgaagtccgtcgacttggagagaggctccaccaggcgccagacggtttgttcagaggtcctgaagtgtaagtacagcaaagcggagacaaatatagtgattctgaaaagattgggcgccatggttttgcatggtgttgatgcgaaacgaatgaggtttcacactgacttgaagaacagacggtttgatcatattgtctttaattttcctcgtggtggattcagaggaaaagagaatgacttgcgtatgatcgacttgcacaaggagttggtgtggggttttttccgcaatgcacgccacattgttcggcaacttggtgaagtccatgttacccacaagtctggggaaccatacggcagctgggatcttgagcacctggcctctgagtcttcttttgctatggttgacaaagttccttttcaaagggaagactatccaggttataatcaaaagagaggagatggtaagagatgcaacaaaccttttgatcttggtgcatgttgcacattcaagttccaaatcagaaacttgaagaagctgaagcaaatgaataggaggtctcgtttaatcccaaaccttggaggcaacaactttcatccaggccattcggtaactgacaggggggtatttcatccggttgcacctgttgaagcaaggtcttggcaccatttttctccgctagctcacacaggaagcatgctgatgtctccgcagccttacacagttaatcaatgtcaacgatccgggagatgcggttcatatcccaagccggtggagagttgccacccggtggtgagcatgccaggcccatgtctgaatgatttgcccgctcaaggtggcattcctccacctctaccaatgagcagaatcccatctcctgatctccttgcacctcgggagcagccttggtatcagcagagaactattcttgatcacctaggagtcgatgactacttctttgcccgggaacaccaaatgagtctgcagagggagtatgaaatgaagaggcaagtcattccattggaacatcgccacacggacagggagtctgttgagaagctagagtggctgcacaggatgatcgcattgtatgatggcaaggacacagaagaacaaagccactgctcaccatcttggtcttctgaaggtgaaggatttgatgtgacgaagagtggagatgcacgtgttggtttagttggctttccttcgattgggaaatcaacattgttgaacaagctgacagggacattttcagaggttgctgcctacgagtttacaactttaatcatgtataagggtgctaaaatctaggtgacatgagcttttatgttctcagtaccagcacatgctatgacattgagaagcatcacgtcgtagccttgctgcattgagaagcagtgatctttgttcttatttggaaatggttatacttgacaggacattgagagtgatgacgaggaccttgattttgaggttgatgatggagctgaggatgaacctaaagcatgatgcggaagatgccccagccgaacctgctatcaagacagttgtggccctggctgcgccacctaaagatacagaaagacagttgtctaaaaaggagatgaaaaataaggaactagcagaacttgatgtagtattggctgagctcggactttctgggatttgagcatcgctgcacaggatgctgagaataaaggtgccaaccagactggtgacacggtcgctacctcctcttggccgctggacgtctctccttcctagccttcgcctgtccctcctcccctgcccgctacccccgtagacaggcacgttgctacctcctccacgccctaggagaagccgcagggcccgccacccctcaccatgttcggcgtcgacggccaggaggtggagccatgaatgatctatcctaggtatacctccagcttcccttaccatctccttggcctcttcctccccccttggccttctccttctgatgaatcattttacctagatttgtcactgcttgctaatcgttgctccaaccgttgagtttgcgcggtggatttcttttcctagcatcaacacatgtaaaacaggggagatttagatccaacacatcagcgaagtggcgcccttgctggcacaataatacgtccaggtctcgtagaacacctaacactggtaagtactcctaatatgcaagtggttatgctgatgttgatgaatcgattggtattttgagacttgtattatgtctcctttgaggaggttttattttcaccaggtacactacattatttgatgatcgtattatggttatttgatcactgtattttattatttgatcgctggattatctggacaaattacgaatatgcctactactgtatcataattacttgttgcctactctatcgacctttgcaaagattgctactgttttgttgtctaaaccacttgctatcaatatttcttaaagtgttgtgtatctaatcgtcctctaataagcacatcagttaagttcaagttaacacaattacactcccatacatgtatacaatgatgatgacctgttgtacattctgattgcttgggtattcattctctggtgctcatagtctaatggatggtatgatcaccgcttagtatgttctgttctgtttttgaactgaattatctcaaccttttatctaggattgtgtagtggtctagggattgcgtattaggatattgaggatgggattttcacaaattgctacagtccaattattttcttcccttctaccctgctacacgccagatcatatgttataatggtgtttgctgctggaggcacatcccgattcgtcggtatggacttgaagtttaatgccacacctgctctaggagagcagacaaccttcaagtgggtcattgatcatgggtgtaaaatgatgaagttgctaaatccaagcaatcaactgtctccacaaaaaacaaagaagtttaaggaaattcaatttcagaaacttcagagattgccagatgggtgccatcctgattttgataatgatcatctgtgttctataaataatcatgacctgcttcctaaaatgagtactccaagtgctgaccttcatctacttcctgagacaggagtggaaaacatgaggacacctaaaagtcttcacgctgaacttaagcgtgagctgtcaaaactaaatacggtgttaaagctaccagataatgtactctttctggccaaccagtttctttaatatcttttaaataatcatttagttgtgcgggagccacggagcatattgtatgcgttcaacatagccttgtgttggtgtgctgcttcttttctgaaatacactgagttggatcatcgagaatcacttgcccttgcttcagatggattgaattatgaatgcaatgaggctccatcataggcaggcttataggttcgtagtatcattaggacggacatcttactataacaatataagacacattttgtatataacacatgtgcatatataagttatcgagatattatatgtcttcgttgcaacgcacgatcactgacctataaaag

SEQ ID NO: 2043 - DNA, 1373 bp, Zea Mays
ctatcctaggtatacctccagcttcccttaccatctccttggcctcttcctccccccttggccttctccttctgatgaatcattttacctagatttgtcactgcttgctaatcgttgctccaaccgttgagtttgcgcggtggatttcttttcctagcatcaacacatgtaaaacaggggagatttagatccaacacatcagcgaagtggcgcccttgctggcacaataatacgtccaggtctcgtagaacacctaacactggtaagtactcctaatatgcaagtggttatgctgatgttgatgaatcgattggtattttgagacttgtattatgtctcctttgaggaggttttattttcaccaggtacactacattatttgatgatcgtattatggttatttgatcactgtattttattatttgatcgctggattatctggacaaattacgaatatgcctactactgtatcataattacttgttgcctactctatcgacctttgcaaagattgctactgttttgttgtctaaaccacttgctatcaatatttcttaaagtgttgtgtatctaatcgtcctctaataagcacatcagttaagttcaagttaacacaattacactcccatacatgtatacaatgatgatgacctgttgtacattctgattgcttgggtattcattctctggtgctcatagtctaatggatggtatgatcaccgcttagtatgttctgttctgtttttgaactgaattatctcaaccttttatctaggattgtgtagtggtctagggattgcgtattaggatattgaggatgggattttcacaaattgctacagtccaattattttcttcccttctaccctgctacacgccagatcatatgttataatggtgtttgctgctggaggcacatcccgattcgtcgatagggccgagtgcatctgcctcattcacaagataaacgacgctcctaccccctcctctgttttctacctgcttgaacatatcagcaatcttgcttgtataacttgtggatggtaggcctggagcgctgtcgaattccttccttagcgcaactgctgttcaggtatggacttgaagtttaatgccacacctgctctaggagagcagacaaccttcaagtgggtcattgatcatgggtgtaaaatgttaagctgaatgcaaaccgtcgagatggtcttggtcgaggacctccatggcacctacattggtgtgagttgtgtcgcctcatcgcgaccgtcatcgattgggccttcgaggtgttgtactgtttcttagaattttccagcaacttcgatgggaggaattttgtttgagcttgtgggcccaattcatatcagtcgcga

SEQ ID NO: 2044 - DNA, 1474 bp, Zea Mays
caagtggaatgatgctccgtccattatagctaggcgcaagcagcaggaggtgtgtttgagttgttcagtttcttcgccggccggccggccgggagagacacactgcttgctaattatgactgcgatgatgatgaggaggtacatgcctcacgctctgatggtcctggcgcagctcttcttcacgctcctctacttcatcgccgaggccgccttcaacagggggctcaactccttcgtctacgtcacctaccgccacctcctcgccgcctgcatcctctgcccattcgcctacttcaaggagaagacgctgaggccgaaaatgacaccaatgctgttcctggagatattcgtgctgtcacttgtgggggggagcttaactctgaacatgtacttctcgagcttgaagtacacgtccccgaccttcgtcacctccatgctcaacaccgtggcctcgatcacgttcgtcgtcgccgtcgtcctcaggttggagatcgtagacgtgaggaccctgcgggggctcgccaagatcgcggggaccgcggtgtcgctggccggggtgaccaccatcagcctgtacagaggagcggccgtgaagaggccgtggagggcgcccgccgtccacgtacacggcatcggcggcgccggtcacgtggagccacacgagagctgggtcaaagggtcgctgctcgcgctggcgagctgcatctgctggtcgatctgcttcatcttgcaggcttcgtccataaagaggtacccggccaagctgtctctgacggcgtggacgtccctggtcggcggcctgcagtcggcggccttcgcggcgttcgtgcagcgggacgcgcgggactggctcgtcggcttcggcctcaacttctgggccatcgtgtacgcgggagaaaggccccgtgttcgtcgccatgttcaaccccctcctcaccgtcatggtggcactcctcgcctacttcgtcttcggcgaaaacctatacgttgggagcgtgattggagggctgcttgtgattctggggctctacatgctgctgtggggcaaggacaaggaccaagaacagcacgtgtcgtcgtcatcggaggagggcaaagagcaggagcacccccatggccatgatgagctggacctgcactacagcgtcagcttgcgagaagcagcagtcggccgaggccgaccgtgatatgtatgtatgtctgtataagtgatcattttgttggcagttggcactgtacgcactactacagcacacctctgtacaggcggtctggttcgccactacacaggcggttccaggaaccgcttgtggtgcaccgcctgtgatgtagcggtcaatcaaaaaccgcctgtgaaaaacacagattacaggcggtccagttcaacggaaccgcctgtgatagacacacatcacaggcggtccagttcaaaggaaccgactgcattcactataaatcacagacgattttcatt

SEQ ID NO: 2045 - DNA, 1344 bp, Zea Mays
ttcagtttcttcgccggccggccggccgggagagacacactgcttgctaattatgactgcgatgatgatgaggaggtacatgcctcacgctctgatggtcctggcgcagctcttcttcacgctcctctacttcatcgccgaggccgccttcaacagggggctcaactccttcgtctacgtcacctaccgccacctcctcgccgcctgcatcctctgcccattcgcctacttcaaggagaagacgctgaggccgaaaatgacaccaatgctgttcctggagatattcgtgctgtcacttgtggggttggagatcgtagacgtgaggaccctgcgggggctcgccaagatcgcggggaccgcggtgtcgctggccggggtgaccaccatcagcctgtacagaggagcggccgtgaagaggccgtggagggcgcccgccgtccacgtacacggcatcggcggcgccggtcacgtggagccacacgagagctgggtcaaagggtcgctgctcgcgctggcgagctgcatctgctggtcgatctgcttcatcttgcaggcttcgtccataaagaggtacccggccaagctgtctctgacggcgtggacgtccctggtcggcggcctgcagtcggcggccttcgcggcgttcgtgcagcgggacgcgcgggactggctcgtcggcttcggcctcaacttctgggccatcgtgtacgcggcgatcgcctgcaatggcttgaccgtcgtcatccagctgtggtgcaacagggagaaaggccccgtgttcgtcgccatgttcaaccccctcctcaccgtcatggtggcactcctcgcctacttcgtcttcggcgaaaacctatacgttgggagcgtgattggagggctgcttgtgattctggggctctacatgctgctgtggggcaaggacaaggaccaagaacagcacgtgtcgtcgtcatcggaggagggcaaagagcaggagcacccccatggccatgatgagctggacctgcactacagcgtcagcttgcgagaagcagcagtcggccgaggccgaccgtgatatgtatgtatgtctgtataagtgatcattttgttggcagttggcactgtacgcactactacagcacacctctgtacaggcggtctggttcgccactacacaggcggttccaggaaccgcttgtggtgcaccgcctgtgatgtagcggtcaatcaaaaaccgcctgtgaaaaacacagattacaggcggtccagttcaacggaaccgcctgtgatagacacacatcacaggcggtccagttcaaaggaaccgactgcattcactataaatcacagacgattttcatt

SEQ ID NO: 2046 - DNA, 863 bp, Zea Mays
tccgtttggccataacgaatctggccgaggagcgctcctgaccgagctccctcccggcagcgagccggtcccgtccattactggcggcgctcccatccttctcttccccgcgcctcgtccgtgagctccagttaagcgcgcatggccccggttggcgagctccagtggccgtcgtgccgagctgaggccattgctctcctccactctcccaggcagatactgcaatggatactcccggcagcaatggagaatccacagcaaccggcgacgagaaccacgatgttgagcacttgttgattgaggtaccagccgcgccttaggatattagtgctccccctcccattaatgttgtagagcaaggtcattcggtaccggattcgtcaactcaaggaaatgattttgagggaattttaccggatttacgatgggaagaagaaggacctcaacatgtacccaacgagagtgttatgtacctcaaacttggattagttgtcgaggatgaacgagaaaataaagagagagaggatgcttgcaatcgtagaggtcatggaaataatctagatgaacttggtggcgatggttcagcacctttgccttgtgttgattttttgccgcacaagaccagagttgtctatgactctaatcatccagcgatggaggttggcagcttgtatgcatctatgactgaatttaggctggcaatgagacaatatgccatagacaaagaattcgagttaggtattgaggctagtaccccgaagaaatatagaggctattgtcgtggaggcgactgtccttggagcataaatgcataattgtatgtttttctatgtcgagaacttaacatttatttatttaatttg

SEQ ID NO: 2047 - DNA, 2926 bp, Zea Mays
cggccccaaccccatgcgtcaagggatcaaaccatggcgcgtgtgcacatcgccaccgtcggcgctgcccagtcaccgcgccgacggcgaaatatattccggggtcccacgtggaagcatccggaggaatacacggatacacctccgcctcggtccatcgcaactgcaatcttctgctccgtcctgtaggctgtagctgcagcctgcagggagcgagccataaaggagactacgtagcggccgcggagcgcggggacgacggagggagacagacgggcgcggcagggaccagggagccagcagggctaggcgacgctccttccagttctcctatccatgatttcattctgagacattcacatgcttccatgtgattgaccttgtccctaatgttctgatcaagattgccatggttgaaaggctatagtttcttatggtccatgtccacgattcaagaataaaatattgtttggcccatccattgtgataatggtctggttgcaagaccagctggaaatgcacaagttccactgtgtggcggcgaaagatcagtttaagctggatgaaaataattgccagatcgaagaggaagaattttgaaagaaaccatgaggttcctactgctgaacatgtttggaacacagaatcattgattcgtgcaaaaggaatgatgtgctgtgtatgcttggaatctatctcacctgctcagccccttgggcagatgatgacatcagaaaatatggttcaccgctgcaatgtttgcggtgcagctgcgcacataatatgctcttcaaattctcagaaagactgcaaatgcatctcaatgtttgggttcaaacatgtggtccatcaatggactgtactctggacagacatagctgaccaatccgaagaaggccagtactgtagttactgtgaggagttatgcagtgagtcttttctgggaggtcctcccatatactgctgcatgtggtgccaacgattggtgcatgctgattgccagtctgccatggctactgaaaccggtgaaatttgcgaccttggtcccttcaagcgccttattctgtcgccactttttgtccgggccattagcaaacctggtagcatcttgagttctataactcatggagcaaatgagtttgcaaccactgtgcgggggcgtttaaaccgaactaaaaaggagaagcatcagaacagattttcatctgacagcaacgatgattcatcaagtgataccacgttgaactcaaaccagagggctggagaattaaaaacaattggcgacagtgctcaaaggagtcctgagaatgagcatgatagcagtgagagtgatggtagagaactcatatcggagtccagaaggctcggtaatgatgagaccggtgaagttaaacttaagtacgcattgtctgaattgcctgctgattccagaccccttctaatttttatcaacaagaaaagtggggctcagcgcggagatcttctcaagcacaagctacattttcttttgaatccggtgcaggtttttgaattaagttcttcacaagggccagaaacaggattatttttgttcagaaagctggcactggcaatgatctttcgagagttttatcatggggaggtggcctaggtgctgttgagaagcaaggtggcctttgcacaattttacatgacatagagcatgcagcagtcactatccttgatagatggaaggtgacagtagaagataagaaatcaaagaatgtgcttctagtaaagtacatgaacaactatctcggtatcggttgtgatgcaaaagttgcccttgacattcataatctccgtgagggaaatcctgagaaattctacagtcagttcttaaataaggtgctatatgcgagggaaggggccaagagcatcattgacagggcttttgtggacttaccatggcaagttcggttggaagtcgatggcaccgagatcgagataccagaggactcggaaggcgtgcttgtcgcgaacatcccgagctacatgggaggggttgacctgtggcaaaacgagggtgaggatcccgaagattttgacccgcagtcgatccatgacaagatgctcgaagtggtcagcattacaggagcatggcatctgggaacactccaggttggactttctcgggcgcggaggatcgcgcaaggccagtcgatcaagatacagatgtttgcccctttccccgttcaagtcgacggtgagccttgggtccagcagccctgcacgctcaagatatctcatcacgggcttttatgttgaggagagcagttgaagagccactgggtcatgccgctgctatgatcaccgacgtccttgagcatgcagagtccagccatgtaatcactgcttcgcagaagaaagccctcctccgagaaatggctctacggctgtcatgaagcaagcgccgctcattcggacgtcgcagaagaacggtttcctgcctctgcctgcacatcggtggttagtacgaggatctgtgatctcaacatgagctcgatcatgttgttagcagaagatacaggcccggagggacgtgtccacgtgcacatagagtttttttttttggggtcatgttcacgttttggaaatagcgaggcaatgttgtgtgcagctatgtatggtgtgtagacctcgggtaagccagttccttccttctgtgcaaaactagttacgcctgcggcctgccattccgtgttaggttgactggatggatttttagggctgcgtcgctgccacttcggttggtgccccatatgtaaacgagatgggcttgaatgcttggttgtaacctttttttttaatgataggagctctgtcctttaattaagacgaaagaaaacatatgtacaagaagagaacatattagatgcgaactaatttacaaacagcacaaattaat

SEQ ID NO: 2048 - DNA, 2878 bp, Zea Mays
cccaaccccatgcgtcaagggatcaaaccatggcgcgtgtgcacatcgccaccgtcggcgctgcccagtcaccgcgccgacggcgaaatatattccggggtcccacgtggaagcatccggaggaatacacggatacacctccgcctcggtccatcgcaactgcaatcttctgctccgtcctgtaggctgtagctgcagcctgcagggagcgagccataaaggagactacgtagcggccgcggagcgcggggacgacggagggagacagacgggcgcggcagggaccagggagccagcagggctaggcgacgctccttccagttctcctatccatgatttcattctgagacattcacatgcttccatgtgattgaccttgtccctaatgttctgatcaagattgccatggttgaaaggctatagtttcttatggtccatgtccacgattcaagaataaaatattgtttggcccatccattgtgataatggtctggttgcaagaccagctggaaatgcacaagttccactgtgtggcggcgaaagatcagtttaagctggatgaaaataattgccagatcgaagaggaagaattttgaaagaaaccatgaggttcctactgctgaacatgtttggaacacagaatcattgattcgtgcaaaaggaatgatgtgctgtgtatgcttggaatctatctcacctgctcagccccttgggcagatgatgacatcagaaaatatggttcaccgctgcaatgtttgcggtgcagctgcgcacataatatgctcttcaaattctcagaaagactgcaaatgcatctcaatgtttgggttcaaacatgtggtccatcaatggactgtactctggacagacatagctgaccaatccgaagaaggccagtactgtagttactgtgaggagttatgcagtgagtcttttctgggaggtcctcccatatactgctgcatgtggtgccaacgattggtgcatgctgattgccagtctgccatggctactgaaaccggtgaaatttgcgaccttggtcccttcaagcgccttattctgtcgccactttttgtccgggccattagcaaacctggtagcatcttgagttctataactcatggagcaaatgagtttgcaaccactgtgcgggggcgtttaaaccgaactaaaaaggagaagcatcagaacagattttcatctgacagcaacgatgattcatcaagtgataccacgttgaactcaaaccagagggctggagaattaaaaacaattggcgacagtgctcaaaggagtcctgagaatgagcatgatagcagtgagagtgatggtagagaactcatatcggagtccagaaggctcggtaatgatgagaccggtgaagttaaacttaagtacgcattgtctgaattgcctgctgattccagaccccttctaatttttatcaacaagaaaagtggggctcagcgcggagatcttctcaagcacaagctacattttcttttgaatccggtgcaggtttttgaattaagttcttcacaagggccagaaacaggattatttttgttcagaaagctggcactggcaatgatctttcgagagttttatcatggggaggtggcctttgcacaattttacatgacatagagcatgcagcagtcactatccttgatagatggaaggtgacagtagaagataagaaatcaaagaatgtgcttctagtaaagtacatgaacaactatctcgttgcccttgacattcataatctccgtgagggaaatcctgagaaattctacagtcagttcttaaataaggtgctatatgcgagggaaggggccaagagcatcattgacagggcttttgtggacttaccatggcaagttcggttggaagtcgatggcaccgagatcgagataccagaggactcggaaggcgtgcttgtcgcgaacatcccgagctacatgggaggggttgacctgtggcaaaacgagggtgaggatcccgaagattttgacccgcagtcgatccatgacaagatgctcgaagtggtcagcattacaggagcatggcatctgggaacactccaggttggactttctcgggcgcggaggatcgcgcaaggccagtcgatcaagatacagatgtttgcccctttccccgttcaagtcgacggtgagccttgggtccagcagccctgcacgctcaagatatctcatcacgggcaggcttttatgttgaggagagcagttgaagagccactgggtcatgccgctgctatgatcaccgacgtccttgagcatgcagagtccagccatgtaatcactgcttcgcagaagaaagccctcctccgagaaatggctctacggctgtcatgaagcaagcgccgctcattcggacgtcgcagaagaacggtttcctgcctctgcctgcacatcggtggttagtacgaggatctgtgatctcaacatgagctcgatcatgttgttagcagaagatacaggcccggagggacgtgtccacgtgcacatagagtttttttttttggggtcatgttcacgttttggaaatagcgaggcaatgttgtgtgcagctatgtatggtgtgtagacctcgggtaagccagttccttccttctgtgcaaaactagttacgcctgcggcctgccattccgtgttaggttgactggatggatttttagggctgcgtcgctgccacttcggttggtgccccatatgtaaacgagatgggcttgaatgcttggttgtaacctttttttttaatgataggagctctgtcctttaattaagacgaaagaaaacatatgtacaagaagagaacatattagatgcgaactaatttacaaacagcacaaattaat

SEQ ID NO: 2049 - DNA, 2886 bp, Zea Mays
gtcaagggatcaaaccatggcgcgtgtgcacatcgccaccgtcggcgctgcccagtcaccgcgccgacggcgaaatatattccggggtcccacgtggaagcatccggaggaatacacggatacacctccgcctcggtccatcgcaactgcaatcttctgctccgtcctgtaggctgtagctgcagcctgcagggagcgagccataaaggagactacgtagcggccgcggagcgcggggacgacggagggagacagacgggcgcggcagggaccagggagccagcagggctaggcgacgctccttccagttctcctatccatgatttcattctgagacattcacatgcttccatgtgattgaccttgtccctaatgttctgatcaagattgccatggttgaaaggctatagtttcttatggtccatgtccacgattcaagaataaaatattgtttggcccatccattgtgataatggtctggttgcaagaccagctggaaatgcacaagttccactgtgtggcggcgaaagatcagtttaagctggatgaaaataattgccagatcgaagaggaagaattttgaaagaaaccatgaggttcctactgctgaacatgtttggaacacagaatcattgattcgtgcaaaaggaatgatgtgctgtgtatgcttggaatctatctcacctgctcagccccttgggcagatgatgacatcagaaaatatggttcaccgctgcaatgtttgcggtgcagctgcgcacataatatgctcttcaaattctcagaaagactgcaaatgcatctcaatgtttgggttcaaacatgtggtccatcaatggactgtactctggacagacatagctgaccaatccgaagaaggccagtactgtagttactgtgaggagttatgcagtgagtcttttctgggaggtcctcccatatactgctgcatgtggtgccaacgattggtgcatgctgattgccagtctgccatggctactgaaaccggtgaaatttgcgaccttggtcccttcaagcgccttattctgtcgccactttttgtccgggccattagcaaacctggtagcatcttgagttctataactcatggagcaaatgagtttgcaaccactgtgcgggggcgtttaaaccgaactaaaaaggagaagcatcagaacagattttcatctgacagcaacgatgattcatcaagtgataccacgttgaactcaaaccagagggctggagaattaaaaacaattggcgacagtgctcaaaggagtcctgagaatgagcatgatagcagtgagagtgatggtagagaactcatatcggagtccagaaggctcggtaatgatgagaccggtgaagttaaacttaagtacgcattgtctgaattgcctgctgattccagaccccttctaatttttatcaacaagaaaagtggggctcagcgcggagatcttctcaagcacaagctacattttcttttgaatccggtgcaggtttttgaattaagttcttcacaagggccagaaacaggattatttttgttcagaaagctggcactggcaatgatctttcgagagttttatcatggggaggtggcctttgcacaattttacatgacatagagcatgcagcagtcactatccttgatagatggaaggtgacagtagaagataagaaatcaaagaatgtgcttctagtaaagtacatgaacaactatctcggtatcggttgtgatgcaaaagttgcccttgacattcataatctccgtgagggaaatcctgagaaattctacagtcagttcttaaataaggtgctatatgcgagggaaggggccaagagcatcattgacagggcttttgtggacttaccatggcaagttcggttggaagtcgatggcaccgagatcgagataccagaggactcggaaggcgtgcttgtcgcgaacatcccgagctacatgggaggggttgacctgtggcaaaacgagggtgaggatcccgaagattttgacccgcagtcgatccatgacaagatgctcgaagtggtcagcattacaggagcatggcatctgggaacactccaggttggactttctcgggcgcggaggatcgcgcaaggccagtcgatcaagatacagatgtttgcccctttccccgttcaagtcgacggtgagccttgggtccagcagccctgcacgctcaagatatctcatcacgggcaggcttttatgttgaggagagcagttgaagagccactgggtcatgccgctgctatgatcaccgacgtccttgagcatgcagagtccagccatgtaatcactgcttcgcagaagaaagccctcctccgagaaatggctctacggctgtcatgaagcaagcgccgctcattcggacgtcgcagaagaacggtttcctgcctctgcctgcacatcggtggttagtacgaggatctgtgatctcaacatgagctcgatcatgttgttagcagaagatacaggcccggagggacgtgtccacgtgcacatagagtttttttttttggggtcatgttcacgttttggaaatagcgaggcaatgttgtgtgcagctatgtatggtgtgtagacctcgggtaagccagttccttccttctgtgcaaaactagttacgcctgcggcctgccattccgtgttaggttgactggatggatttttagggctgcgtcgctgccacttcggttggtgccccatatgtaaacgagatgggcttgaatgcttggttgtaacctttttttttaatgataggagctctgtcctttaattaagacgaaagaaaacatatgtacaagaagagaacatattagatgcgaactaatttacaaacagcacaaattaat

SEQ ID NO: 2050 - DNA, 2009 bp, Zea Mays
cgcgtgtgcacatcgccaccgtcggcgctgcccagtcaccgcgccgacggcgaaatatattccggggtcccacgtggaagcatccggaggaatacacggatacacctccgcctcggtccatcgcaactgcaatcttctgctccgtcctgtaggctgtagctgcagcctgcagggagcgagccataaaggagactacgtagcggccgcggagcgcggggacgacggagggagacagacgggcgcggcagggaccagggagccagcagggctaggcgacgctccttccagttctcctatccatgatttcattctgagacattcacatgcttccatgtgattgaccttgtccctaatgttctgatcaagattgccatggttgaaaggctatagtttcttatggtccatgtccacgattcaagaataaaatattgtttggcccatccattgtgataatggtctggttgcaagaccagctggaaatgcacaagttccactgtgtggcggcgaaagatcagtttaagctggatgaaaataattgccagatcgaagaggaagaattttgaaagaaaccatgaggttcctactgctgaacatgtttggaacacagaatcattgattcgtgcaaaaggaatgatgtgctgtgtatgcttggaatctatctcacctgctcagccccttgggcagatgatgacatcagaaaatatggttcaccgctgcaatgtttgcggtgcagctgcgcacataatatgctcttcaaattctcagaaagactgcaaatgcatctcaatgtttgggttcaaacatgtggtccatcaatggactgtactctggacagacatagctgaccaatccgaagaaggccagtactgtagttactgtgaggagttatgcagtgagtcttttctgggaggtcctcccatatactgctgcatgtggtgccaacgattggtgcatgctgattgccagtctgccatggctactgaaaccggtgaaatttgcgaccttggtcccttcaagcgccttattctgtcgccactttttgtccgggccattagcaaacctggtagcatcttgagttctataactcatggagcaaatgagtttgcaaccactgtgcgggggcgtttaaaccgaactaaaaaggagaagcatcagaacagattttcatctgacagcaacgatgattcatcaagtgataccacgttgaactcaaaccagagggctggagaattaaaaacaattggcgacagtgctcaaaggagtcctgagaatgagcatgatagcagtgagagtgatggtagagaactcatatcggagtccagaaggctcggtaatgatgagaccggtgaagttaaacttaagtacgcattgtctgaattgcctgctgattccagaccccttctaatttttatcaacaagaaaagtggggctcagcgcggagatcttctcaagcacaagctacattttcttttgaatccggtgcaggtttttgaattaagttcttcacaagggccagaaacaggattatttttgttcagaaagctggcactggcaatgatctttcgagagttttatcatggggaggtggcctaggtgctgttgagaagcaaggtggcctttgcacaattttacatgacatagagcatgcagcagtcactatccttgatagatggaaggtgacagtagaagataagaaatcaaagaatgtgcttctagtaaagtacatgaacaactatctcggtatcggttgtgatgcaaaagttgcccttgacattcataatctccgtgagggaaatcctgagaaattctacagtcaggcatattggagtattgggtgccattggttcatgcctaaactacatgtcattgttgagtatagtagtgcttaatggtgaaccaattgaactggacttgaattgacagtgttgactgaggcaatctgatcgcttcagtgtgataccttcagcttttggttgagtgggtgattatcataactagcccatcaagca

SEQ ID NO: 2051 - DNA, 2840 bp, Zea Mays
cgcgtgtgcacatcgccaccgtcggcgctgcccagtcaccgcgccgacggcgaaatatattccggggtcccacgtggaagcatccggaggaatacacggatacacctccgcctcggtccatcgcaactgcaatcttctgctccgtcctgtaggctgtagctgcagcctgcagggagcgagccataaaggagactacgtagcggccgcggagcgcggggacgacggagggagacagacgggcgcggcagggaccagggagccagcagggctaggcgacgctccttccagttctcctatccatgatttcattctgagacattcacatgcttccatgtgattgaccttgtccctaatgttctgatcaagattgccatggttgaaaggctatagtttcttatggtccatgtccacgattcaagaataaaatattgtttggcccatccattgtgataatggtctggttgcaagaccagctggaaatgcacaagttccactgtgtggcggcgaaagatcagtttaagctggatgaaaataattgccagatcgaagaggaagaattttgaaagaaaccatgaggttcctactgctgaacatgtttggaacacagaatcattgattcgtgcaaaaggaatgatgtgctgtgtatgcttggaatctatctcacctgctcagccccttgggcagatgatgacatcagaaaatatggttcaccgctgcaatgtttgcggtgcagctgcgcacataatatgctcttcaaattctcagaaagactgcaaatgcatctcaatgtttgggttcaaacatgtggtccatcaatggactgtactctggacagacatagctgaccaatccgaagaaggccagtactgtagttactgtgaggagttatgcagtgagtcttttctgggaggtcctcccatatactgctgcatgtggtgccaacgattggtgcatgctgattgccagtctgccatggctactgaaaccggtgaaatttgcgaccttggtcccttcaagcgccttattctgtcgccactttttgtccgggccattagcaaacctggtagcatcttgagttctataactcatggagcaaatgagtttgcaaccactgtgcgggggcgtttaaaccgaactaaaaaggagaagcatcagaacagattttcatctgacagcaacgatgattcatcaagtgataccacgttgaactcaaaccagagggctggagaattaaaaacaattggcgacagtgctcaaaggagtcctgagaatgagcatgatagcagtgagagtgatggtagagaactcatatcggagtccagaaggctcggtaatgatgagaccggtgaagttaaacttaagtacgcattgtctgaattgcctgctgattccagaccccttctaatttttatcaacaagaaaagtggggctcagcgcggagatcttctcaagcacaagctacattttcttttgaatccggtgcaggtttttgaattaagttcttcacaagggccagaaacaggattatttttgttcagaaagctggcactggcaatgatctttcgagagttttatcatggggaggtggcctaggtgctgttgagaagcaaggtggcctttgcacaattttacatgacatagagcatgcagcagtcactatccttgatagatggaaggtgacagtagaagataagaaatcaaagaatgtgcttctagtaaagtacatgaacaactatctcggtatcggttgtgatgcaaaagttgcccttgacattcataatctccgtgagggaaatcctgagaaattctacagtcagttcttaaataaggtgctatatgcgagggaaggggccaagagcatcattgacagggcttttgtggacttaccatggcaagttcggttggaagtcgatggcaccgagatcgagataccagaggactcggaaggcgtgcttgtcgcgaacatcccgagctacatgggaggggttgacctgtggcaaaacgagggtgaggatcccgaagattttgacccgcagtcgatccatgacaagatgctcgaagtggtcagcattacaggagcatggcatctgggaacactccaggttggactttctcgggcgcggaggatcgcgcaaggccagtcgatcaagatacagatgtttgcccctttccccgttcaagtcgacggcttttatgttgaggagagcagttgaagagccactgggtcatgccgctgctatgatcaccgacgtccttgagcatgcagagtccagccatgtaatcactgcttcgcagaagaaagccctcctccgagaaatggctctacggctgtcatgaagcaagcgccgctcattcggacgtcgcagaagaacggtttcctgcctctgcctgcacatcggtggttagtacgaggatctgtgatctcaacatgagctcgatcatgttgttagcagaagatacaggcccggagggacgtgtccacgtgcacatagagtttttttttttggggtcatgttcacgttttggaaatagcgaggcaatgttgtgtgcagctatgtatggtgtgtagacctcgggtaagccagttccttccttctgtgcaaaactagttacgcctgcggcctgccattccgtgttaggttgactggatggatttttagggctgcgtcgctgccacttcggttggtgccccatatgtaaacgagatgggcttgaatgcttggttgtaacctttttttttaatgataggagctctgtcctttaattaagacgaaagaaaacatatgtacaagaagagaacatattagatgcgaactaatttacaaacagcacaaattaat

SEQ ID NO: 2052 - DNA, 3815 bp, Zea Mays
cgcgtgtgcacatcgccaccgtcggcgctgcccagtcaccgcgccgacggcgaaatatattccggggtcccacgtggaagcatccggaggaatacacggatacacctccgcctcggtccatcgcaactgcaatcttctgctccgtcctgtaggctgtagctgcagcctgcagggagcgagccataaaggagactacgtagcggccgcggagcgcggggacgacggagggagacagacgggcgcggcagggaccagggagccagcagggctaggcgacgctccttccagttctcctatccatgatttcattctgagacattcacatgcttccatgtgattgaccttgtccctaatgttctgatcaagattgccatggttgaaaggctatagtttcttatggtccatgtccacgattcaagaataaaatattgtttggcccatccattgtgataatggtctggttgcaagaccagctggaaatgcacaagttccactgtgtggcggcgaaagatcagtttaagctggatgaaaataattgccagatcgaagaggaagaattttgaaagaaaccatgaggttcctactgctgaacatgtttggaacacagaatcattgattcgtgcaaaaggaatgatgtgctgtgtatgcttggaatctatctcacctgctcagccccttgggcagatgatgacatcagaaaatatggttcaccgctgcaatgtttgcggtgcagctgcgcacataatatgctcttcaaattctcagaaagactgcaaatgcatctcaatgtttgggttcaaacatgtggtccatcaatggactgtactctggacagacatagctgaccaatccgaagaaggccagtactgtagttactgtgaggagttatgcagtgagtcttttctgggaggtcctcccatatactgctgcatgtggtgccaacgattggtgcatgctgattgccagtctgccatggctactgaaaccggtgaaatttgcgaccttggtcccttcaagcgccttattctgtcgccactttttgtccgggccattagcaaacctggtagcatcttgagttctataactcatggagcaaatgagtttgcaaccactgtgcgggggcgtttaaaccgaactaaaaaggagaagcatcagaacagattttcatctgacagcaacgatgattcatcaagtgataccacgttgaactcaaaccagagggctggagaattaaaaacaattggcgacagtgctcaaaggagtcctgagaatgagcatgatagcagtgagagtgatggtagagaactcatatcggagtccagaaggctcggtaatgatgagaccggtgaagttaaacttaagtacgcattgtctgaattgcctgctgattccagaccccttctaatttttatcaacaagaaaagtggggctcagcgcggagatcttctcaagcacaagctacattttcttttgaatccggtgcaggtttttgaattaagttcttcacaagggccagaaacaggattatttttgttcagaaagctggcactggcaatgatctttcgagagttttatcatggggaggtggcctaggtgctgttgagaagcaaggtggcctttgcacaattttacatgacatagagcatgcagcagtcactatccttgatagatggaaggtgacagtagaagataagaaatcaaagaatgtgcttctagtaaagtacatgaacaactatctcggtatcggttgtgatgcaaaagttgcccttgacattcataatctccgtgagggaaatcctgagaaattctacagtcagattgcagtatcctccgatacttcctcacgtatattacagtatcacttgtactttttttatagatcgaatgttcgtgtaattaatatgtatgtagcaatgaaacaaatataggaagtatcaggcctgctatagatattcagaacactgccaatctacgatgtacagagcaatctgtaatggtacgactaggacacaaaggagcaggtccagatctgaaggtaggtaggtactgacctcgccggagcttgatcttcttcttgtgggtgatgccctgcacggctgcacggagatccggccttggagtcgtccggcggtctgcgtggccttgggtgatgccctgcatggagcttgatcttcttcctgttcgggtcggcggtctgcgtggccttggcgtcgtccggcgcgaagagcacgacgtcgatgccctgcacggagatcctgccgtcggtgtagatgtccgggtccaagaggtagcggatcttgtgcggcagaaaccagaatgaaacgtaccttgtgcggcagaaaccagaagcaaaccggaatcaaacgacggaggcgctcagggcgttggagcgacggaggtgctggtgcatagcgaagacgagacgaggcggcggagaatcgcctggcctcctaaggccagggttgtttccgacgggaaaatggaacgaatatctgcacgagattgggctgccaaatgacacacatgaataatccgaggacaattttctggtgggctttctcccaggagaaaaggccaggaaacccgctggattttgggctgccaaaccagtcctgatatgtcttttttcccccctctagcgcgtctcagtaagacattaaggactaacgcggaggctttaaagagaatctttagttattaaatattaagatgactcttatgtttctttgttgggcttcatcagttcttaaataaggtgctatatgcgagggaaggggccaagagcatcattgacagggcttttgtggacttaccatggcaagttcggttggaagtcgatggcaccgagatcgagataccagaggactcggaaggcgtgcttgtcgcgaacatcccgagctacatgggaggggttgacctgtggcaaaacgagggtgaggatcccgaagattttgacccgcagtcgatccatgacaagatgctcgaagtggtcagcattacaggagcatggcatctgggaacactccaggttggactttctcgggcgcggaggatcgcgcaaggccagtcgatcaagatacagatgtttgcccctttccccgttcaagtcgacggtgagccttgggtccagcagccctgcacgctcaagatatctcatcacgggcttttatgttgaggagagcagttgaagagccactgggtcatgccgctgctatgatcaccgacgtccttgagcatgcagagtccagccatgtaatcactgcttcgcagaagaaagccctcctccgagaaatggctctacggctgtcatgaagcaagcgccgctcattcggacgtcgcagaagaacggtttcctgcctctgcctgcacatcggtggttagtacgaggatctgtgatctcaacatgagctcgatcatgttgttagcagaagatacaggcccggagggacgtgtccacgtgcacatagagtttttttttttggggtcatgttcacgttttggaaatagcgaggcaatgttgtgtgcagctatgtatggtgtgtagacctcgggtaagccagttccttccttctgtgcaaaactagttacgcctgcggcctgccattccgtgttaggttgactggatggatttttagggctgcgtcgctgccacttcggttggtgccccatatgtaaacgagatgggcttgaatgcttggttgtaacctttttttttaatgataggagctctgtcctttaattaagacgaaagaaaacatatgtacaagaagagaacatattagatgcgaactaatttacaaacagcacaaattaat

SEQ ID NO: 2053 - DNA, 2582 bp, Zea Mays
cgcgtgtgcacatcgccaccgtcggcgctgcccagtcaccgcgccgacggcgaaatatattccggggtcccacgtggaagcatccggaggaatacacggatacacctccgcctcggtccatcgcaactgcaatcttctgctccgtcctgtaggctgtagctgcagcctgcagggagcgagccataaaggagactacgtagcggccgcggagcgcggggacgacggagggagacagacgggcgcggcagggaccagggagccagcagggctaggcgacgctccttccagttctcctatccatgatttcattctgagacattcacatgcttccatgtgattgaccttgtccctaatgttctgatcaagattgccatggttgaaaggctatagtttcttatggtccatgtccacgattcaagaataaaatattgtttggcccatccattgtgataatggtctggttgcaagaccagctggaaatgcacaagttccactgtgtggcggcgaaagatcagtttaagctggatgaaaataattgccagatcgaagaggaagaattttgaaagaaaccatgaggttcctactgctgaacatgtttggaacacagaatcattgattcgtgcaaaaggaatgatgtgctgtgtatgcttggaatctatctcacctgctcagccccttgggcagatgatgacatcagaaaatatggttcaccgctgcaatgtttgcggtgcagctgcgcacataatatgctcttcaaattctcagaaagactgcaaatgcatctcaatgtttgggttcaaacatgtggtccatcaatggactgtactctggacagacatagctgaccaatccgaagaaggccagtactgtagttactgtgaggagttatgcagtgagtcttttctgggaggtcctcccatatactgctgcatgtggtgccaacgattggtgcatgctgattgccagtctgccatggctactgaaaccggtgaaatttgcgaccttggtcccttcaagcgccttattctgtcgccactttttgtccgggccattagcaaacctggtagcatcttgagttctataactcatggagcaaatgagtttgcaaccactgtgcgggggcgtttaaaccgaactaaaaaggagaagcatcagaacagattttcatctgacagcaacgatgattcatcaagtgataccacgttgaactcaaaccagagggctggagaattaaaaacaattggcgacagtgctcaaaggagtcctgagaatgagcatgatagcagtgagagtgatggtagagaactcatatcggagtccagaaggctcggtaatgatgagaccggtgaagttaaacttaagtacgcattgtctgaattgcctgctgattccagaccccttctaatttttatcaacaagaaaagtggggctcagcgcggagatcttctcaagcacaagctacattttcttttgaatccggtgcaggtttttgaattaagttcttcacaagggccagaaacaggattatttttgttcagaaaggtaccacatttcagaatacttgtgtgtggtggtgatggtactgttggttgggttcttgacgcgatagataagcaaaattatgaatcacctccacccattgcaattcttccagctggcactggcaatgatctttcgagagttttatcatggggaggtggcctaggtgctgttgagaagcaaggtggcctttgcacaattttacatgacatagagcatgcagcagtcactatccttgatagatggaaggtgacagtagaagataagaaatcaaagaatgtgcttctagtaaagtacatgaacaactatctcggtatcggttgtgatgcaaaagttgcccttgacattcataatctccgtgagggaaatcctgagaaattctacagtcaggcttttatgttgaggagagcagttgaagagccactgggtcatgccgctgctatgatcaccgacgtccttgagcatgcagagtccagccatgtaatcactgcttcgcagaagaaagccctcctccgagaaatggctctacggctgtcatgaagcaagcgccgctcattcggacgtcgcagaagaacggtttcctgcctctgcctgcacatcggtggttagtacgaggatctgtgatctcaacatgagctcgatcatgttgttagcagaagatacaggcccggagggacgtgtccacgtgcacatagagtttttttttttggggtcatgttcacgttttggaaatagcgaggcaatgttgtgtgcagctatgtatggtgtgtagacctcgggtaagccagttccttccttctgtgcaaaactagttacgcctgcggcctgccattccgtgttaggttgactggatggatttttagggctgcgtcgctgccacttcggttggtgccccatatgtaaacgagatgggcttgaatgcttggttgtaacctttttttttaatgataggagctctgtcctttaattaagacgaaagaaaacatatgtacaagaagagaacatattagatgcgaactaatttacaaacagcacaaattaat

SEQ ID NO: 2054 - DNA, 2970 bp, Zea Mays
cgcgtgtgcacatcgccaccgtcggcgctgcccagtcaccgcgccgacggcgaaatatattccggggtcccacgtggaagcatccggaggaatacacggatacacctccgcctcggtccatcgcaactgcaatcttctgctccgtcctgtaggctgtagctgcagcctgcagggagcgagccataaaggagactacgtagcggccgcggagcgcggggacgacggagggagacagacgggcgcggcagggaccagggagccagcagggctaggcgacgctccttccagttctcctatccatgatttcattctgagacattcacatgcttccatgtgattgaccttgtccctaatgttctgatcaagattgccatggttgaaaggctatagtttcttatggtccatgtccacgattcaagaataaaatattgtttggcccatccattgtgataatggtctggttgcaagaccagctggaaatgcacaagttccactggtacagtagagcccctactccatcagagttctggataccacttgctgcttggttcactgttggcctagtcggtctttggacattttttcatttcttttcagtgtggcggcgaaagatcagtttaagctggatgaaaataattgccagatcgaagaggaagaattttgaaagaaaccatgaggttcctactgctgaacatgtttggaacacagaatcattgattcgtgcaaaaggaatgatgtgctgtgtatgcttggaatctatctcacctgctcagccccttgggcagatgatgacatcagaaaatatggttcaccgctgcaatgtttgcggtgcagctgcgcacataatatgctcttcaaattctcagaaagactgcaaatgcatctcaatgtttgggttcaaacatgtggtccatcaatggactgtactctggacagacatagctgaccaatccgaagaaggccagtactgtagttactgtgaggagttatgcagtgagtcttttctgggaggtcctcccatatactgctgcatgtggtgccaacgattggtgcatgctgattgccagtctgccatggctactgaaaccggtgaaatttgcgaccttggtcccttcaagcgccttattctgtcgccactttttgtccgggccattagcaaacctggtagcatcttgagttctataactcatggagcaaatgagtttgcaaccactgtgcgggggcgtttaaaccgaactaaaaaggagaagcatcagaacagattttcatctgacagcaacgatgattcatcaagtgataccacgttgaactcaaaccagagggctggagaattaaaaacaattggcgacagtgctcaaaggagtcctgagaatgagcatgatagcagtgagagtgatggtagagaactcatatcggagtccagaaggctcggtaatgatgagaccggtgaagttaaacttaagtacgcattgtctgaattgcctgctgattccagaccccttctaatttttatcaacaagaaaagtggggctcagcgcggagatcttctcaagcacaagctacattttcttttgaatccggtgcaggtttttgaattaagttcttcacaagggccagaaacaggattatttttgttcagaaagctggcactggcaatgatctttcgagagttttatcatggggaggtggcctaggtgctgttgagaagcaaggtggcctttgcacaattttacatgacatagagcatgcagcagtcactatccttgatagatggaaggtgacagtagaagataagaaatcaaagaatgtgcttctagtaaagtatcggttgtgatgcaaaagttgcccttgacattcataatctccgtgagggaaatcctgagaaattctacagtcagttcttaaataaggtgctatatgcgagggaaggggccaagagcatcattgacagggcttttgtggacttaccatggcaagttcggttggaagtcgatggcaccgagatcgagataccagaggactcggaaggcgtgcttgtcgcgaacatcccgagctacatgggaggggttgacctgtggcaaaacgagggtgaggatcccgaagattttgacccgcagtcgatccatgacaagatgctcgaagtggtcagcattacaggagcatggcatctgggaacactccaggttggactttctcgggcgcggaggatcgcgcaaggccagtcgatcaagatacagatgtttgcccctttccccgttcaagtcgacggtgagccttgggtccagcagccctgcacgctcaagatatctcatcacgggcttttatgttgaggagagcagttgaagagccactgggtcatgccgctgctatgatcaccgacgtccttgagcatgcagagtccagccatgtaatcactgcttcgcagaagaaagccctcctccgagaaatggctctacggctgtcatgaagcaagcgccgctcattcggacgtcgcagaagaacggtttcctgcctctgcctgcacatcggtggttagtacgaggatctgtgatctcaacatgagctcgatcatgttgttagcagaagatacaggcccggagggacgtgtccacgtgcacatagagtttttttttttggggtcatgttcacgttttggaaatagcgaggcaatgttgtgtgcagctatgtatggtgtgtagacctcgggtaagccagttccttccttctgtgcaaaactagttacgcctgcggcctgccattccgtgttaggttgactggatggatttttagggctgcgtcgctgccacttcggttggtgccccatatgtaaacgagatgggcttgaatgcttggttgtaacctttttttttaatgataggagctctgtcctttaattaagacgaaagaaaacatatgtacaagaagagaacatattagatgcgaactaatttacaaacagcacaaattaat

SEQ ID NO: 2055 - DNA, 1250 bp, Zea Mays
ctttactttaagtcgagtcacttctcagctaggcaacatggtttttgaattaagttcttcacaagggccagaaacaggattatttttgttcagaaaggtatcggttgtgatgcaaaagttgcccttgacattcataatctccgtgagggaaatcctgagaaattctacagtcagttcttaaataaggtgctatatgcgagggaaggggccaagagcatcattgacagggcttttgtggacttaccatggcaagttcggttggaagtcgatggcaccgagatcgagataccagaggactcggaaggcgtgcttgtcgcgaacatcccgagctacatgggaggggttgacctgtggcaaaacgagggtgaggatcccgaagattttgacccgcagtcgatccatgacaagatgctcgaagtggtcagcattacaggagcatggcatctgggaacactccaggttggactttctcgggcgcggaggatcgcgcaaggccagtcgatcaagatacagatgtttgcccctttccccgttcaagtcgacggtgagccttgggtccagcagccctgcacgctcaagatatctcatcacgggcaggcttttatgttgaggagagcagttgaagagccactgggtcatgccgctgctatgatcaccgacgtccttgagcatgcagagtccagccatgtaatcactgcttcgcagaagaaagccctcctccgagaaatggctctacggctgtcatgaagcaagcgccgctcattcggacgtcgcagaagaacggtttcctgcctctgcctgcacatcggtggttagtacgaggatctgtgatctcaacatgagctcgatcatgttgttagcagaagatacaggcccggagggacgtgtccacgtgcacatagagtttttttttttggggtcatgttcacgttttggaaatagcgaggcaatgttgtgtgcagctatgtatggtgtgtagacctcgggtaagccagttccttccttctgtgcaaaactagttacgcctgcggcctgccattccgtgttaggttgactggatggatttttagggctgcgtcgctgccacttcggttggtgccccatatgtaaacgagatgggcttgaatgcttggttgtaacctttttttttaatgataggagctctgtcctttaattaagacgaaagaaaacatatgtacaagaagagaacatattagatgcgaactaatttacaaacagcacaaattaat

SEQ ID NO: 2056 - DNA, 2188 bp, Zea Mays
cgacaagcccatatgccttcctccaaatccaatacattctgaccactagatgaactggcattgattggtgctagcgatcagttgtgaaattaatctacacacctccccaatcttttttcagattgcaaatcaatctacatgaattgcaaatctcatattttagtatcatatttcaatttttttcagattgcagtatcctccgatacttcctcacgtatattacagtatcacttgtactttttttatagatcgaatgttcgtgtaattaatatgtatgtagcaatgaaacaaatataggaagtatcaggcctgctatagatattcagaacactgccaatctacgatgtacagagcaatctgtaatggtacgactaggacacaaaggagcaggtccagatctgaaggtaggtaggtactgacctcgccggagcttgatcttcttcttgtgggtgatgccctgcacggctgcacggagatccggccttggagtcgtccggcggtctgcgtggccttgggtgatgccctgcatggagcttgatcttcttcctgttcgggtcggcggtctgcgtggccttggcgtcgtccggcgcgaagagcacgacgtcgatgccctgcacggagatcctgccgtcggtgtagatgtccgggtccaagaggtagcggatcttgtgcggcagaaaccagaatgaaacgtaccttgtgcggcagaaaccagaagcaaaccggaatcaaacgacggaggcgctcagggcgttggagcgacggaggtgctggtgcatagcgaagacgagacgaggcggcggagaatcgcctggcctcctaaggccagggttgtttccgacgggaaaatggaacgaatatctgcacgagattgggctgccaaatgacacacatgaataatccgaggacaattttctggtgggctttctcccaggagaaaaggccaggaaacccgctggattttgggctgccaaaccagtcctgatatgtcttttttcccccctctagcgcgtctcagtaagacattaaggactaacgcggaggctttaaagagaatctttagttattaaatattaagatgactcttatgtttctttgttgggcttcatcagttcttaaataaggtgctatatgcgagggaaggggccaagagcatcattgacagggcttttgtggacttaccatggcaagttcggttggaagtcgatggcaccgagatcgagataccagaggactcggaaggcgtgcttgtcgcgaacatcccgagctacatgggaggggttgacctgtggcaaaacgagggtgaggatcccgaagattttgacccgcagtcgatccatgacaagatgctcgaagtggtcagcattacaggagcatggcatctgggaacactccaggttggactttctcgggcgcggaggatcgcgcaaggccagtcgatcaagatacagatgtttgcccctttccccgttcaagtcgacggtgagccttgggtccagcagccctgcacgctcaagatatctcatcacgggcaggcttttatgttgaggagagcagttgaagagccactgggtcatgccgctgctatgatcaccgacgtccttgagcatgcagagtccagccatgtaatcactgcttcgcagaagaaagccctcctccgagaaatggctctacggctgtcatgaagcaagcgccgctcattcggacgtcgcagaagaacggtttcctgcctctgcctgcacatcggtggttagtacgaggatctgtgatctcaacatgagctcgatcatgttgttagcagaagatacaggcccggagggacgtgtccacgtgcacatagagtttttttttttggggtcatgttcacgttttggaaatagcgaggcaatgttgtgtgcagctatgtatggtgtgtagacctcgggtaagccagttccttccttctgtgcaaaactagttacgcctgcggcctgccattccgtgttaggttgactggatggatttttagggctgcgtcgctgccacttcggttggtgccccatatgtaaacgagatgggcttgaatgcttggttgtaacctttttttttaatgataggagctctgtcctttaattaagacgaaagaaaacatatgtacaagaagagaacatattagatgcgaactaatttacaaacagcacaaattaat

SEQ ID NO: 2057 - DNA, 2460 bp, Zea Mays
gcaccattcataaaagcataaagattagtggcccggaacctttgcggctttaccctcctggcctcctgtcctgccctgcctttccccccgcatgctctcgctcgctctctcgttctcgtggttctcccgagtcccgtgccgctcgagtgcgccgtctgcgtctctagtggcgacgactgggcgaccgccgccgccgccctacgcaaggtgcccagctctccattttcggtcccttcgccggacacgagcacccgccaggggactagaggctagtagaagttctgaggaatctaattttggaaatgacttaaaggatggttcttcagtttcttctgagaacttcggctcctcttgtctgcctggcgagagctatcaatctgccacagtagatcatgaaaaacgacctctttctgatgtcaagacatgccaaattgcttgcaaacgtccaaagcaaacagatcactgtacctggttatattcctttgaggaacaccctttgaccagtgaagtgggaatatcttctccagctttatatgatggattggttgagatcaaacaaccaaatgacattcctgcaattaatggtgccacaacctgcagtggtagttcagtgatcccttgccgtaatcatgatcaatcaattttagtggaaaacttagacatacctgattgggcgacttccttccctggttattttgaagactgtgggccagttgttacatatagccatgttgatgacattggttcgcctagaaagggtgtgccaattggacctgagcaccaggctgacattccagaatggaggcccctaaactctatgattgtacctggtgcttcagagttttgtgctaatctggattgtagttctgcttccacttcagagtctgttcccagaggtgatgactatgtaagtgacaagtggatcaggtactgtgttgttccggtgacatgctgctcatctcctgttgactgggctggagacagcaaaatagattgcaactgcagtgacgagggttctatgaggtgttccagacagcatattattgaagcaagggataaccttaaaatgatcttgggacaggacaggtttcgtgagttaggtctttgtgaaatgggagaggatgttgctctgagatggactgatgaggaggagaagctattccaaagagttgttttcttaaatcctgtctccttgggcaagaacttttgggaccaccttccggatgcatttcctaataaaactagccaggagtttgttagctactattttaacgttttcatgctcaggaaaagggctcagcagaacaggtctgacgtgttggctgtggacagtgatgatgatgaactgcatggtgaacctctagctgagcgggtggaaggggatcctgcagttgagtcctctacacatgaacattctgtcagcaattctctgcccatggatgatgaccataaagagtttgaaggagcacagtttgatggatctttgtgtgagaagtcagtatacaatgcagtcgagtgcagacatctaccaaatcagatgcctgcagattcaaatacggtgaacactgcactagatgtttgtgaccaagataatggagctcagtgttcagagtttcacatgtcactgccgagcgatacttcaaacagtcttggggatcaaagtgcatctgtataggagatgttgtgtggacaaggctctttggccgtcgagatgtccaaccaagaccatgaacaacaatgaaatggataacacattcagtttggatctgacatctacttcagatgggtgctgttttgccatggcttggagttgtaaattcagcttcatctggagttgatagttcatgaagttgtacattcttcaactactatgtacttttcgcggcattttgttagcacacttggaactcaactgagcttccacggggttttgctgcccccaccccctaccccccatccccattcgagaaatcaaccttgttgtatgtaccatctgttgtattttcatcgctgtatgtccattcgagaaactgaacatgtagattgtaagagttgccactgtctggattacccgcggtggttttcgtttgcagaccgagtgctttcggaatcgattcatgcaaataatgtgctaccgacagactccagttgaatccatttgatgtgatacgtttgtcacgactgcattcttttgttttaaagacagccagtgtaaggaatgtttggagtgtttggtttgaggaatgatgtagtccatcatcttttcactccttactttttttgtttggtttgtggaatggagtgagttaatctatcaccacctcattcctcatagttagttgtttagtactaatatgtagaatggagtcatcccactaaatttgaggaatgaacctatgatgcactactttattttagatagagtgattcatcaaaccaaacaccttagttgtgtttgtg

SEQ ID NO: 2058 - DNA, 2419 bp, Zea Mays
taaaagcataaagattagtggcccggaacctttgcggctttaccctcctggcctcctgtcctgccctgcctttccccccgcatgctctcgctcgctctctcgttctcgtggttctcccgagtcccgtgccgctcgagtgcgccgtctgcgtctctagtggcgacgactgggcgaccgccgccgccgccctacgcaaggtgcccagctctccattttcggtcccttcgccggacacgagcacccgccaggataatatgttgtccacgcatgaggcaaatgctgatcagtttgatcttctttcttatggtaatctaaggggactagaggctagtagaagttctgaggaatctaattttggaaatgacttaaaggatggttcttcagtttcttctgagaacttcggctcctcttgtctgcctggcgagagctatcaatctgccacagtagatcatgaaaaacgacctctttctgatgtcaagacatgccaaattgcttgcaaacgtccaaagcaaacagatcactgtacctggttatattcctttgaggaacaccctttgaccagtgaagtgggaatatcttctccagctttatatgatggattggttgagatcaaacaaccaaatgacattcctgcaattaatggtgccacaacctgcagtgactgtgggccagttgttacatatagccatgttgatgacattggttcgcctagaaagggtgtgccaattggacctgagcaccaggctgacattccagaatggaggcccctaaactctatgattgtacctggtgcttcagagttttgtgctaatctggattgtagttctgcttccacttcagagtctgttcccagaggtgatgactatgtaagtgacaagtggatcaggtactgtgttgttccggtgacatgctgctcatctcctgttgactgggctggagacagcaaaatagattgcaactgcagtgacgagggttctatgaggtgttccagacagcatattattgaagcaagggataaccttaaaatgatcttgggacaggacaggtttcgtgagttaggtctttgtgaaatgggagaggatgttgctctgagatggactgatgaggaggagaagctattccaaagagttgttttcttaaatcctgtctccttgggcaagaacttttgggaccaccttccggatgcatttcctaataaaactagccaggagtttgttagctactattttaacgttttcatgctcaggaaaagggctcagcagaacaggtctgacgtgttggctgtggacagtgatgatgatgaactgcatggtgaacctctagctgagcgggtggaaggggatcctgcagttgagtcctctacacatgaacattctgtcagcaattctctgcccatggatgatgaccataaagagtttgaaggagcacagtttgatggatctttgtgtgagaagtcagtatacaatgcagtcgagtgcagacatctaccaaatcagatgcctgcagattcaaatacggtgaacactgcactagatgtttgtgaccaagataatggagctcagtgttcagagtttcacatgtcactgccgagcgatacttcaaacagtcttggggatcaaagtgcatctgtataggagatgttgtgtggacaaggctctttggccgtcgagatgtccaaccaagaccatgaacaacaatgaaatggataacacattcagtttggatctgacatctacttcagatgggtgctgttttgccatggcttggagttgtaaattcagcttcatctggagttgatagttcatgaagttgtacattcttcaactactatgtacttttcgcggcattttgttagcacacttggaactcaactgagcttccacggggttttgctgcccccaccccctaccccccatccccattcgagaaatcaaccttgttgtatgtaccatctgttgtattttcatcgctgtatgtccattcgagaaactgaacatgtagattgtaagagttgccactgtctggattacccgcggtggttttcgtttgcagaccgagtgctttcggaatcgattcatgcaaataatgtgctaccgacagactccagttgaatccatttgatgtgatacgtttgtcacgactgcattcttttgttttaaagacagccagtgtaaggaatgtttggagtgtttggtttgaggaatgatgtagtccatcatcttttcactccttactttttttgtttggtttgtggaatggagtgagttaatctatcaccacctcattcctcatagttagttgtttagtactaatatgtagaatggagtcatcccactaaatttgaggaatgaacctatgatgcactactttattttagatagagtgattcatcaaaccaaacaccttagttgtgtttgtg

SEQ ID NO: 2059 - DNA, 1491 bp, Zea Mays
gggtggtgaactggtgatggtgatgctcgctcgtagtgcatgtgcatccatccgacttcccaacagcctacctctcgcgttccaggacaaaacgcagtcttggctcggcagccgaggcgagaggagcctttgcccacctttgctcactcgcttcgctttccatcctgttgcgcggccgcggcgcaggtgcggttggccatcacaggccaaggacccctcttcctcttccctttgacccaccaccgcccccctcttcccttcttcccccactgtcgccgctcctcgtcttccactctctccactttgctgcttcttctcccttattaatgctcgtgggctcctatgatccgccctccgccgcgggtttcttgatccatccccggcccaaggaagcggaccccggcgaacactcctgacagattcgcccgtccgccgctccctcgattcggtcctccccgtcagcggtgtttaggacctctgcagcatagcatctggtccgtccctggagatgtccggcgtacaggagcagttcgagatcaagttccggctgccggacggcaccgacatcggacccaggcggttcccgccggcgtccaccgtcgccacgctcaaggagaccatcatcgcccagtggcccaaagataaggaaaaaggtcctaggactgtgaatgatcttaagcttattaatgctgggaagatactggagaacaacaaaaccctatcagaatgcaaaagcccgatttgcgacttctctgcgatgacaacaatgcatgtcgtcatccgcgcaccgacttcaagcaaacagtctgataaaagagcagaaaagaaagcgaaaaatttcaggtgcggttgtgccattatgtgacagcattgtgaatagtagcagagagaacgtggccatttcagttttctccctttttttttcctgctctcgctggagtgttgtattatgttcgaggcgctttctcctttcattttgttttgaagtaccgcgtgcaagcttcaacagctgtcaagtgccctttaatcgtgagtgtgcatcaagcacagaattagaaggcggttggctgctaattacccttaatcttgagtttgtcaagcacacaatttgaaggcagtcattagcgtcgaaactacgatgtccaccctatccaatcttccatggtttcacgcttctcttctatatttatgctaccctgggtgacaaatgtttaatgtatgccttccatgctagatgaactttttggaacgccattctaactcatcaatttctattctgtaaaactaaaaccagttgtaatctgccatagatcagtatgcttgctatatgggagtcacattgatatgttttgcaactgttgctcatactctaaattagtagtagtttattgctggttcatctcagtttgcatcagctaccgtaaggtttgtatagacccaagttggatcacaatgtatcagcagggccgttcctgtaggggtgccgaaggt

SEQ ID NO: 2060 - DNA, 1528 bp, Zea Mays
tgaactggtgatggtgatgctcgctcgtagtgcatgtgcatccatccgacttcccaacagcctacctctcgcgttccaggacaaaacgcagtcttggctcggcagccgaggcgagaggagcctttgcccacctttgctcactcgcttcgctttccatcctgttgcgcggccgcggcgcaggtgcggttggccatcacaggccaaggacccctcttcctcttccctttgacccaccaccgcccccctcttcccttcttcccccactgtcgccgctcctcgtcttccactctctccactttgctgcttcttctcccttattaatgctcgtgggctcctatgatccgccctccgccgcgggtttcttgatccatccccggcccaaggaagcggaccccggcgaacactcctgacagattcgcccgtccgccgctccctcgattcggtcctccccgtcagcgcgttgacgccttgacggtatgaagccctattcttggcaggcaggtgtttaggacctctgcagcatagcatctggtccgtccctggagatgtccggcgtacaggagcagttcgagatcaagttccggctgccggacggcaccgacatcggacccaggcggttcccgccggcgtccaccgtcgccacgctcaaggagaccatcatcgcccagtggcccaaagataaggaaaaaggtcctaggactgtgaatgatcttaagcttattaatgctgggaagatactggagaacaacaaaaccctatcagaatgcaaaagcccgatttgcgacttctctgcgatgacaacaatgcatgtcgtcatccgcgcaccgacttcaagcaaacagtctgataaaagagcagaaaagaaagcgaaaaatttcaggtgcggttgtgccattatgtgacagcattgtgaatagtagcagagagaacgtggccatttcagttttctccctttttttttcctgctctcgctggagtgttgtattatgttcgaggcgctttctcctttcattttgttttgaagtaccgcgtgcaagcttcaacagctgtcaagtgccctttaatcgtgagtgtgcatcaagcacagaattagaaggcggttggctgctaattacccttaatcttgagtttgtcaagcacacaatttgaaggcagtcattagcgtcgaaactacgatgtccaccctatccaatcttccatggtttcacgcttctcttctatatttatgctaccctgggtgacaaatgtttaatgtatgccttccatgctagatgaactttttggaacgccattctaactcatcaatttctattctgtaaaactaaaaccagttgtaatctgccatagatcagtatgcttgctatatgggagtcacattgatatgttttgcaactgttgctcatactctaaattagtagtagtttattgctggttcatctcagtttgcatcagctaccgtaaggtttgtatagacccaagttggatcacaatgtatcagcagggccgttcctgtaggggtgccgaaggt

SEQ ID NO: 2061 - DNA, 1485 bp, Zea Mays
ctcgctcgtagtgcatgtgcatccatccgacttcccaacagcctacctctcgcgttccaggacaaaacgcagtcttggctcggcagccgaggcgagaggagcctttgcccacctttgctcactcgcttcgctttccatcctgttgcgcggccgcggcgcaggtgcggttggccatcacaggccaaggacccctcttcctcttccctttgacccaccaccgcccccctcttcccttcttcccccactgtcgccgctcctcgtcttccactctctccactttgctgcttcttctcccttattaatgctcgtgggctcctatgatccgccctccgccgcgggtttcttgatccatccccggcccaaggaagcggaccccggcgaacactcctgacagattcgcccgtccgccgctccctcgattcggtcctccccgtcagcgccctattcttggcaggcaggtgtttaggacctctgcagcatagcatctggtccgtccctggagatgtccggcgtacaggagcagttcgagatcaagttccggctgccggacggcaccgacatcggacccaggcggttcccgccggcgtccaccgtcgccacgctcaaggagaccatcatcgcccagtggcccaaagataaggaaaaaggtcctaggactgtgaatgatcttaagcttattaatgctgggaagatactggagaacaacaaaaccctatcagaatgcaaaagcccgatttgcgacttctctgcgatgacaacaatgcatgtcgtcatccgcgcaccgacttcaagcaaacagtctgataaaagagcagaaaagaaagcgaaaaatttcaggtgcggttgtgccattatgtgacagcattgtgaatagtagcagagagaacgtggccatttcagttttctccctttttttttcctgctctcgctggagtgttgtattatgttcgaggcgctttctcctttcattttgttttgaagtaccgcgtgcaagcttcaacagctgtcaagtgccctttaatcgtgagtgtgcatcaagcacagaattagaaggcggttggctgctaattacccttaatcttgagtttgtcaagcacacaatttgaaggcagtcattagcgtcgaaactacgatgtccaccctatccaatcttccatggtttcacgcttctcttctatatttatgctaccctgggtgacaaatgtttaatgtatgccttccatgctagatgaactttttggaacgccattctaactcatcaatttctattctgtaaaactaaaaccagttgtaatctgccatagatcagtatgcttgctatatgggagtcacattgatatgttttgcaactgttgctcatactctaaattagtagtagtttattgctggttcatctcagtttgcatcagctaccgtaaggtttgtatagacccaagttggatcacaatgtatcagcagggccgttcctgtaggggtgccgaaggt

SEQ ID NO: 2062 - DNA, 891 bp, Zea Mays
atttggttggtgctattactgctggaacttatggtgcttagataaggaaaaaggtcctaggactgtgaatgatcttaagcttattaatgctgggaagatactggagaacaacaaaaccctatcagaatgcaaaagcccgatttgcgacttctctgcgatgacaacaatgcatgtcgtcatccgcgcaccgacttcaagcaaacagtctgataaaagagcagaaaagaaagcgaaaaatttcaggtgcggttgtgccattatgtgacagcattgtgaatagtagcagagagaacgtggccatttcagttttctccctttttttttcctgctctcgctggagtgttgtattatgttcgaggcgctttctcctttcattttgttttgaagtaccgcgtgcaagcttcaacagctgtcaagtgccctttaatcgtgagtgtgcatcaagcacagaattagaaggcggttggctgctaattacccttaatcttgagtttgtcaagcacacaatttgaaggcagtcattagcgtcgaaactacgatgtccaccctatccaatcttccatggtttcacgcttctcttctatatttatgctaccctgggtgacaaatgtttaatgtatgccttccatgctagatgaactttttggaacgccattctaactcatcaatttctattctgtaaaactaaaaccagttgtaatctgccatagatcagtatgcttgctatatgggagtcacattgatatgttttgcaactgttgctcatactctaaattagtagtagtttattgctggttcatctcagtttgcatcagctaccgtaaggtttgtatagacccaagttggatcacaatgtatcagcagggccgttcctgtaggggtgccgaaggt

SEQ ID NO: 2063 - DNA, 925 bp, Zea Mays
cttacatgttaggtaaagggcacttctatctttccttggagcaatggagcagctgaggaagcactcattctttaaataaggaaaaaggtcctaggactgtgaatgatcttaagcttattaatgctgggaagatactggagaacaacaaaaccctatcagaatgcaaaagcccgatttgcgacttctctgcgatgacaacaatgcatgtcgtcatccgcgcaccgacttcaagcaaacagtctgataaaagagcagaaaagaaagcgaaaaatttcaggtgcggttgtgccattatgtgacagcattgtgaatagtagcagagagaacgtggccatttcagttttctccctttttttttcctgctctcgctggagtgttgtattatgttcgaggcgctttctcctttcattttgttttgaagtaccgcgtgcaagcttcaacagctgtcaagtgccctttaatcgtgagtgtgcatcaagcacagaattagaaggcggttggctgctaattacccttaatcttgagtttgtcaagcacacaatttgaaggcagtcattagcgtcgaaactacgatgtccaccctatccaatcttccatggtttcacgcttctcttctatatttatgctaccctgggtgacaaatgtttaatgtatgccttccatgctagatgaactttttggaacgccattctaactcatcaatttctattctgtaaaactaaaaccagttgtaatctgccatagatcagtatgcttgctatatgggagtcacattgatatgttttgcaactgttgctcatactctaaattagtagtagtttattgctggttcatctcagtttgcatcagctaccgtaaggtttgtatagacccaagttggatcacaatgtatcagcagggccgttcctgtaggggtgccgaaggt

SEQ ID NO: 2064 - DNA, 3751 bp, Zea Mays
cacagatcccggccgtccagcgcgagatccgacggcgccgcgctcgcagagcacgcgccccaccccttctattccggtccttcctttccctatcgtcttcctccccttctccactccacggaagtgctcgttggcacctgaacctcccagaacctcctcctccgcttgtctccaccctccacgccgccaccgatttatacacgcttcgtcccgccccgccgcgaccttctgttccataccatgccataccatttctcctgataaaccatccaatccagagttccattccagtctgaattgctcctcctaccttctgataagcaatcacgattgtgccatcaacactacagcgccccaccatggccgccgcgccgcctctgtccgccgacgcactttccttcctaacctccgcccccgccgcggccgcggccgtgccgacgccggtcgtagccgcggcgtggggcgcggcgagggcgggtcatgtgaggggtaaggcgggactaaggacgacgggaggaggaaggggcggggtactggctccggtggtcgggaagaggctctgccggacgccgctctccgttcgctgcaacgccaccagccgggacggcaggattacacaacaagagttcactgagatggcgtggcaagcaattgtctcatcccctgaggtggcgaaggagagcaagcaccagattgtggagactgagcatatgatgaaatccctgctggagcaacggaatggccttgcccgccgcattttttctaaggcaggagttgataatacaaggcttcttgatgccacggagaagttcatccagagacagcctaaggtattaggtgaagaacctggatctatgttggggcgtgacttagaagctctgatacaaagagcccgggacttcaagaaagagtacggcgattcatatgtctcagttgagcatctagtccttggctttgctgaagataagcggtttgggaaacagctgttcaaggattttcagattactgtgaagacgttgaaatcagccattgaatcgattagagggaagcaaaatgtaatcgatcaagatcctgagggaaagtacgaagctttggagaaatatggaaaggatctgacagctatggcacgtcaagggaagcttgatccagttattggaagagatgatgagattcgaagatgtatacagattttatcacgaagaacaaagaacaatccagttctgattggtgaacctggtgtagggaaaacagctatagctgaagggttagctcagaggatcgttcaaggagatgtcccacaagctctgacaaaccgtcgactaattgcacttgatatgggtgcattgattgctggtgcaaaatatcgtggagagttcgaggatagactcaaggctgttctcaaagaagttacagattctgatgggcagaccgttcttttcattgatgagattcacacagttgtcggagcaggtgccacaaatggtgcaatggatgctggtaatcttctcaaaccaatgcttgggagaggagaactacggtgtattggtgcaacaacccttgatgaataccgcaaatatattgagaaagatccagcactggagcggcgcttccaacaagtttttgttgatcaaccttcagttgaagatacaatttcaatactccgagggctaagagagagatatgagttgcaccatggtgtacgaatatctgacagtgcccttgtagctgcagctgttctttcagatcgctatatcagtggacgattcttgcctgacaaagcaattgatctggttgatgaatcagctgccaagttaaaaatggagataacatcaaaacctactgctctggatgagattgatcgtgctgtcttgaagcttgagatggagcgtctctcacttacaaatgatacagacaaagcatcaagggacagactgtcccgtcttgaagcagaactatcactcttgaaggataaacaacgtcaattgactgagcagtgggagcatgagaaagcagtaatgactaaaattcaatctatcaaagaagagattgacagggtaaatgtggagatacagcaggcagaacgtgagtacgaccttaatcgtgctgctgaactgaaatatggcagtctgaatgccttgcagcgccagcttcaagcgacagagaaggagcttgatgaatatcagagttctgggaaatccatgctaagggaagaggtgacccaagatgatattgcagaaatagtgagcaggtggacaggaattccagtttctaaactaaagcaatctgatagggagaaattgttgtatctggaggatgagctgcacaagcgagttgtcggtcaggatcctgctgtaaaagcagttgcagaggccattcagagatccagggctggattatccgacccaaaccgtcccattgctagtttcatgttcatgggacctacaggagttggcaaaacagagttagcgaaagcccttgcagcttttatgttcaacactgaggaagctgttgtcaggattgacatgagcgagtacatggagaagcattcagtctcaagattgattggtgctccaccaggttatgttgggtatgaagagggtggtcaactaacagaagctgttcgtcgtaggccatattccgtcgtcttgtttgatgagatcgagaaagctcattcggatgtgttcaatgtcttccttcaaatactggacgacggtagggttaccgactctcaaggacggaaagtgagcttcaccaacaccataattatcatgacgtccaacgttgggtcgcagtatatactaaacatggacgaagaagttggatcatctgattcagcctatgagaacataaagaggagggtgatggatgctgcaagatctgtgttccgtccagagttcatgaatcgtgtagatgagtatattgtcttcaagcctctcgagagagaacagatcaacagcattgtcaaattacagctcgcaagagtacagaagaggatcgcagaccgcaaaatcaagctggaagtctcacccggtgctattgaattcttgggaagcctggggtatgacccgaactatggcgcgaggccggtgaagagagtgattcaacagcacgtggagaacgaactcgcgaagggcatcctcagaggtgatttcaaggacgaggacagcatctttgtggacacccaggtcacggtgccctctaacggccagcttccgcaacagaagctagttttccggaaagtgggtgagcaatcgaagcccgctgctgaaggcgagaagttcttgccggctgtctgatggagcacggttgcagttctacagatcgtgagcaataaaatgtacatataaaggtgccaaactggtagagtactccgtttggcttagtagagcatcacagccagaatttgttctatggtacagctcagtttacatggagcagcgaattttgttttgtttctgccatttttcttttcagtggaagtggtatccacaagtctcctgtcctcatcagggataaaactcatattttctctttttccttgaatgtattgtttgtagcacctagagaagataatattcccggatgctgttaagacatatttaaggatgccgataaacaaaaggaggttttgttcgattgcatcgggattgaagaggattgagcggattaacgaggcgtttggtttgaggaatgagccaattcattatcttctcactcttcaatatttttgtttgatttgtggaatagaatg

SEQ ID NO: 2065 - DNA, 2345 bp, Zea Mays
gtttcctcctgttttgtctgctgttttatgatgaaagtgaaaatgatgctggaggccaaaccatgtgccacaaatggtgcaatggatgctggtaatcttctcaaaccaatgcttgggagaggagaactacggtgtattggtgcaacaacccttgatgaataccgcaaatatattgagaaagatccagcactggagcggcgcttccaacaagtttttgttgatcaaccttcagttgaagatacaatttcaatactccgagggctaagagagagatatgagttgcaccatggtgtacgaatatctgacagtgcccttgtagctgcagctgttctttcagatcgctatatcagtggacgattcttgcctgacaaagcaattgatctggttgatgaatcagctgccaagttaaaaatggagataacatcaaaacctactgctctggatgagattgatcgtgctgtcttgaagcttgagatggagcgtctctcacttacaaatgatacagacaaagcatcaagggacagactgtcccgtcttgaagcagaactatcactcttgaaggataaacaacgtcaattgactgagcagtgggagcatgagaaagcagtaatgactaaaattcaatctatcaaagaagagattgacagggtaaatgtggagatacagcaggcagaacgtgagtacgaccttaatcgtgctgctgaactgaaatatggcagtctgaatgccttgcagcgccagcttcaagcgacagagaaggagcttgatgaatatcagagttctgggaaatccatgctaagggaagaggtgacccaagatgatattgcagaaatagtgagcaggtggacaggaattccagtttctaaactaaagcaatctgatagggagaaattgttgtatctggaggatgagctgcacaagcgagttgtcggtcaggatcctgctgtaaaagcagttgcagaggccattcagagatccagggctggattatccgacccaaaccgtcccattgctagtttcatgttcatgggacctacaggagttggcaaaacagagttagcgaaagcccttgcagcttttatgttcaacactgaggaagctgttgtcaggattgacatgagcgagtacatggagaagcattcagtctcaagattgattggtgctccaccaggttatgttgggtatgaagagggtggtcaactaacagaagctgttcgtcgtaggccatattccgtcgtcttgtttgatgagatcgagaaagctcattcggatgtgttcaatgtcttccttcaaatactggacgacggtagggttaccgactctcaaggacggaaagtgagcttcaccaacaccataattatcatgacgtccaacgttgggtcgcagtatatactaaacatggacgaagaagttggatcatctgattcagcctatgagaacataaagaggagggtgatggatgctgcaagatctgtgttccgtccagagttcatgaatcgtgtagatgagtatattgtcttcaagcctctcgagagagaacagatcaacagcattgtcaaattacagctcgcaagagtacagaagaggatcgcagaccgcaaaatcaagctggaagtctcacccggtgctattgaattcttgggaagcctggggtatgacccgaactatggcgcgaggccggtgaagagagtgattcaacagcacgtggagaacgaactcgcgaagggcatcctcagaggtgatttcaaggacgaggacagcatctttgtggacacccaggtcacggtgccctctaacggccagcttccgcaacagaagctagttttccggaaagtgggtgagcaatcgaagcccgctgctgaaggcgagaagttcttgccggctgtctgatggagcacggttgcagttctacagatcgtgagcaataaaatgtacatataaaggtgccaaactggtagagtactccgtttggcttagtagagcatcacagccagaatttgttctatggtacagctcagtttacatggagcagcgaattttgttttgtttctgccatttttcttttcagtggaagtggtatccacaagtctcctgtcctcatcagggataaaactcatattttctctttttccttgaatgtattgtttgtagcacctagagaagataatattcccggatgctgttaagacatatttaaggatgccgataaacaaaaggaggttttgttcgattgcatcgggattgaagaggattgagcggattaacgaggcgtttggtttgaggaatgagccaattcattatcttctcactcttcaatatttttgtttgatttgtggaatagaatg

SEQ ID NO: 2066 - DNA, 3241 bp, Zea Mays
cgtttatccgttcaggaaataattttgtctgtttaaatcccatgagaaaaaaaaaactcatccccgtggatccgggcccattgccatctctgccgaccacaccggcacacccccgcaaccactgttcccgccgattcgtttcgtcccaccgcgccaaactgcgacgacggcggtcgcagagttgccttccctccaaccgtaccgccgccgccgccgctgtcatgaggatgctagcaataagatatctgcataggactgttgctgcaaaagccgatacgattatggcgctgaagctatgcaggaggctatcaggatttattgttggtgcgaattctagatgttgtaggctaagtgatgttgataagtttgctttactgttccaaaactgcacagatgtgaggtctctgaagaagctccatgctcgtgttctgacacttggacttggcagggatgttattcttggctctgaaattttgatttgttatgctagtttaggtgtcctgtgcaagacaagactttgtttccaaggcttcttaaataatgatcttgctgagtggaattcagtcatggttgacatttttagggctggttatcctgaggaagctattcttttgtacagaggattgaagttgcgtcagattgacttagatgagaaaactgttacttttggcttgaagagctgcattgaacttcggaatttgttattgggcaaaggaatgcatgcagactcagtaaagcttggcctcagtagggataaatttgttggttcttctcttgttgggttatactctaagcttgccagaatggatgattcacagaaggcatttgaagagattctggacaaggacatcgtttcttacacctcgatgatcactggttattctgaaaatatggattctacttcatggaatgcatttaaaattgttagtgacatgtcgtggagcaacttggaagtaaatcgtgtgactctggttagcttactgcaagttgcgggtaatctgggagcaattagagaagggaaatcagtacattgctattcaataaggagagatattggtatctcagatgaagttctagagaccagccttgttcacatgtacatgcaatgtggagcttgccaattagcatctgctgtcttgaaaaattcggcgcaatctgtggcttcctggaatgcaatgcttgctggtcttgttcgaaccggacagagtggaaatgcaatacactatctttatatcatgctatatgagcataaggtagttccagattctgtaacctatgcaaatgtgatatctgcttgtgctgagctatgcaattcaggctatgctgccagtgttcatgcctacataattagaaggtctattcctctagatgtagttttggccacagctcttatcaaagtatacttgaaatgcactagaattacgatatccaagcgtctctttaatcaattggtggttaaagatacagtctcctataacgccatgatctatggttatctccaaaatggcatggtcaatgaagctattgcgttgctcaaagaaatggtgacagaatgtgttgcaccaaattttgtgaccattcttagtctgcttgcagctatcgctgatcacaaagattttgctagagggaggtggattcacgggttttcaattagacatggtttttgttccaatgtcgacattgcaaatcaaatcatacgtatgtattctggttgtggaaagattgcatcagcaaggattgtatttgcttcatttgaaaacaaaaatttaatttcatggactaccatgatgatgggatgcttattctgtggacatggaggtcaaacagttgaattatttcaattattaatgcaacaacacgacaataaacctgattctatcgctgttatgactgcaattcaggctgtttctgagtttggacatttgaaaggtgtaaagcaagttcattgctttgtctaccgtgccttgttggagaaagatacgaagaccatgaattctttgataactgcatatgccaaatgtggcaggttggatttatcagtaagtttgttcttgagtttggaacacagagatctagattcatggaattctatgatcagcgcttatgggatgcatggattttatactaagtcaatgacctcaatgtattcagttcgtccacaggaagagcattatggttgctttgttgatttaatgagtcgagcgggacatcttgaagaaggatacaagttcataaagttatctaccttaaatgacaaatctagtgtactttgtgctttactttctgcatgcagaacttatggaaatacaatgcttgggcaggttattagcaatgagctccttgaggttggacaacagaatccaggtacttatgctttgatttcagaagtatttgctcagaaaggacaatggaataaatcagctagtataaggaatagagcaaaagaaaatgggttgagaaaacttcctggttctagcttgatcgaatcagtggagcaagttagcaaggtgtgttagacaggtgtaagagcatcacatgtaattggtgcctttatcatgtgcttgaaccaccattcaatctcaatatgaagcaaaattttgttatgctctgaaagcctgaaccattttgaaggaaaatgcaaagttcacagtgcctttaccaacacgcatacacactatcggcttcttatgaagaaaaaggagataaatatcatgtttgaacatgctgattgttttgttccttcaaggatcaaggcagatgtttgagaggcacaagtagcagacagtgatggacctaaacacttggagagtaggtgagagctcaggtgcacgccaagacaaacggtggggaactatagcttctcgttatgcgtgtcacatcccgctacaggacgagggtatttatagcctgttcaggggtaggtggttcaaagtacgaccctacccccagccaccaactatatccaggggatattccatgtaacagagtaattacagtgccgttcgtacaacatacaacacgcactagattacacacccgcacgctacgctgactagtgggcctcctggcgcgtcttctggtgggccgacgttggactgatcaacgtgtagccttcaccgacatccttggagccttcgcgccaggtacccttcgttcgatctggatgagcgaagggtgacgagtggtccgcgtccgaggcgtagcgaagggtgattttacccctcgttatattaagtaattg

SEQ ID NO: 2067 - DNA, 3611 bp, Zea Mays
gccgaccacaccggcacacccccgcaaccactgttcccgccgattcgtttcgtcccaccgcgccaaactgcgacgacggcggtcgcagagttgccttccctccaaccgtaccgccgccgccgccgctggcaggagagctgccgattatattaataaagaagaagtggtccggatcggactaaacaacaaaacaaacaacaggcggttggattgggacatcaacacgccgacaccatacaacttaactcgccggttggactgggacatcaacacggcaccacactcaccgccgacacagagtacccaaacaaacacaggcagcggcaaccccacacgagagcatataaaactgctaaaggtcatcgttgtcaagcaaggatgcagagcatccagcaactccgacttcccaaagcagctgacagacgaaccaaacgaaaagctttgtgtctcaactcactaactatttcatatttcagcccactaactatcagtgtctcaactctcacgtctaattgtgttcagtcatgaggatgctagcaataagatatctgcataggactgttgctgcaaaagcccgacacagtggtgagaagcctttacactgagccaaaggtcctgggttcgacgcagcctctttgcggccgatacgattatggcgctgaagctatgcaggaggctatcaggatttattgttgggatgttattcttggctctgaaattttgatttgttatgctagtttaggtgtcctgtgcaagacaagactttgtttccaaggcttcttaaataatgatcttgctgagtggaattcagtcatggttgacatttttagggctggttatcctgaggaagctattcttttgtacagaggattgaagttgcgtcagattgacttagatgagaaaactgttacttttggcttgaagagctgcattgaacttcggaatttgttattgggcaaaggaatgcatgcagactcagtaaagcttggcctcagtagggataaatttgttggttcttctcttgttgggttatactctaagcttgccagaatggatgattcacagaaggcatttgaagagattctggacaaggacatcgtttcttacacctcgatgatcactggttattctgaaaatatggattctacttcatggaatgcatttaaaattgttagtgacatgtcgtggagcaacttggaagtaaatcgtgtgactctggttagcttactgcaagttgcgggtaatctgggagcaattagagaagggaaatcagtacattgctattcaataaggagagatattggtatctcagatgaagttctagagaccagccttgttcacatgtacatgcaatgtggagcttgccaattagcatctgctgtcttgaaaaattcggcgcaatctgtggcttcctggaatgcaatgcttgctggtcttgttcgaaccggacagagtggaaatgcaatacactatctttatatcatgctatatgagcataaggtagttccagattctgtaacctatgcaaatgtgatatctgcttgtgctgagctatgcaattcaggctatgctgccagtgttcatgcctacataattagaaggtctattcctctagatgtagttttggccacagctcttatcaaagtatacttgaaatgcactagaattacgatatccaagcgtctctttaatcaattggtggttaaagatacagtctcctataacgccatgatctatggttatctccaaaatggcatggtcaatgaagctattgcgttgctcaaagaaatggtgacagaatgtgttgcaccaaattttgtgaccattcttagtctgcttgcagctatcgctgatcacaaagattttgctagagggaggtggattcacgggttttcaattagacatggtttttgttccaatgtcgacattgcaaatcaaatcatacgtatgtattctggttgtggaaagattgcatcagcaaggattgtatttgcttcatttgaaaacaaaaatttaatttcatggactaccatgatgatgggatgcttattctgtggacatggaggtcaaacagttgaattatttcaattattaatgcaacaacacgacaataaacctgattctatcgctgttatgactgcaattcaggctgtttctgagtttggacatttgaaaggtgtaaagcaagttcattgctttgtctaccgtgccttgttggagaaagatacgaagaccatgaattctttgataactgcatatgccaaatgtggcaggttggatttatcagtaagtttgttcttgagtttggaacacagagatctagattcatggaattctatgatcagcgcttatgggatgcatggattttatactaaggtacttgaaatgtttaagctgatggaagaaggaaatattaatcctgatgggttaacattttcttcagtgctttctgcatgcagtcatgctggtctaattaaggagggtctgcatatttttcagtcaatgacctcaatgtattcagttcgtccacaggaagagcattatggttgctttgttgatttaatgagtcgagcgggacatcttgaagaaggatacaagttcataaagttatctaccttaaatgacaaatctagtgtactttgtgctttactttctgcatgcagaacttatggaaatacaatgcttgggcaggttattagcaatgagctccttgaggttggacaacagaatccaggtacttatgctttgatttcagaagtatttgctcagaaaggacaatggaataaatcagctagtataaggaatagagcaaaagaaaatgggttgagaaaacttcctggttctagcttgatcgaatcagtggagcaagttagcaaggtgtgttagacaggtgtaagagcatcacatgtaattggtgcctttatcatgtgcttgaaccaccattcaatctcaatatgaagcaaaattttgttatgctctgaaagcctgaaccattttgaaggaaaatgcaaagttcacagtgcctttaccaacacgcatacacactatcggcttcttatgaagaaaaaggagataaatatcatgtttgaacatgctgattgttttgttccttcaaggatcaaggcagatgtttgagaggcacaagtagcagacagtgatggacctaaacacttggagagtaggtgagagctcaggtgcacgccaagacaaacggtggggaactatagcttctcgttatgcgtgtcacatcccgctacaggacgagggtatttatagcctgttcaggggtaggtggttcaaagtacgaccctacccccagccaccaactatatccaggggatattccatgtaacagagtaattacagtgccgttcgtacaacatacaacacgcactagattacacacccgcacgctacgctgactagtgggcctcctggcgcgtcttctggtgggccgacgttggactgatcaacgtgtagccttcaccgacatccttggagccttcgcgccaggtacccttcgttcgatctggatgagcgaagggtgacgagtggtccgcgtccgaggcgtagcgaagggtgattttacccctcgttatattaagtaattg

SEQ ID NO: 2068 - DNA, 3433 bp, Zea Mays
gccgaccacaccggcacacccccgcaaccactgttcccgccgattcgtttcgtcccaccgcgccaaactgcgacgacggcggtcgcagagttgccttccctccaaccgtaccgccgccgccgccgctgtcatgaggatgctagcaataagatatctgcataggactgttgctgcaaaagcccgacacagtggtgagaagcctttacactgagccaaaggtcctgggttcgacgcagcctctttgcggccgatacgattatggcgctgaagctatgcaggaggctatcaggatttattgttggtgcgaattctagatgttgtaggctaagtgatgttgataagtttgctttactgttccaaaactgcacagatgtgaggtctctgaagaagctccatgctcgtgttctgacacttggacttggcagggatgttattcttggctctgaaattttgatttgttatgctagtttaggtgtcctgtgcaagacaagactttgtttccaaggcttcttaaataatgatcttgctgagtggaattcagtcatggttgacatttttagggctggttatcctgaggaagctattcttttgtacagaggattgaagttgcgtcagattgacttagatgagaaaactgttacttttggcttgaagagctgcattgaacttcggaatttgttattgggcaaaggaatgcatgcagactcagtaaagcttggcctcagtagggataaatttgttggttcttctcttgttgggttatactctaagcttgccagaatggatgattcacagaaggcatttgaagagattctggacaaggacatcgtttcttacacctcgatgatcactggttattctgaaaatatggattctacttcatggaatgcatttaaaattgttagtgacatgtcgtggagcaacttggaagtaaatcgtgtgactctggttagcttactgcaagttgcgggtaatctgggagcaattagagaagggaaatcagtacattgctattcaataaggagagatattggtatctcagatgaagttctagagaccagccttgttcacatgtacatgcaatgtggagcttgccaattagcatctgctgtcttgaaaaattcggcgcaatctgtggcttcctggaatgcaatgcttgctggtcttgttcgaaccggacagagtggaaatgcaatacactatctttatatcatgctatatgagcataaggtagttccagattctgtaacctatgcaaatgtgatatctgcttgtgctgagctatgcaattcaggctatgctgccagtgttcatgcctacataattagaaggtctattcctctagatgtagttttggccacagctcttatcaaagtatacttgaaatgcactagaattacgatatccaagcgtctctttaatcaattggtggttaaagatacagtctcctataacgccatgatctatggttatctccaaaatggcatggtcaatgaagctattgcgttgctcaaagaaatggtgacagaatgtgttgcaccaaattttgtgaccattcttagtctgcttgcagctatcgctgatcacaaagattttgctagagggaggtggattcacgggttttcaattagacatggtttttgttccaatgtcgacattgcaaatcaaatcatacgtatgtattctggttgtggaaagattgcatcagcaaggattgtatttgcttcatttgaaaacaaaaatttaatttcatggactaccatgatgatgggatgcttattctgtggacatggaggtcaaacagttgaattatttcaattattaatgcaacaacacgacaataaacctgattctatcgctgttatgactgcaattcaggctgtttctgagtttggacatttgaaaggtgtaaagcaagttcattgctttgtctaccgtgccttgttggagaaagatacgaagaccatgaattctttgataactgcatatgccaaatgtggcaggttggatttatcagtaagtttgttcttgagtttggaacacagagatctagattcatggaattctatgatcagcgcttatgggatgcatggattttatactaaggtacttgaaatgtttaagctgatggaagaaggaaatattaatcctgatgggttaacattttcttcagtgctttctgcatgcagtcatgctggtctaattaaggagggtctgcatatttttcagtcaatgacctcaatgtattcagttcgtccacaggaagagcattatggttgctttgttgatttaatgagtcgagcgggacatcttgaagaaggatacaagttcataaagttatctaccttaaatgacaaatctagtgtactttgtgctttactttctgcatgcagaacttatggaaatacaatgcttgggcaggttattagcaatgagctccttgaggttggacaacagaatccaggtacttatgctttgatttcagaagtatttgctcagaaaggacaatggaataaatcagctagtataaggaatagagcaaaagaaaatgggttgagaaaacttcctggttctagcttgatcgaatcagtggagcaagttagcaaggtgtgttagacaggtgtaagagcatcacatgtaattggtgcctttatcatgtgcttgaaccaccattcaatctcaatatgaagcaaaattttgttatgctctgaaagcctgaaccattttgaaggaaaatgcaaagttcacagtgcctttaccaacacgcatacacactatcggcttcttatgaagaaaaaggagataaatatcatgtttgaacatgctgattgttttgttccttcaaggatcaaggcagatgtttgagaggcacaagtagcagacagtggtatggttgcacatgtttggcttgatatttctgctttacattatttctcgtattgggtctgttgggcactgacgcatgcgatgcactgtcagatggacctaaacacttggagagtaggtgagagctcaggtgcacgccaagacaaacggtggggaactatagcttctcgttatgcgtgtcacatcccgctacaggacgagggtatttatagcctgttcaggggtaggtggttcaaagtacgaccctacccccagccaccaactatatccaggggatattccatgtaacagagtaattacagtgccgttcgtacaacatacaacacgcactagattacacacccgcacgctacgctgactagtgggcctcctggcgcgtcttctggtgggccgacgttggactgatcaacgtgtagccttcaccgacatccttggagccttcgcgccaggtacccttcgttcgatctggatgagcgaagggtgacgagtggtccgcgtccgaggcgtagcgaagggtgattttacccctcgttatattaagtaattg

SEQ ID NO: 2069 - DNA, 3477 bp, Zea Mays
gccgaccacaccggcacacccccgcaaccactgttcccgccgattcgtttcgtcccaccgcgccaaactgcgacgacggcggtcgcagagttgccttccctccaaccgtaccgccgccgccgccgctggcaggagagctgccgattatattaataaagaagaagtggtccggatcggactaaacaacaaaacaaacaacaggcggttggattgggacatcaacacgccgacaccatacaacttaactcgccggttggactgggacatcaacacggcaccacactcaccgccgacacagagtacccaaacaaacacaggcagcggcaaccccacacgagagcatataaaactgctaaaggtcatcgttgtcaagcaaggatgcagagcatccagcaactccgacttcccaaagcagctgacagacgaaccaaacgaaaagctttgtgtctcaactcactaactatttcatatttcagcccactaactatcagtgtctcaactctcacgtctaattgtgttcagtcatgaggatgctagcaataagatatctgcataggactgttgctgcaaaagcccgacacagtggtgagaagcctttacactgagccaaaggtcctgggttcgacgcagcctctttgcgaggattgaagttgcgtcagattgacttagatgagaaaactgttacttttggcttgaagagctgcattgaacttcggaatttgttattgggcaaaggaatgcatgcagactcagtaaagcttggcctcagtagggataaatttgttggttcttctcttgttgggttatactctaagcttgccagaatggatgattcacagaaggcatttgaagagattctggacaaggacatcgtttcttacacctcgatgatcactggttattctgaaaatatggattctacttcatggaatgcatttaaaattgttagtgacatgtcgtggagcaacttggaagtaaatcgtgtgactctggttagcttactgcaagttgcgggtaatctgggagcaattagagaagggaaatcagtacattgctattcaataaggagagatattggtatctcagatgaagttctagagaccagccttgttcacatgtacatgcaatgtggagcttgccaattagcatctgctgtcttgaaaaattcggcgcaatctgtggcttcctggaatgcaatgcttgctggtcttgttcgaaccggacagagtggaaatgcaatacactatctttatatcatgctatatgagcataaggtagttccagattctgtaacctatgcaaatgtgatatctgcttgtgctgagctatgcaattcaggctatgctgccagtgttcatgcctacataattagaaggtctattcctctagatgtagttttggccacagctcttatcaaagtatacttgaaatgcactagaattacgatatccaagcgtctctttaatcaattggtggttaaagatacagtctcctataacgccatgatctatggttatctccaaaatggcatggtcaatgaagctattgcgttgctcaaagaaatggtgacagaatgtgttgcaccaaattttgtgaccattcttagtctgcttgcagctatcgctgatcacaaagattttgctagagggaggtggattcacgggttttcaattagacatggtttttgttccaatgtcgacattgcaaatcaaatcatacgtatgtattctggttgtggaaagattgcatcagcaaggattgtatttgcttcatttgaaaacaaaaatttaatttcatggactaccatgatgatgggatgcttattctgtggacatggaggtcaaacagttgaattatttcaattattaatgcaacaacacgacaataaacctgattctatcgctgttatgactgcaattcaggctgtttctgagtttggacatttgaaaggtgtaaagcaagttcattgctttgtctaccgtgccttgttggagaaagatacgaagaccatgaattctttgataactgcatatgccaaatgtggcaggttggatttatcagtaagtttgttcttgagtttggaacacagagatctagattcatggaattctatgatcagcgcttatgggatgcatggattttatactaaggtacttgaaatgtttaagctgatggaagaaggaaatattaatcctgatgggttaacattttcttcagtgctttctgcatgcagtcatgctggtctaattaaggagggtctgcatatttttcagtcaatgacctcaatgtattcagttcgtccacaggaagagcattatggttgctttgttgatttaatgagtcgagcgggacatcttgaagaaggatacaagttcataaagttatctaccttaaatgacaaatctagtgtactttgtgctttactttctgcatgcagaacttatggaaatacaatgcttgggcaggttattagcaatgagctccttgaggttggacaacagaatccaggtacttatgctttgatttcagaagtatttgctcagaaaggacaatggaataaatcagctagtataaggaatagagcaaaagaaaatgggttgagaaaacttcctggttctagcttgatcgaatcagtggagcaagttagcaaggtgtgttagacaggtgtaagagcatcacatgtaattggtgcctttatcatgtgcttgaaccaccattcaatctcaatatgaagcaaaattttgttatgctctgaaagcctgaaccattttgaaggaaaatgcaaagttcacagtgcctttaccaacacgcatacacactatcggcttcttatgaagaaaaaggagataaatatcatgtttgaacatgctgattgttttgttccttcaaggatcaaggcagatgtttgagaggcacaagtagcagacagtggtatggttgcacatgtttggcttgatatttctgctttacattatttctcgtattgggtctgttgggcactgacgcatgcgatgcactgtcagatggacctaaacacttggagagtaggtgagagctcaggtgcacgccaagacaaacggtggggaactatagcttctcgttatgcgtgtcacatcccgctacaggacgagggtatttatagcctgttcaggggtaggtggttcaaagtacgaccctacccccagccaccaactatatccaggggatattccatgtaacagagtaattacagtgccgttcgtacaacatacaacacgcactagattacacacccgcacgctacgctgactagtgggcctcctggcgcgtcttctggtgggccgacgttggactgatcaacgtgtagccttcaccgacatccttggagccttcgcgccaggtacccttcgttcgatctggatgagcgaagggtgacgagtggtccgcgtccgaggcgtagcgaagggtgattttacccctcgttatattaagtaattg

SEQ ID NO: 2070 - DNA, 3420 bp, Zea Mays
gccgaccacaccggcacacccccgcaaccactgttcccgccgattcgtttcgtcccaccgcgccaaactgcgacgacggcggtcgcagagttgccttccctccaaccgtaccgccgccgccgccgctggcaggagagctgccgattatattaataaagaagaagtggtccggatcggactaaacaacaaaacaaacaacaggcggttggattgggacatcaacacgccgacaccatacaacttaactcgccggttggactgggacatcaacacggcaccacactcaccgccgacacagagtacccaaacaaacacaggcagcggcaaccccacacgagagcatataaaactgctaaaggtcatcgttgtcaagcaaggatgcagagcatccagcaactccgacttcccaaagcagctgacagacgaaccaaacgaaaagctttgtgtctcaactcactaactatttcatatttcagcccactaactatcagtgtctcaactctcacgtctaattgtgttcagtcatgaggatgctagcaataagatatctgcataggactgttgctgcaaaagccgatacgattatggcgctgaagctatgcaggaggctatcaggatttattgttgggatgttattcttggctctgaaattttgatttgttatgctagtttaggtgtcctgtgcaagacaagactttgtttccaaggcttcttaaataatgatcttgctgagtggaattcagtcatggttgacatttttagggctggttatcctgaggaagctattcttttgtacagaggattgaagttgcgtcagattgacttagatgagaaaactgttacttttggcttgaagagctgcattgaacttcggaatttgttattgggcaaaggaatgcatgcagactcagtaaagcttggcctcagtagggataaatttgttggttcttctcttgttgggttatactctaagcttgccagaatggatgattcacagaaggcatttgaagagattctggacaaggacatcgtttcttacacctcgatgatcactggttattctgaaaatatggattctacttcatggaatgcatttaaaattgttagtgacatgtcgtggagcaacttggaagtaaatcgtgtgactctggttagcttactgcaagttgcgggtaatctgggagcaattagagaagggaaatcagtacattgctattcaataaggagagatattggtatctcagatgaagttctagagaccagccttgttcacatgtacatgcaatgtggagcttgccaattagcatctgctgtcttgaaaaattcggcgcaatctgtggcttcctggaatgcaatgcttgctggtcttgttcgaaccggacagagtggaaatgcaatacactatctttatatcatgctatatgagcataaggtagttccagattctgtaacctatgcaaatgtgatatctgcttgtgctgagctatgcaattcaggctatgctgccagtgttcatgcctacataattagaaggtctattcctctagatgtagttttggccacagctcttatcaaagtatacttgaaatgcactagaattacgatatccaagcgtctctttaatcaattggtggttaaagatacagtctcctataacgccatgatctatggttatctccaaaatggcatggtcaatgaagctattgcgttgctcaaagaaatggtgacagaatgtgttgcaccaaattttgtgaccattcttagtctgcttgcagctatcgctgatcacaaagattttgctagagggaggtggattcacgggttttcaattagacatggtttttgttccaatgtcgacattgcaaatcaaatcatacgtatgtattctggttgtggaaagattgcatcagcaaggattgtatttgcttcatttgaaaacaaaaatttaatttcatggactaccatgatgatgggatgcttattctgtggacatggaggtcaaacagttgaattatttcaattattaatgcaacaacacgacaataaacctgattctatcgctgttatgactgcaattcaggctgtttctgagtttggacatttgaaaggtgtaaagcaagttcattgctttgtctaccgtgccttgttggagaaagatacgaagaccatgaattctttgataactgcatatgccaaatgtggcaggttggatttatcagtaagtttgttcttgagtttggaacacagagatctagattcatggaattctatgatcagcgcttatgggatgcatggattttatactaagtcaatgacctcaatgtattcagttcgtccacaggaagagcattatggttgctttgttgatttaatgagtcgagcgggacatcttgaagaaggatacaagttcataaagttatctaccttaaatgacaaatctagtgtactttgtgctttactttctgcatgcagaacttatggaaatacaatgcttgggcaggttattagcaatgagctccttgaggttggacaacagaatccaggtacttatgctttgatttcagaagtatttgctcagaaaggacaatggaataaatcagctagtataaggaatagagcaaaagaaaatgggttgagaaaacttcctggttctagcttgatcgaatcagtggagcaagttagcaaggtgtgttagacaggtgtaagagcatcacatgtaattggtgcctttatcatgtgcttgaaccaccattcaatctcaatatgaagcaaaattttgttatgctctgaaagcctgaaccattttgaaggaaaatgcaaagttcacagtgcctttaccaacacgcatacacactatcggcttcttatgaagaaaaaggagataaatatcatgtttgaacatgctgattgttttgttccttcaaggatcaaggcagatgtttgagaggcacaagtagcagacagtgatggacctaaacacttggagagtaggtgagagctcaggtgcacgccaagacaaacggtggggaactatagcttctcgttatgcgtgtcacatcccgctacaggacgagggtatttatagcctgttcaggggtaggtggttcaaagtacgaccctacccccagccaccaactatatccaggggatattccatgtaacagagtaattacagtgccgttcgtacaacatacaacacgcactagattacacacccgcacgctacgctgactagtgggcctcctggcgcgtcttctggtgggccgacgttggactgatcaacgtgtagccttcaccgacatccttggagccttcgcgccaggtacccttcgttcgatctggatgagcgaagggtgacgagtggtccgcgtccgaggcgtagcgaagggtgattttacccctcgttatattaagtaattg

SEQ ID NO: 2071 - DNA, 3198 bp, Zea Mays
gtttcgtcccaccgcgccaaactgcgacgacggcggtcgcagagttgccttccctccaaccgtaccgccgccgccgccgctgacgagcatattgggccgagcgcctccccggccagcagcggcacgtcgccggttccaagtccggggtcgacgcgctgtggggcttgctgaaactgtcatgaggatgctagcaataagatatctgcataggactgttgctgcaaaagccgatacgattatggcgctgaagctatgcaggaggctatcaggatttattgttggtgcgaattctagatgttgtaggctaagtgatgttgataagtttgctttactgttccaaaactgcacagatgtgaggtctctgaagaagctccatgctcgtgttctgacacttggacttggcagggatgttattcttggctctgaaattttgatttgttatgctagtttaggtgtcctgtgcaagacaagactttgtttccaaggcttcttaaataatgatcttgctgagtggaattcagtcatggttgacatttttagggctggttatcctgaggaagctattcttttgtacagaggattgaagttgcgtcagattgacttagatgagaaaactgttacttttggcttgaagagctgcattgaacttcggaatttgttattgggcaaaggaatgcatgcagactcagtaaagcttggcctcagtagggataaatttgttggttcttctcttgttgggttatactctaagcttgccagaatggatgattcacagaaggcatttgaagagattctggacaaggacatcgtttcttacacctcgatgatcactggttattctgaaaatatggattctacttcatggaatgcatttaaaattgttagtgacatgtcgtggagcaacttggaagtaaatcgtgtgactctggttagcttactgcaagttgcgggtaatctgggagcaattagagaagggaaatcagtacattgctattcaataaggagagatattggtatctcagatgaagttctagagaccagccttgttcacatgtacatgcaatgtggagcttgccaattagcatctgctgtcttgaaaaattcggcgcaatctgtggcttcctggaatgcaatgcttgctggtcttgttcgaaccggacagagtggaaatgcaatacactatctttatatcatgctatatgagcataaggtagttccagattctgtaacctatgcaaatgtgatatctgcttgtgctgagctatgcaattcaggctatgctgccagtgttcatgcctacataattagaaggtctattcctctagatgtagttttggccacagctcttatcaaagtatacttgaaatgcactagaattacgatatccaagcgtctctttaatcaattggtggttaaagatacagtctcctataacgccatgatctatggttatctccaaaatggcatggtcaatgaagctattgcgttgctcaaagaaatggtgacagaatgtgttgcaccaaattttgtgaccattcttagtctgcttgcagctatcgctgatcacaaagattttgctagagggaggtggattcacgggttttcaattagacatggtttttgttccaatgtcgacattgcaaatcaaatcatacgtatgtattctggttgtggaaagattgcatcagcaaggattgtatttgcttcatttgaaaacaaaaatttaatttcatggactaccatgatgatgggatgcttattctgtggacatggaggtcaaacagttgaattatttcaattattaatgcaacaacacgacaataaacctgattctatcgctgttatgactgcaattcaggctgtttctgagtttggacatttgaaaggtgtaaagcaagttcattgctttgtctaccgtgccttgttggagaaagatacgaagaccatgaattctttgataactgcatatgccaaatgtggcaggttggatttatcagtaagtttgttcttgagtttggaacacagagatctagattcatggaattctatgatcagcgcttatgggatgcatggattttatactaagtcaatgacctcaatgtattcagttcgtccacaggaagagcattatggttgctttgttgatttaatgagtcgagcgggacatcttgaagaaggatacaagttcataaagttatctaccttaaatgacaaatctagtgtactttgtgctttactttctgcatgcagaacttatggaaatacaatgcttgggcaggttattagcaatgagctccttgaggttggacaacagaatccaggtacttatgctttgatttcagaagtatttgctcagaaaggacaatggaataaatcagctagtataaggaatagagcaaaagaaaatgggttgagaaaacttcctggttctagcttgatcgaatcagtggagcaagttagcaaggtgtgttagacaggtgtaagagcatcacatgtaattggtgcctttatcatgtgcttgaaccaccattcaatctcaatatgaagcaaaattttgttatgctctgaaagcctgaaccattttgaaggaaaatgcaaagttcacagtgcctttaccaacacgcatacacactatcggcttcttatgaagaaaaaggagataaatatcatgtttgaacatgctgattgttttgttccttcaaggatcaaggcagatgtttgagaggcacaagtagcagacagtgatggacctaaacacttggagagtaggtgagagctcaggtgcacgccaagacaaacggtggggaactatagcttctcgttatgcgtgtcacatcccgctacaggacgagggtatttatagcctgttcaggggtaggtggttcaaagtacgaccctacccccagccaccaactatatccaggggatattccatgtaacagagtaattacagtgccgttcgtacaacatacaacacgcactagattacacacccgcacgctacgctgactagtgggcctcctggcgcgtcttctggtgggccgacgttggactgatcaacgtgtagccttcaccgacatccttggagccttcgcgccaggtacccttcgttcgatctggatgagcgaagggtgacgagtggtccgcgtccgaggcgtagcgaagggtgattttacccctcgttatattaagtaattg

SEQ ID NO: 2072 - DNA, 3253 bp, Zea Mays
caagtccggggtcgacgcgctgtggggcttgctgaaactgtcatgaggatgctagcaataagatatctgcataggactgttgctgcaaaagcccgacacagtggtgagaagcctttacactgagccaaaggtcctgggttcgacgcagcctctttgcggccgatacgattatggcgctgaagctatgcaggaggctatcaggatttattgttggtgcgaattctagatgttgtaggctaagtgatgttgataagtttgctttactgttccaaaactgcacagatgtgaggtctctgaagaagctccatgctcgtgttctgacacttggacttggcagggatgttattcttggctctgaaattttgatttgttatgctagtttaggtgtcctgtgcaagacaagactttgtttccaaggcttcttaaataatgatcttgctgagtggaattcagtcatggttgacatttttagggctggttatcctgaggaagctattcttttgtacagaggattgaagttgcgtcagattgacttagatgagaaaactgttacttttggcttgaagagctgcattgaacttcggaatttgttattgggcaaaggaatgcatgcagactcagtaaagcttggcctcagtagggataaatttgttggttcttctcttgttgggttatactctaagcttgccagaatggatgattcacagaaggcatttgaagagattctggacaaggacatcgtttcttacacctcgatgatcactggttattctgaaaatatggattctacttcatggaatgcatttaaaattgttagtgacatgtcgtggagcaacttggaagtaaatcgtgtgactctggttagcttactgcaagttgcgggtaatctgggagcaattagagaagggaaatcagtacattgctattcaataaggagagatattggtatctcagatgaagttctagagaccagccttgttcacatgtacatgcaatgtggagcttgccaattagcatctgctgtcttgaaaaattcggcgcaatctgtggcttcctggaatgcaatgcttgctggtcttgttcgaaccggacagagtggaaatgcaatacactatctttatatcatgctatatgagcataaggtagttccagattctgtaacctatgcaaatgtgatatctgcttgtgctgagctatgcaattcaggctatgctgccagtgttcatgcctacataattagaaggtctattcctctagatgtagttttggccacagctcttatcaaagtatacttgaaatgcactagaattacgatatccaagcgtctctttaatcaattggtggttaaagatacagtctcctataacgccatgatctatggttatctccaaaatggcatggtcaatgaagctattgcgttgctcaaagaaatggtgacagaatgtgttgcaccaaattttgtgaccattcttagtctgcttgcagctatcgctgatcacaaagattttgctagagggaggtggattcacgggttttcaattagacatggtttttgttccaatgtcgacattgcaaatcaaatcatacgtatgtattctggttgtggaaagattgcatcagcaaggattgtatttgcttcatttgaaaacaaaaatttaatttcatggactaccatgatgatgggatgcttattctgtggacatggaggtcaaacagttgaattatttcaattattaatgcaacaacacgacaataaacctgattctatcgctgttatgactgcaattcaggctgtttctgagtttggacatttgaaaggtgtaaagcaagttcattgctttgtctaccgtgccttgttggagaaagatacgaagaccatgaattctttgataactgcatatgccaaatgtggcaggttggatttatcagtaagtttgttcttgagtttggaacacagagatctagattcatggaattctatgatcagcgcttatgggatgcatggattttatactaaggtacttgaaatgtttaagctgatggaagaaggaaatattaatcctgatgggttaacattttcttcagtgctttctgcatgcagtcatgctggtctaattaaggagggtctgcatatttttcagtcaatgacctcaatgtattcagttcgtccacaggaagagcattatggttgctttgttgatttaatgagtcgagcgggacatcttgaagaaggatacaagttcataaagttatctaccttaaatgacaaatctagtgtactttgtgctttactttctgcatgcagaacttatggaaatacaatgcttgggcaggttattagcaatgagctccttgaggttggacaacagaatccaggtacttatgctttgatttcagaagtatttgctcagaaaggacaatggaataaatcagctagtataaggaatagagcaaaagaaaatgggttgagaaaacttcctggttctagcttgatcgaatcagtggagcaagttagcaaggtgtgttagacaggtgtaagagcatcacatgtaattggtgcctttatcatgtgcttgaaccaccattcaatctcaatatgaagcaaaattttgttatgctctgaaagcctgaaccattttgaaggaaaatgcaaagttcacagtgcctttaccaacacgcatacacactatcggcttcttatgaagaaaaaggagataaatatcatgtttgaacatgctgattgttttgttccttcaaggatcaaggcagatgtttgagaggcacaagtagcagacagtgatggacctaaacacttggagagtaggtgagagctcaggtgcacgccaagacaaacggtggggaactatagcttctcgttatgcgtgtcacatcccgctacaggacgagggtatttatagcctgttcaggggtaggtggttcaaagtacgaccctacccccagccaccaactatatccaggggatattccatgtaacagagtaattacagtgccgttcgtacaacatacaacacgcactagattacacacccgcacgctacgctgactagtgggcctcctggcgcgtcttctggtgggccgacgttggactgatcaacgtgtagccttcaccgacatccttggagccttcgcgccaggtacccttcgttcgatctggatgagcgaagggtgacgagtggtccgcgtccgaggcgtagcgaagggtgattttacccctcgttatattaagtaattg

SEQ ID NO: 2073 - DNA, 1518 bp, Zea Mays
ccacgcgtttctttaccctaacctttccactgctccagcgaaggcactcagcctccgccatttcttcatctccaatctccatccttccatcttccgctccctcccctgcttgcgctcggcacgcaggcgacctcggcggcgctcgggctcggtctctcagcgacggcgtcagcagattcccctcctgcctctcgccagtcccctcgccactggtcctctgcgaaccggccggtgactctgcgaaactattccagcacaggtacccaagtatggcggcaagacgcaatgttcggtactcgcctcttccttcagaggacggggatgacagcaattttattaaagaagatgttgacctccgatacacttacactccgaaatcgtacagaaggatcccatggaagtcaattgccctggcattgttcctcctcctcctaggaacttcacttctctttctttcttacttcatattcacaggtcacatggagggtgatagttctcaggcatatggtctcttgttcctgggtttcctttcctttcttcctggcattagtctactccatacgtgagtacgtgacagtccaacattaaaatgtaaaagcagcacacagtattgagagcagagtacatgtacccgtccatccatgagcaaaggctgagcaaacaaatatgaaaagcggcaggcagctgagagattcatgtgagccaaaacacgaaaggaggcaggggcgtataggtgcagatagacctgaagcgaatggacaggtgtgtatatcacaaaaggaggcaggtgtggatgaccggcagtgaaatggacttgaggaggtgtacttcaatagaggagcgcccaagcggcgaatcagggctgctgcctttgctgcctgccaccaagagctccagttctgccctccaccttctcgttttccctcctcctctctccttgaagttgcgtgagctccaagcggtcgatttcctgttcaaaagagcacatatgtgattcatgtctggcgtccgctgcagttctataggcgtcttcctgacgccatttcatgcctaggcaacacctaatcatatagggcggatgcatcccgaggtttctacgagactcgagttgcttactattcatggcggggagcaccagggtacacttttgcatccataccagattattagcctttcagtttgcgctgctgatgcagtaaggataatgaacaagcaaacaacttcaaactttccttgggaaccaattttagtgataaaagagttaagcatgcatatgtagtggctcaaatgattgttgtgtttataggatgttattgcttcgtcggtcagtaaaagaataattccttgtgatattgtgtaagagcaaaggttgattttgcaatttcttggtatttccttgtcaaatataacagaaattagtgccaccagtatgtgtttgtgtgatggtatctgttgatgaagatagactatgtactccatttggggctttggagtatgtatataatgtggctgcaccag

SEQ ID NO: 2074 - DNA, 1891 bp, Zea Mays
ccacgcgtttctttaccctaacctttccactgctccagcgaaggcactcagcctccgccatttcttcatctccaatctccatccttccatcttccgctccctcccctgcttgcgctcggcacgcaggcgacctcggcggcgctcgggctcggtctctcagcgacggcgtcagcagattcccctcctgcctctcgccagtcccctcgccactggtcctctgcgaaccggccggtgactctgcgaaactattccagcacaggtacccaagtatggcggcaagacgcaatgttcggtactcgcctcttccttcagaggacggggatgacagcaattttattaaagaagatgttgacctccgatacacttacactccgaaatcgtacagaaggatcccatggaagtcaattgccctggcattgttcctcctcctcctaggaacttcacttctctttctttcttacttcatattcacaggtcacatggagggtgatagttctcaggcatatggtctcttgttcctgggtttcctttcctttcttcctggtatgttgatttaactgcttttatgaacgtttttttattttgttatttcactgtcttttagcttcaaaagtcgtgtagctattctccagttgcatctcatacatggtttttaaggcgttgtggcgaggcagtgccccccccctccccctcacaacacctagacgtttatggcaaacgcctaggcaacaccatatgcatattttagatcctagtgcagcacatacataccttatttatttccaatttttttaggccagcacatactagtactgctaagggagtactactaatcaaagaaagatatcatactaatctatctttatgctttgagctatgtaattgtcaaagaaaataataacccaagcacaatcaggcattagtctactccatacgtgagtacgtgacagtccaacattaaaatgtaaaagcagcacacagtattgagagcagagtacatgtacccgtccatccatgagcaaaggctgagcaaacaaatatgaaaagcggcaggcagctgagagattcatgtgagccaaaacacgaaaggaggcaggggcgtataggtgcagatagacctgaagcgaatggacaggtgtgtatatcacaaaaggaggcaggtgtggatgaccggcagtgaaatggacttgaggaggtgtacttcaatagaggagcgcccaagcggcgaatcagggctgctgcctttgctgcctgccaccaagagctccagttctgccctccaccttctcgttttccctcctcctctctccttgaagttgcgtgagctccaagcggtcgatttcctgttcaaaagagcacatatgtgattcatgtctggcgtccgctgcagttctataggcgtcttcctgacgccatttcatgcctaggcaacacctaatcatatagggcggatgcatcccgaggtttctacgagactcgagttgcttactattcatggcggggagcaccagggtacacttttgcatccataccagattattagcctttcagtttgcgctgctgatgcagtaaggataatgaacaagcaaacaacttcaaactttccttgggaaccaattttagtgataaaagagttaagcatgcatatgtagtggctcaaatgattgttgtgtttataggatgttattgcttcgtcggtcagtaaaagaataattccttgtgatattgtgtaagagcaaaggttgattttgcaatttcttggtatttccttgtcaaatataacagaaattagtgccaccagtatgtgtttgtgtgatggtatctgttgatgaagatagactatgtactccatttggggctttggagtatgtatataatgtggctgcaccag

SEQ ID NO: 2075 - DNA, 1460 bp, Zea Mays
ccacgcgtttctttaccctaacctttccactgctccagcgaaggcactcagcctccgccatttcttcatctccaatctccatccttccatcttccgctccctcccctgcttgcgctcggcacgcaggcgacctcggcggcgctcgggctcggtctctcagcgacggcgtcagcagattcccctcctgcctctcgccagtcccctcgccactggtcctctgcgaaccggccggtgactctgcgaaactattccagcacaggtacccaagtatggcggcaagacgcaatgttcggtactcgcctcttccttcagaggacggggatgacagcaattttattaaagaagatgttgacctccgatacacttacactccgaaatcgtacagaaggatcccatggaagtcaattgccctggcattgttcctcctcctcctaggaacttcacttctctttctttcttacttcatattcacaggtcacatggagggtgatagttctcaggcatatggtctcttgttcctgggtttcctttcctttcttcctgcacacagtattgagagcagagtacatgtacccgtccatccatgagcaaaggctgagcaaacaaatatgaaaagcggcaggcagctgagagattcatgtgagccaaaacacgaaaggaggcaggggcgtataggtgcagatagacctgaagcgaatggacaggtgtgtatatcacaaaaggaggcaggtgtggatgaccggcagtgaaatggacttgaggaggtgtacttcaatagaggagcgcccaagcggcgaatcagggctgctgcctttgctgcctgccaccaagagctccagttctgccctccaccttctcgttttccctcctcctctctccttgaagttgcgtgagctccaagcggtcgatttcctgttcaaaagagcacatatgtgattcatgtctggcgtccgctgcagttctataggcgtcttcctgacgccatttcatgcctaggcaacacctaatcatatagggcggatgcatcccgaggtttctacgagactcgagttgcttactattcatggcggggagcaccagggtacacttttgcatccataccagattattagcctttcagtttgcgctgctgatgcagtaaggataatgaacaagcaaacaacttcaaactttccttgggaaccaattttagtgataaaagagttaagcatgcatatgtagtggctcaaatgattgttgtgtttataggatgttattgcttcgtcggtcagtaaaagaataattccttgtgatattgtgtaagagcaaaggttgattttgcaatttcttggtatttccttgtcaaatataacagaaattagtgccaccagtatgtgtttgtgtgatggtatctgttgatgaagatagactatgtactccatttggggctttggagtatgtatataatgtggctgcaccag

SEQ ID NO: 2076 - DNA, 613 bp, Zea Mays
ccacgcgtttctttaccctaacctttccactgctccagcgaaggcactcagcctccgccatttcttcatctccaatctccatccttccatcttccgctccctcccctgcttgcgctcggcacgcaggcgacctcggcggcgctcgggctcggtctctcagcgacggcgtcagcagattcccctcctgcctctcgccagtcccctcgccactggtcctctgcgaaccggccggtgactctgcgaaactattccagcacaggtacccaagtatggcggcaagacgcaatgttcggtactcgcctcttccttcagaggacggggatgacagcaattttattaaagaagatgttgacctccgatacacttacactccgaaatcgtacagaaggatcccatggaagtcaattgccctggcattgttcctcctcctcctaggaacttcacttctctttctttcttacttcatattcacaggtcacatggagggtgatagttctcaggcatatggtctcttgttcctgggtttcctttcctttcttcctggtttctacgagactcgagttgcttactattcatggcggggagcaccagggtgaacacgccctcctcgaac

SEQ ID NO: 2077 - DNA, 2295 bp, Zea Mays
cctcctctgtaggtctgctttttttttctttcttggattcaacctggtcgttaggttttcatttgtaactccacaccgtgttagggcgatctggaggtgaatcgctgaaaaagtagcagaaacagcagccgcacacaggtgtccgccatgggttcctgtacctccaagtccgcgcttgatcacaggaggccggcgaggtactacaccagggggcggcgagtccacagccgccggtccatcatgccggaggcgccccagtcgcagcagctgggcgatgccagcagaggccgcatgaccggcttctccatgagcgagatcgtgcacgtggagacggccaaccggggcaagtcggagcactccaagacgttccacctcacgcagatggaatggcaccacagccagagggactctaaagggtgcagcaacgaagacgcctggttcgattctgtcagcatcctcgaagatgattctgacgacgaattcaagagcgtcgatggagacagcgacgaagacgaagagcaggcggagaagcagcaatacgcgagcgtgtccagcttcgccgacgcgctctctcgcatcggagacatatgccgcggcgtgcctttacccgacatccttgcgctgaaaggcgacggacgtcggagccagcagagcatgccgtcctccttcggcctcaaggcggtcctcatcaaggacaagagcgacgccgcagacgacgacgacgacgacggcgacggcggtggcggcaaggagacctccacgccgtcccgcctgcgcaagctgctgcagtccatcagcttcaacgagagggtgcagcagctgacgggcggcagccccgcgaagaagaagtccaccgtcattcgcctctcgtacaagacgacgtcgtcgtgcggcggggacgactacgaggacggcggcggcggcggaggcggcgaatgcggtagatctaagaagtacgttgttcgtccgaaggtagggcagacagtcccgtgcggaggagagaggccggcgacgggatgctggtcgcggatggacccgtccctcttcaagctcaggagcgacaccttcctaaagtaccgccaagaaaaaatatatatattcacaagtatatttgtttttttttcttcttctggtaaagcatgcatgagctgtacgaaccgaacctctggtctcgtttttgtttttgtttttctctcccagagacaagaagaaatgcgcggctccaaactacgctgcctactatccgataggcgttgacctgtttgcctgccccaagaaggtccatcacatcgcccagcacctggaccttccgcagatcaagacgcaccccaagatcccgtcgctcctcatcgtgaacatccagatgcctacctaccccgctgctatgttcctcggcgacagcgacggggaaggcttgagcctggtcctgtacttcagggtgtccgaatgctacgacaaggaggtttccgaacatttcaaggagtctatgatgaggtttttcgaggacgaaaccgagaaggtgaaagggttcacgtcagaatccactgtgagctacagagatcggctgaagatcatggccggcctggtcaacccggacgacctccagctgggctctacggagagaaagctcgtccaggcgtacaacgagaagccagtcctctcgcggccccagcacagcttctacgagggagaggactaccttgaggtggaccttgacatccaccggttcagctacattgctaggaaggggctggactcgttcagggcacgcctcaagaacggcatcctcgatctggggttaacgatccaggcccagaagcagtcggagctccctgagcaggtcctctgctgcgtcaggctgaacaagatcgatttcactgaccaagaagttccaacaatagtcaccgttgatgacaactgacgcatttgatcaaaatggtcatcacacgtgcgagctattattaactgctgcaaggctagatccatgggattcagaggcgacacaacaactgatgactccacgccttggtttctgcctaatatgttcgccgatctgcctacttttaagcacgggctttttcttgtcttccctgtaactataatataataatgtatattatatacaagacgatacaaccctgcgggtgttggtcatgttcctaacctttttgcacactccacttgctggttgcaatatgcctgcttccagatgcagaaagacattgaacctgacaatattcaaatgcccatgcatcagacggacatgtacatccataataggattttgacagaaat

SEQ ID NO: 2078 - DNA, 1248 bp, Zea Mays
ggaaggtctccacgcacaatctgccgcccctgcgccaaatccgccgccatgcccctgctcgccgatggaaggtctccacgtgcaatccgccgcctgccatcgccagcgcgcaatcctttccatctgcgcccgcaacgctcgcccatgtgccaaatcctccttggacgcgccccgacggctggcgcaacccctcctcgtgccacgacttgcggagaatggaaggtccgtggagcaataaagggtggagcgaaggttattggcggcggcgggatcttcaacctatttgattggaagcgaaagtcgcgcaagaagctgttctccaactcgcccgaggggtccaagcttgttaagaggagcgaagaaacattgctgtcagggtgtctccacttgcttgatgaactcaagacactggcgaatgattgtcaacaccgtgaaatgagtctcgaagtcgttcctgatgacggggggtggtggaggttggggccgttgttgctccaggtgtagttctcgatgaagtagacacaatcaattctggccctgaacgagacctcccgtagaagctcttcagcctgcctaatggatctcatgctcttgcttggcatggatgtctcaccctcgccctctcacaattgtaatctctttgcccttttagtgttatgttcctgggcttcaaaagctcaatatatgaggtgggatttttgcctccccatcgagaaaaaataaaaaatgtatgttgtcatgctatgctgatggacgggggggaaggggcatgctcccaggccgccgcagagatgcagggttttttctgcgaatctgataaagcatgggtagcgcaagcagagatgcagggtgaaccgttccaaatctgataaagcatgggtagcgcaagcagagatgcagggtgaatcgttccaaatctgataaagcatgggtagcgcaagcagagatgcagggtttttcctgcgatattatgtttactgataaggagctagatataattgagatggctgtgtatggggacatcattcgtccagggaagcaatgtcgctgcagaacagtagtagaggtgctcgggcaggtgaagccaacgaatcgcatggctgcatgtgagttaccagacaaaggtgcctattaaaatgtataattcgaataaattggtttcgactctcacctgtcagaacacaaccttttgtagcgcagttgattccattcaacatgggaacttgagttctttctcacaaggcataa

SEQ ID NO: 2079 - DNA, 555 bp, Zea Mays
ctaagatctgcactaaccatctcgtgttgacgacaactaagatttagtagcaagccggcaacgacaaggcatgcgtgtgtcacgcactcgacttcgcaaatggtgagctcaaggagaagatgcttgctatccgttttggatctgtggacaacatctcaccctacaccgatgaaccagaggtcaccgcacccttggtcaagttcatgtatgaatttgttttgaacaaagctcaaagactgacatttgattcatcataaccaaatgggatccatttgttccgggaggttagcaagataatcgtggcttacaaatcatgaaatctattgcttcctaatggcacaaacatttatggaagtaaatacaaaggcatatggatctcgatctcactgactgttctctaaagggccgctttggatcttgaaaacagtgaaggaaaaaacttgcagcgtcttgtccatttgtcttccgacctagctaggcatgttgccatggttctggaaaatgttcagacatctgaagaggtaagttactatgttgtacaattgtactcttgag

SEQ ID NO: 2080 - DNA, 2386 bp, Zea Mays
acacgagccatacgaccctcgccctcgccagtcgccgccacaagagtccacgacagcgtacgtgcacggtgcaccggtatccgtcctacctacgctaaagctagccacaagcccacaactcatggacgacgcgtggtcgtggctggcctccctgccgcctcctcttcgtgatgaagacgggcccgacacaccgttgccggcgccatggtctctcccgctcgctgcctccaccgacggcgcttccatcgtgctgcgggccgacacaagtcccgctgcttcttcgtctccggccgacggcgatgacggtgacggcgagcccgcgctgctcgtcgctttctccgtcgccatcaacggcgcaggcggcgacgcgcgcgcgctgtgggcgtccgaaggcttcgcggcgtcctcgccggtcgcgccgagggtgcagcttctggtacagctcctcaacgaggtactcgcgctctctccgtacgtcccttgcttgggcgcgggcgttgacggtctcggcggggacgcgtccgaggccaaggtggacgcggagacggtctccgccgtcgtcggcgccgctgaagccggtccatctgcgcccggcgcggccttcttctcgctcgctcttcttctgcggctcttctggctgtgtgcaaccgacgccccggcagacgctgggtacctctacttccgagaccttggatcggagatcgagcgcggcctcggcgagtgccggccggcgctcgccgtgttcctgcgctccgtcggcccggacgtcgaggaccggttcatgcgctcgctcgggtacatgctcgccaagtggtgcttgctgcgggagatacaggctgttgccgggtcggcggccaaactggaagcaccgcgtcgccgtcgcgcgctccccgccgcgtgcctgtcgtacgccaccgaggtgcacggcctcttgatcctgaaaggctacgcgcctgtgctcgccatgccgcgcgtcacgggtcccgcgtccacgtccatcgccgcgtcgccgcacgagctgcccgaggagccggcgctgcggtacggcctggcgcaccagcagctggaggccgtggcgcagctggagtacgcggcgcgcgtgcgtgacaggaggttcgtaaccgtctccgtgcgcgtcgacaacgtccgggtacgcgtcgcgccgctcgcgttccgtagtaatgacggcggaggtaacgacggggaagaagcagaagacgacgacgacgccggcgtcgacgacatcatggacggcgagagccatttcccatcccgtatccgcctctgggtcggcccgcggttcggcgcgtcctatgccaccggcccaagcctcggccgctccacggggaacccagaacgcgacgtcgagatgacgcgcaccgttaagggcgccttctccggcgccactaaaccagccaacggcggcgtcgtgcccaggatcaaggcgaagatgcgctcgtcggcgcggacgcgtagcaggagctggcgctgggagcaggaggccgagggcagcgccggcgtgttcgagggggttctgtacgacccggtcaccgggacggaggtgtccgcgtggcgcccagctggtactggcggcggcggcggcactggagcgacagacccgaggaacggcatgagaaggcggtatggcgggcctgggcgagcgttcagtaagatgcgagggctggtggtggccggcgacgagctgccggaggagatgacgtggagggtggggagggaagcggaagggaggacgctgcgttggcgcttagggctcaaggcttgggtgacctacctgcccaacgaagcaaggagccgccacttcgagacccgctgcatcgagtgggcgcacgaggtggatctgccgcttctggccgtcgacggcgaccagagctaataaggattgatccaatcttcacctcgatctcctctttatcagcgatgtatgatattagaggctgatagttgtagatttacgttgcacctacttcggttgtagggatcgataggacgatagcacgtgaaacatttctaataattgtaacacgagaacatctgctgcagtaaaagataaaattttcggcgactaaagtcgttgtaaataaaccataaactgtgggacataacttatgtccgatgatcaaagacttatatccgatgatatttgtccctcgatcgtaacgtgtcgaaaataacattattttcgacgacaaccgtcgaaaataacttatgtctgacgaccacaaagggccatcaacaatcgacatttaccacagttaatggttgtaacggtcgccggtgggtctcacaggcattatgttcaacgccagacgttaagccataggatataatactattttatgtccgacggcccttcgtacatccatcg

SEQ ID NO: 2081 - DNA, 776 bp, Zea Mays
cgaatataacgttacgtccggcggccgccaaagaagccatcggatatgagttggtcgtcgaagatttctaattttacttgtgatcttcaattgtatggattggtagcacgtgaagcatttctgataatgtaacacgacaacatcggatgtgccgtagaaaaatggatcacttatatggggttgtatcaattaccaaaattggttcgccatcaagtcgacaaattttgccaacactttggtcgtttatagtttggacctagcaaatgaaccgatcctgccgagggcacgatatcgcaatatatatatgtcacaaatgtcgtggtatgatatgaattatactcatgtacttgtacataatcgtgtatttttgcaaacaaatagggtggctgtagaatatagtaggtgggatgagcaggtctgaatttgagagcctgtatatatgtttttttcttttgagctgacagctgacatgagtggatgaaactaaaaacataaagcgaaaaaaaaaactatggacttcatatttagtgaggtaggtcaaattttgtactacgaggtatataggacattttgaatgggcaagaaaaaaatcaaaaggtttttttcttgagaggaagacgagaaggcagtggcaagacagagcacagaaggattttttttttgtttatatgcccaacgatcttagagaacttgggctacatgacctcaaacgtgaaacatgtaggttgggctttcagactaaagtgactctggatgacaaagacccagcatgtaaa

SEQ ID NO: 2082 - DNA, 2455 bp, Zea Mays
agactagtcgtcgactcgtcgtctcggaatagggtaggcgaggcgacccgaatccgcgtggggacacgtttgcgcggctgcagccgcgcaataactactgggcaccggcgcacgaacgccgcgtgctccccgaccaccagctccaattccctccctccaaagcccccccccccaatcccttcacactgttctgcccaacacccaattgaagccgtcccaatcccaaccctactcccttgcctccccctaatgacatcgcctggcggcgtcttctccgccgcgctcgtcgccgaggacttcccttgggtggacatggaggaggagatggggatggccccggacatgtaccgcgaggtgttcgacctcgcgcagcgcgggacacgagcctttcgcgaccgcctcttcgacgaggcaatatcctgttacactaaagctcaaaatttgagaccagatccaattatccttggcaatcgaagtttgactttctgccggttaagtcaactgttgagggagagatcagcagctgactctgaatatcagcccttgaatggccttgatcctacaactcatgcagagttagctctgaaggatgcagagaagatattatctatcaacagtaattctcctagaccatatattctcaaggcatatgcgctatttctgatggagcattaccatgaggcacgtgagacccttcttgctggtcttcaagttgatcccctcagtcatgtcttgcaaacctgtctgaatgatctggataggaatacaaatattgcagctggggcaaggcgtgcaaggttagctaggattgatgattttgagtgcacattatgctttaagctattgtatgaacctgtcactacaccatgtggccattcattttgtcgctcttgtctacatcagtcaatggatcatggtaataagtgccccatgtgtcggacagtattatttatcggtccaagaacatgccctataagtgtaacattaagcaacataattcagagaaatttcccagaagaatatgctgagaggaggtcagaacatgagactatgacatatgctggtgttgatttgatgcctctctttgtcatggatgttgtacttccatcccaaaagatggcactgaacatatttgaacctcgctacagactgatgccagattctccccacagctagattttcagaaaagctggtcagaaaaaagctgaaccaaacaggcccataggctatataattttgaagcatattgatcgtcctgcacatcttggttccagtgaatacaaaaaagtgtacggagaataatggaagggaaccatcggatgggaatggttgctattgattcggcaacgggtactgtagcagattgtggctgtgaggtggaaatttcagagtgtgaaccacttccagatgggcgcttttatttagaggtggaaggcacacgtcggtttcgtatcgtgcgatcatgggatcaagatggatatagagttgctgaagttgaatggttgaaagatatacctctgccagaaggttcacaagggagaagagaactaatggaactggccaatggagcttcagagctggccagggcatatatcagacatgctagagataccgtacggactgcaaggcgaacaagacatctggatcttgagggcatgcctgggccacaggacccggaaaaatttagtttctggctagccaacttgataagtttgaggccctcggatagattagatacgttacgccttcgcgacactagggagagaatttctagtagcatcagtttgctccgtgattccgaacaaggctgccgtgtacaatgacggaaacagtacaagaatcgtttccacagaccaattcgttcgtctaggagtatatcgatttggagctactccgtgattccgaacaaggctgccgtgtacaatgacggaaacagtacaagaatcgtttccacgtaccaattcgttcgtctaggagtatatcgatttggagctacaccgtgattccgaacaaggctgccgtatacaatgacggaaacagtacaagaatcgtttccacagaccaattcgttcgtctaggagtatatcgatttggagctagggatgtaatatggttcagaaaatatctgtccagatccagactcgaagatggtgaatactggttcggatagaattttcggatatccggacttttttcggataacggatataaatacggatattttattcggatattgaattcgaatacaatatgtttgatatctgtcggatatcaaatatccagatattttctcggataaatcttctcggatatccggatatcttatctggatagctgtgtgtattttgttgatttttttagaaaaaatttaataatacacaaatatcctcagaaattcatgaaaatttatggaggcataccacatgtccacatataattctccaaaatatttgga

SEQ ID NO: 2083 - DNA, 2303 bp, Zea Mays
agactagtcgtcgactcgtcgtctcggaatagggtaggcgaggcgacccgaatccgcgtggggacacgtttgcgcggctgcagccgcgcaataactactgggcaccggcgcacgaacgccgcgtgctccccgaccaccagctccaattccctccctccaaagcccccccccccaatcccttcacactgttctgcccaacacccaattgaagccgtcccaatcccaaccctactcccttgcctccccctaatgacatcgcctggcggcgtcttctccgccgcgctcgtcgccgaggacttcccttgggtggacatggaggaggagatggggatggccccggacatgtaccgcgaggtgttcgacctcgcgcagcgcgggacacgagcctttcgcgaccgcctcttcgacgaggcaatatcctgttacactaaagctcaaaatttgagaccagatccaattatccttggcaatcgaagtttgactttctgccggttaagtcaactgttgagggagagatcagcagctgactctgaatatcagcccttgaatggccttgatcctacaactcatgcagagttagctctgaaggatgcagagaagatattatctatcaacagtaattctcctagaccatatattctcaagatggagcattaccatgaggcacgtgagacccttcttgctggtcttcaagttgatcccctcagtcatgtcttgcaaacctgtctgaatgatctggataggaatacaaatattgcagctggggcaaggcgtgcaaggttagctaggattgatgattttgagtgcacattatgctttaagctattgtatgaacctgtcactacaccatgtggccattcattttgtcgctcttgtctacatcagtcaatggatcatggtaataagtgccccatgtgtcggacagtattatttatcggtccaagaacatgccctataagtgtaacattaagcaacataattcagagaaatttcccagaagaatatgctgagaggaggtcagaacatgagactatgacatatgctggtgttgatttgatgcctctctttgtcatggatgttgtacttccatcccaaaagatggcactgaacatatttgaacctcgctacagactgatggtacggagaataatggaagggaaccatcggatgggaatggttgctattgattcggcaacgggtactgtagcagattgtggctgtgaggtggaaatttcagagtgtgaaccacttccagatgggcgcttttatttagaggtggaaggcacacgtcggtttcgtatcgtgcgatcatgggatcaagatggatatagagttgctgaagttgaatggttgaaagatatacctctgccagaaggttcacaagggagaagagaactaatggaactggccaatggagcttcagagctggccagggcatatatcagacatgctagagataccgtacggactgcaaggcgaacaagacatctggatcttgagggcatgcctgggccacaggacccggaaaaatttagtttctggctagccaacttgataagtttgaggccctcggatagattagatacgttacgccttcgcgacactagggagagaatttctagtagcatcagtttgctccgtgattccgaacaaggctgccgtgtacaatgacggaaacagtacaagaatcgtttccacagaccaattcgttcgtctaggagtatatcgatttggagctactccgtgattccgaacaaggctgccgtgtacaatgacggaaacagtacaagaatcgtttccacgtaccaattcgttcgtctaggagtatatcgatttggagctacaccgtgattccgaacaaggctgccgtatacaatgacggaaacagtacaagaatcgtttccacagaccaattcgttcgtctaggagtatatcgatttggagctagggatgtaatatggttcagaaaatatctgtccagatccagactcgaagatggtgaatactggttcggatagaattttcggatatccggacttttttcggataacggatataaatacggatattttattcggatattgaattcgaatacaatatgtttgatatctgtcggatatcaaatatccagatattttctcggataaatcttctcggatatccggatatcttatctggatagctgtgtgtattttgttgatttttttagaaaaaatttaataatacacaaatatcctcagaaattcatgaaaatttatggaggcataccacatgtccacatataattctccaaaatatttgga

SEQ ID NO: 2084 - DNA, 2202 bp, Zea Mays
agactagtcgtcgactcgtcgtctcggaatagggtaggcgaggcgacccgaatccgcgtggggacacgtttgcgcggctgcagccgcgcaataactactgggcaccggcgcacgaacgccgcgtgctccccgaccaccagctccaattccctccctccaaagcccccccccccaatcccttcacactgttctgcccaacacccaattgaagccgtcccaatcccaaccctactcccttgcctccccctaatgacatcgcctggcggcgtcttctccgccgcgctcgtcgccgaggacttcccttgggtggacatggaggaggagatggggatggccccggacatgtaccgcgaggtgttcgacctcgcgcagcgcgggacacgagcctttcgcgaccgcctcttcgacgaggcaatatcctgttacactaaagctcaaaatttgagaccagatccaattatccttggcaatcgaagtttgactttctgccggttaagtcaactgttgagggagagatcagcagctgactctgaatatcagcccttgaatggccttgatcctacaactcatgcagagttagctctgaaggatgcagagaagatattatctatcaacagtaattctcctagaccatatattctcaaggcatatgcgctatttctgatggagcattaccatgaggcacgtgagacccttcttgctggtcttcaagttgatcccctcagtcatgtcttgcaaacctgtctgaatgatctggataggaatacaaatattgcagctggggcaaggcgtgcaaggtaataagtgccccatgtgtcggacagtattatttatcggtccaagaacatgccctataagtgtaacattaagcaacataattcagagaaatttcccagaagaatatgctgagaggaggtcagaacatgagactatgacatatgctggtgttgatttgatgcctctctttgtcatggatgttgtacttccatcccaaaagatggcactgaacatatttgaacctcgctacagactgatggtacggagaataatggaagggaaccatcggatgggaatggttgctattgattcggcaacgggtactgtagcagattgtggctgtgaggtggaaatttcagagtgtgaaccacttccagatgggcgcttttatttagaggtggaaggcacacgtcggtttcgtatcgtgcgatcatgggatcaagatggatatagagttgctgaagttgaatggttgaaagatatacctctgccagaaggttcacaagggagaagagaactaatggaactggccaatggagcttcagagctggccagggcatatatcagacatgctagagataccgtacggactgcaaggcgaacaagacatctggatcttgagggcatgcctgggccacaggacccggaaaaatttagtttctggctagccaacttgataagtttgaggccctcggatagattagatacgttacgccttcgcgacactagggagagaatttctagtagcatcagtttgctccgtgattccgaacaaggctgccgtgtacaatgacggaaacagtacaagaatcgtttccacagaccaattcgttcgtctaggagtatatcgatttggagctactccgtgattccgaacaaggctgccgtgtacaatgacggaaacagtacaagaatcgtttccacgtaccaattcgttcgtctaggagtatatcgatttggagctacaccgtgattccgaacaaggctgccgtatacaatgacggaaacagtacaagaatcgtttccacagaccaattcgttcgtctaggagtatatcgatttggagctagggatgtaatatggttcagaaaatatctgtccagatccagactcgaagatggtgaatactggttcggatagaattttcggatatccggacttttttcggataacggatataaatacggatattttattcggatattgaattcgaatacaatatgtttgatatctgtcggatatcaaatatccagatattttctcggataaatcttctcggatatccggatatcttatctggatagctgtgtgtattttgttgatttttttagaaaaaatttaataatacacaaatatcctcagaaattcatgaaaatttatggaggcataccacatgtccacatataattctccaaaatatttgga

SEQ ID NO: 2085 - DNA, 1253 bp, Zea Mays
aaaaagctgaaccaaacaggcccataggctatataattttgaagcatattgatcgtcctgcacatcttggttccagtgaatacaaaaaagtgtacggagaataatggaagggaaccatcggatgggaatggttgctattgattcggcaacgggtactgtagcagattgtggctgtgaggtggaaatttcagagtgtgaaccacttccagatgggcgcttttatttagaggtggaaggcacacgtcggtttcgtatcgtgcgatcatgggatcaagatggatatagagttgctgaagttgaatggttgaaagatatacctctgccagaaggttcacaagggagaagagaactaatggaactggccaatggagcttcagagctggccagggcatatatcagacatgctagagataccgtacggactggcgaacaagacatctggatcttgagggcatgcctgggccacaggacccggaaaaatttagtttctggctagccaacttgataagtttgaggccctcggatagattagatacgttacgccttcgcgacactagggagagaatttctagtagcatcagtttgctccgtgattccgaacaaggctgccgtgtacaatgacggaaacagtacaagaatcgtttccacagaccaattcgttcgtctaggagtatatcgatttggagctactccgtgattccgaacaaggctgccgtgtacaatgacggaaacagtacaagaatcgtttccacgtaccaattcgttcgtctaggagtatatcgatttggagctacaccgtgattccgaacaaggctgccgtatacaatgacggaaacagtacaagaatcgtttccacagaccaattcgttcgtctaggagtatatcgatttggagctagggatgtaatatggttcagaaaatatctgtccagatccagactcgaagatggtgaatactggttcggatagaattttcggatatccggacttttttcggataacggatataaatacggatattttattcggatattgaattcgaatacaatatgtttgatatctgtcggatatcaaatatccagatattttctcggataaatcttctcggatatccggatatcttatctggatagctgtgtgtattttgttgatttttttagaaaaaatttaataatacacaaatatcctcagaaattcatgaaaatttatggaggcataccacatgtccacatataattctccaaaatatttgga

SEQ ID NO: 2086 - DNA, 1088 bp, Zea Mays
tgatcgtcctgcacatcttggttccagtgaatacaaaaaagtgtacggagaataatggaagggaaccatcggatgggaatggttgctattgattcggcaacgggtactgtagcagattgtggctgtgaggtggaaatttcagagtgtgaaccacttccagatgggcgcttttatttagagctaatggaactggccaatggagcttcagagctggccagggcatatatcagacatgctagagataccgtacggactgcaaggcgaacaagacatctggatcttgagggcatgcctgggccacaggacccggaaaaatttagtttctggctagccaacttgataagtttgaggccctcggatagattagatacgttacgccttcgcgacactagggagagaatttctagtagcatcagtttgctccgtgattccgaacaaggctgccgtgtacaatgacggaaacagtacaagaatcgtttccacagaccaattcgttcgtctaggagtatatcgatttggagctactccgtgattccgaacaaggctgccgtgtacaatgacggaaacagtacaagaatcgtttccacgtaccaattcgttcgtctaggagtatatcgatttggagctacaccgtgattccgaacaaggctgccgtatacaatgacggaaacagtacaagaatcgtttccacagaccaattcgttcgtctaggagtatatcgatttggagctagggatgtaatatggttcagaaaatatctgtccagatccagactcgaagatggtgaatactggttcggatagaattttcggatatccggacttttttcggataacggatataaatacggatattttattcggatattgaattcgaatacaatatgtttgatatctgtcggatatcaaatatccagatattttctcggataaatcttctcggatatccggatatcttatctggatagctgtgtgtattttgttgatttttttagaaaaaatttaataatacacaaatatcctcagaaattcatgaaaatttatggaggcataccacatgtccacatataattctccaaaatatttgga

SEQ ID NO: 2087 - DNA, 1137 bp, Zea Mays
gatcgtcctgcacatcttggttccagtgaatacaaaaaagtgtacggagaataatggaagggaaccatcggatgggaatggttgctattgattcggcaacgggtactgtagcagattgtggctgtgaggtggaaatttcagagtgtgaaccacttccagatgggcgcttttatttagaggtggaaggcacacgtcggtttcgtatcgtgcgatcatgggatcaagatggctaatggaactggccaatggagcttcagagctggccagggcatatatcagacatgctagagataccgtacggactgcaaggcgaacaagacatctggatcttgagggcatgcctgggccacaggacccggaaaaatttagtttctggctagccaacttgataagtttgaggccctcggatagattagatacgttacgccttcgcgacactagggagagaatttctagtagcatcagtttgctccgtgattccgaacaaggctgccgtgtacaatgacggaaacagtacaagaatcgtttccacagaccaattcgttcgtctaggagtatatcgatttggagctactccgtgattccgaacaaggctgccgtgtacaatgacggaaacagtacaagaatcgtttccacgtaccaattcgttcgtctaggagtatatcgatttggagctacaccgtgattccgaacaaggctgccgtatacaatgacggaaacagtacaagaatcgtttccacagaccaattcgttcgtctaggagtatatcgatttggagctagggatgtaatatggttcagaaaatatctgtccagatccagactcgaagatggtgaatactggttcggatagaattttcggatatccggacttttttcggataacggatataaatacggatattttattcggatattgaattcgaatacaatatgtttgatatctgtcggatatcaaatatccagatattttctcggataaatcttctcggatatccggatatcttatctggatagctgtgtgtattttgttgatttttttagaaaaaatttaataatacacaaatatcctcagaaattcatgaaaatttatggaggcataccacatgtccacatataattctccaaaatatttgga

SEQ ID NO: 2088 - DNA, 318 bp, Zea Mays
atggccgccccccgcctcccaccgcgccgagccgccgcccttgcagcccaggcgcggagacgaggccgcgcccgtgctgccgtgcagctttccgcgcgcgccgccggcgtttacgttagggagccgtcgcggctcaccgcgaaggcgtccgtgactgtgaggtgggccgtgggcgacgagaggaagggtgtcgggtggcctcccagaaacccaaaatttgtcgcctgggattgttatctgggccacgcagctccagtgaaggcacaatcaaacaggcctaaggacctttttttcctactggtgggctataacgaatga

SEQ ID NO: 2089 - DNA, 1103 bp, Zea Mays
ggaacttagggtttagggtaattcgagtgctcaaacttcactgtaacctacaaaacctggtttctagcatactgcttgccgacgtggcagccacggtggaccgcattacatacataattactcgtttcttccccatggaagaaccgtagcctcctctgttcaaatcgattccctagcagctctgccccctcccctagatctaacccgcatcgcacccattaatggaacatccacctccatatgtgaccgatgcagtacaagaaaggtgattgcactcagggccaagacaagcggaaactatggacggtacttctacatctgcccgacatacaagcgtgatggtagtggttgtgacttctggtactaggaagatgactatgagcaatatttgatggagaatggccatgttctacataatcatctaccaatattcagccaagcagagaagatgattactggtgaagctgatgttttaggaagttgtggaatgaagagggaagatagaaaagcagatggcctgatggttcaaaagctagatttagtagtagggttacttagttaagattgttgtgccactaaaaataatatcagtcttatgtgtgtgcatttttctgattaatctatatgtaaggattgtttgatgtgagttatggtggtaatgaatgaaaagagtactcagattcattaagcatttgtaaacctcatccccagttcacagaagcattattgttgccatttaagttcatataggcaacatacaaaagcattcatgtttagctagcatttttgttgccctctgtagataacacacacaaaagactgatcaagagcatcagtgcatcatacaaaaacattcatgctcaactattatagttaaaggcattcatcggccttgatcaaactgcatacatctacttcaattcttattattcttggtccttgtttctcccttatttgttggtggttttgcaatcctctttcttgttgtgttccttccttctttggttgctgatgtgaggactataggtcttggcacaggaatgtttgctatgatgaatttacattcgacacagcttgtttaggttcctgtgaaagtagttgac

SEQ ID NO: 2090 - DNA, 1075 bp, Zea Mays
ggaacttagggtttagggtaattcgagtgctcaaacttcactgtaacctacaaaacctggtttctagcatactgcttgccgacgtggcagccacggtggaccgcattacatacataattactcgtttcttccccatggaagaaccgtagcctcctctgttcaaatcgattccctagcagctctgccccctcccctagatctaacccgcatcgcacccattaatggaacatccacctccatatgtgaccgatgcagtacaagaaaggtgattgcactcagggccaagacaagcggaaactatggacgcgtgatggtagtggttgtgacttctggtactaggaagatgactatgagcaatatttgatggagaatggccatgttctacataatcatctaccaatattcagccaagcagagaagatgattactggtgaagctgatgttttaggaagttgtggaatgaagagggaagatagaaaagcagatggcctgatggttcaaaagctagatttagtagtagggttacttagttaagattgttgtgccactaaaaataatatcagtcttatgtgtgtgcatttttctgattaatctatatgtaaggattgtttgatgtgagttatggtggtaatgaatgaaaagagtactcagattcattaagcatttgtaaacctcatccccagttcacagaagcattattgttgccatttaagttcatataggcaacatacaaaagcattcatgtttagctagcatttttgttgccctctgtagataacacacacaaaagactgatcaagagcatcagtgcatcatacaaaaacattcatgctcaactattatagttaaaggcattcatcggccttgatcaaactgcatacatctacttcaattcttattattcttggtccttgtttctcccttatttgttggtggttttgcaatcctctttcttgttgtgttccttccttctttggttgctgatgtgaggactataggtcttggcacaggaatgtttgctatgatgaatttacattcgacacagcttgtttaggttcctgtgaaagtagttgac

SEQ ID NO: 2091 - DNA, 5881 bp, Zea Mays
gatgtcatactttctgcttattgctatacaaccaaaaaaatggaggtcagtcggccttacatttgatcctgattttggatggatcacatcccagatggctttcagagacagctgagtttcagcaagatcagttgcaccaacaaatgtgacaactgctaagcaatcaagtgcctacaatcattcggtttaacttaactagatgataaatttgctagaagcttagaaccagaaccacaaaaaaaagtgaaaattgcaacatacagagatcatcttttgtgcgtcaggccaagtttggagaactctcaaaagatgtggatgtgactcatccattatttcgtgcgaactacttccagcacctagtgtaattgccagtaagccttgcaggtacaaaatgaagggaaaatgatcaatatgagcatatcacatattctgctgcagcccttcagcgtaggaatgtgtctcccgcctcccccccccccctctcccttcccctccccctccccccggcgctcgaaccccccagagcctcatgtcggcgcctaccccaggcccggcggccacaacacctccctcccctgcgccggggctcctctcctctccggactcctttcctgctggacgttccaaggcccagcgctggagtgatgatggtggcggccctgctgggaggcaaccttcatatagggatgtgttgatctcctcctccatccctcccgtccagcccccccttgatgacgttcctgctgatggttgggttacggtcgtgaatcgtcatgctcgctggcgccgttctcgtcctccgaagcctccccccaggcctatccctgccgacttgcgtggcaaatgtttcaactgtttctcgccttcccaccgtgcggctgtctgtcgccgtctggtgagatgtttcctctgcaggctgtctgggcaccatgctagcgtgtgcccgcgccggcggacgatctcaggattaccacgacgttccctggtgtggcgtcctgtctctcactcttcgtcttccaccatggccccggtttgcgtggagggtggtcaggatggtgacgccgttgcgggctccggtggaggcggtggtctgagctccggcggcggcggtcaccgtcgaactcgacgggggcacaggaggcggagggcgagcggtgggctcggtggtggggaccgtgctgaggcctctggtgggacgccccaggcggccctggaggttgatcgcgtccttcccggtgtcgcttcccggccttcgcgcttctttaggcgcacccagaggatcactcaagctgaagacgatctccggcgtgccctgctcgtctctgttgtgggtcgggaggtctctggctacgccgcggaagtctctgatgcgctcatctcgagatatgatcttgaggcggatgcgctcgatcttcgtcgtgttgcgccgagcacctttgttgccctccttcccaacgtcgagctggctgatcgggtgttcaatggtggtcagtccctctacgcacctcccctcctgcacatcagaagatggtctcgtcatttcatggcctctggtggtagcgctttgccgcgactgctggacgtcgagcttcttggtctcccgattcatctctgggagatccgtacggcggagcagcttctggatgaacactgtataatcctcgatttgcatgatgacactaaggatggtggggacctgtccgtgttcaagttacgggtctggtgtgctgatccagggggtcttccgtcgattattgacctgcatgtggaggagtcgtcggtgctggagggggatgtgccttcgtccccgcgcacggtgatctaccatgtttcgatcatggtgtctcactctgaccggtcatcgatggtgccccctaccccaccttctccgtcgtttccgggcggccgcgacgatggccgggatcgcgactctggttctaggcagaagcgtcgtttcagctgccggccccagtcgtcttcggttcgtgcttcggttctctcgtgcctggggccgcgggtccattcaagccgcgacaatggcgggggtcgcgactctggttccaagcagacgcgtcgttgcggcttccagcatcagtcgtcttcggttcgcgcttcggttctctcgcgcctggggccacgcgacaactcaaattcggattttggcgggccaatcgatgccctagccttcccggtttctccggtcgatgggctggcggcgcctgtgcctgcaatctcctcccgggaggcggatgatgcttcgtttctgaggcctgtcggaccagttgatgcgtcagctcccccaaccttttcggtctctgagttggcagcgcctgtgtcttccaaggccttaattgctctggacgcttcctctcccgcctcctcgggtcctgtccttccatccgctggggataattattctctccaacttgctgtggtgcctggtgatcggtgtctgggcggctctgcctccacccatatccccggagatcttctgtcggaaacagcatcccctcctgtggtcaaccagattacgacgcacttggaccaggaggatctccagaacgcgacaccctcggatctccattcaagtaacctggggttggttccttccagaaccctgtggtgtatgcccccgaaggtttattccagaagatgccgggttttacagcagcatccccaagtttcgttggtcgactctcagttagttcagagctctgaaaacgtttcggtggatgtctccatttcgccttcggattcgcccatatcagatcagctcagatcttccttcagatgcagggttaccaagtctacagtgcatatcttgcctgctcctcagactggtagacctggggctgcgaactccactgttgttcctcctcgtcgcagccggcgtattgccggaattggtgtcgagaaccttgccacttccagcgatggtcagacaagattcaggaagaaggtgatgagggtccttcacgtgattgacgagaacgaaggcatcaatccagaggctctggatcgttacagcaaattgtttgacaagcctctctccccttcccatattcaggcgcttgcagccctttttggctggtctgcccctgaggtgggagagtgctgatctgttatatgtttggtcgttattgtctggggtttttattatgaatccttcaaaaattgtttgctggaatgtgagaggcttgaattctaaggctcggcaggatgtggttcgcaacttgattaattccttcagagccaatgtggtttgtattcaagaaactaaaatgcctgagatttccgttcagactgtcttgtcatctctgggaagtaattttgtgcacagattggtccttccttcggtagggtccagtggtggaattttggtggcctggaccaatgagattggaccagccagctcttcaagggtggatcttcatagtgtgtcggtgcagttcagcaccagggattagcaaccttggtggttaacttgtgtgtatggtcctcagggagatagcaataaacatcagtttatgcaggagctaagaggcttaagttctgtctgccttggtccgtggattatcatgggggatttcaaccttatatacagagatgaagaaaagagcactggcaactttaataggcagcttatgcacagtttcagaaggctcatcaatgatctcggcattaaagaattagctcttcacgagaggaaattcacctggtctaaccgtcaagatgcacccacgcttgttaaacttgacagaatgttttgttctccagattgggagcaactttttcccaactgtcttcttcagagtgcgagcactgatggttctgatcactgccctttgctgttgggcctccatgacttgaaacctggtcgtcgccggttccactttgaaccccactggactaagcttcctggttttcttgaggcagtagagatcgcttggaactcggtttctccctcctttgacccttttgttaccctttctagaaggtttggagccactgtcagacaccttcagagatggtctcataaaagggaagggaatattatggctcagcttgggatggcgcgtgaaattatgcataaattccagattgcccaggatagtaggcctttatcggtggtcgaaaagtggttgctggaccagcttgatggtcacaccgtggccctttcctccttgcagcgctctatggctcggagccgctctaggatcacctggatggctgagggggatgctaatactgctttcttccacctgcacgctaagtatcgcaaaggcaagaattttattggtaatcttttatcctcggatggtcttattttgtccagacacgaggataaggaggagttgcttaatgatttctacttcaatctgctgggtcgttcaactgacagagagcattctataaatctggaacacctgcacatccccactcatgacctttcatcgctggacagcccctttactgaggaggaaatctggaaaaccatcttatccctgccgtccagtaaagctcctggcccggatgggtttacagggaaattttataaatcctgttggcagattattaagggagatattttggctgctgctatggcagtctggaataggaggctgctgaattttgacttgctcaattcagcctatattattcttctgcccaaaaaggaagacgcctcgctcgttaaggatttccggcccatcagcttggttcattcttttgctaagctcgtcaccaagcttttggctaacaggctggctggtcatctggataaattggtgtcgcatactcaaagtgcctttattaaaggtagatccatccttgacaacttcatgctagttcaacagacagctaatctattccatcagaaaagacttcctcggatccttcttaagttggatatcacaaaagcctttgattcggtctcgtggtctttcctgttagaagtgatgaagcatttgggtttcggtcaaatttggtgtgatattgtgagtaatctgcttgcttctgcatcaactcaagtgattcttaatggcgaaccaggtcagaaaattcaccacagaagggggcttcggcagggggaccctctgtctcccatgctgtttattctggttatggatattttatactacttgttaaagaaggcagctgaagacggtctgctgaaatctttatctgcccactcagagctctgccgcacttctcttttcgccgatgatgtggtgatcttcctgcaacctgtggctctggatctcgaggtcaccatggatatcctaaagatccttggtgaggcatcagggcttaaaacaagtatggaaaaaagcagtgtatttcccattcactgttcggcggaaaatgtttctaccatccataatcttcttccatgtcctgttgccaattttccttgcaattacttgggggtgcctctttcgttgaagcgacttggtaaacatcacattcagccattcattgataagattgcagatcgcctgcctagttggaaagccgacctcctatctagggctggaaggctgattcttgttcagtcagttctatcttcgatgatggtttatttagctatggcattggaccttccttcttgggctttaaaggccatagacaaaattcggagaaatttcctttggcgaggaagaaaagaagctatgggtggccactgtttggtggcctggaacaaagtgactagacctaaagagcttggaggcttgggcatctcccacctgcagcatatgtgttgggccctcagattgcgttggctctggttaaaaaaaactgaacctgaccggccctgggcagccttcaattttcatgtgcacccttcagttctggccttcttttctgcagcagtttcttc

SEQ ID NO: 2092 - DNA, 2058 bp, Zea Mays
attggctcaacaacctttaggtcatggaggaggatttggaagagttgggctcctggaaaatgtaaattcttcatgtggctggtggcgcacggccgctgctggaccgctgaccggctggcaaggagaggcctgcctcatcctcaaagttgtctgttatgtgaccaggaggaagaaactatgaatcatctgctagtttcctgtgtcttctcaagggaagtctggtttaatatcctgaaaacagtcggtttgcagcacctctctcccagtctcgattcttcttcctttgatgattggtgggagaatgtaagcatgacccttattagccactccgataagaagttgcgcaaggggctgaactcccttatcattttaggagcttgggccatttggattcatcgcaatcaatgtgtcttcaacggagagcagcctagggctagcaaggtcataaattgggtcatggctgagtctcatctttggtgtagggctggggctcgcggattatctgatatccttttacctcggcatactatttgaggagttggtctctagtatgcttagtgtactggtgctcctgctcattttcttttgttgggtggtgtgtagagttgtatgaggttctttaacacctcaccccatccttttctacttaatataatgatacgcagctctcctgcgtattcgagaaaaaaaaagaaaatgattatggagaagaatactaaccaatgcagcgacaagccagacacacctcttttacagatccccttttaattgaattgatgaactggctcaatagtgtgacatatctttaaagaggaaaagaatacatcagttaaagttaacttaaataaggatcccctttcccaagcaaactatgattttgtccactcatgcatatatgtaagcccactatttttttaaaaaaaaaaacagagataactgcattgatgaggttacaacttacacacccacgggtgtgcacgacataatatatccatcttttgactggtctagttatatacaattttaagacaccattaaagaatcataataacttacttgttttccactaaaccaagaagcacaaaactttcaaaagcatcggtaagagagcccaatgcttcctctcttgtggatcccctgcatcagccatgtatgttacagtaacaaagtgtttagtaatgttatttggtcattcaaatcaccaattggtaaattctgatcaacatcaggcggatattacaaaaagaaagcccacaagcaacactttgtgatgatagtgaaaggagtacattttattattctcaagaaaaagtgccttgttaagtgataaagtgaatgtaggttgttgagaatgaaagaaaaaacatcagagagatgagaacaaacgaaaccttcagtatactataagcatcaaatagaactactgaaagtccattccttccgacttttgatgcatttactctagggaacattgatgtcatggtcaatggatattagttcatcaatcttaaacaaatatggcaaggactcgatcaagtccaacatctgtgagcattttgacaaattcataacacctataaaaaaacaaaaagccagttctgtaattgtgaaaagcataaaggtaaggtacagatagttgcatgaggcctattccagcatgtagaaatgtaatactcaaatgactccaaaccttgccacactaccgaatttcgcgcaagacaagagaaaacttggcacgagaacaaagggagtaaaggatgttttctaccccctaacacacattgctaggatcgtcgactgaaaaactaggcaatgtgtggagttagtgccaggagaaaatgtactgtagcggctatcagttgtgttgtcaatatatatgaagcggtcacttccgaagtaagttgttgtgcattgtttgacgtttcagcaacaacatgaataagttgctaaccaagcaagcatgaacattaacagtctgcacatccaaacaatcaactactggcacaaacctgactaacagacagccatagcaaccagcaaggtgctagactacgaata

SEQ ID NO: 2093 - DNA, 899 bp, Zea Mays
attatattattattaaagaggctaaatgccccgatattccttgaccatatctataaatgcaagctctgcagactactcccaactcccaaaaccagaattaattatctgacggtgcatgccatgcccatgacacccctcgagtgcgacatggcccctgcagcttctcgccagtcgtggcctcttcctcgctgcggcctgctggtcttggcccttgcactggcgacgaccgccgcggtgggcagcgcgcagctgtcgtcggagagctactacgacgcgtcctgccccgccgcccttctcaccatcaggaccgccgtctcgacggccgtgctgctggagccccgcatgggggcctcccttctccgcctccacttccacgactgtttcgtgcagggttgcgacgcgtcggtgctgctagacgacacggcgagcttcaccggcgagaagggggcggggccgaacgcggggtcgctccggggcttcgacgtgatcgacaacatcaagatgctgctggagctgctgtgcccgcagaccgtctcctgcgccgacatcctcgccgtcgccgcccgcgactcggttgcacaactgggaggaccatcgtgggcggttccgctgggcaggagggacgcgaccacggcgagcgcgtccctggccaacagtgacctccctgggcctaccagcagcctcaacggcctgctcaacgctttctccaacaagggtttgagcagcaccgacatggttgccctctcagatcggcacggcagcagatcatcaacagctagctagctagctagctcgagcacatggtgtgtcctagtagaaaataaaccaaattgcaaaagcatgcacagggaacaatcgaaatggacgcggcagcaaaccaggtcttccactcattccag

SEQ ID NO: 2094 - DNA, 3176 bp, Zea Mays
atgaaattgaagttgcaggcgagtggcctatggatggcggtgaacatcggccccaccgactacatcaacgatcacaatgctctggaggtcatcgccctcgaggtacctccaaagatgcaaggggtgaccacgagcaaggcggccaccaagatcacgtgggacgcactcaagaaaacgcacctcgacatggaccgagtgcgccaagcaaaggcaaacacgctacgacacgagtttgactcacttcggttcaaggacagtgagcctattgacgaatttagcatgtgcatcatcaacttggtcaaccagctagaggtcctcgatgtcggctactaggagctagagatcgtgtacaaattcctaaaggcaactccaccaaggcactcgtagatcatgatggcaatcgaaacccatctcgatctcgatatactaactaaagagttgatcgggaggctcaagacagcaaaagaatggtacaatctctatggcagcagcagtggcggagccttagctggtctgaacctaaccgaggatgagttggcggcattgttttcagatcgcctggtcgtttgatcgacccattagtcgcccctgatcgagcctaatcgtccccctggtcgacgtgtgtatttgcaggacatatatatgtatatatagacatatagtcatatataacactatatatattatatagatatatagtctaaactgaagtctgaactaaactaaactgaactcaagacaggagcttcagagcttcagaagtcttaactaaactgaagtctgaaccgaacaaaaaaatgagataagttcagacatcagagttcagtcttaactggagacttcagagttcaatctaaaatgagaaaagtccagtcttaactggagacttcggagttcagagttcagtctaaaatgggaaaagttcagtcttaactggagagttcagagttcagacatataccttcagatgaggagctcatctccagtccctgtgttttctcccagctggtgtagagagaagggagttggagccttggagggagagagaagggtgttggagccttggagggagagagaagggtgaagaagggagagggaagggagctgggaagagagaaatgagaagggtgttttctcccagacggtagggaagatggcagtcgagcatgagacatgaacgtggtggcgggcacaacagaaacagtggcagctcgaggccaccccagaacaccgacgacaacgaaaagagaaagcggattgatgccgacgaatgtaagtatgtggcaaaacaggtcactgggctcacgaatgtcacaaggagagggacgagcaagtccatgcttcaaggcccaaactgaagaagaggcgagcaagagggcaccttcaagtacaatgattttgcatgtaacctagaaggtcttcaaagtctattatctacaaacaaactagaaggatttgttgaatatcgattatataaataattctaatgtagttgtcttccctcaaatccatcattgccaggagctagaaatgggcacatcgaccagatcgagggtgaatgcaaaacacgatggcacttgccgaggaaccagagcctatgtcgctcgtgactctaacgtccgccggtgccaccataccgcctcccgtgaaggcgaccccaaccccaacgccggagatccacgtcgatgagaactggttgttcgtccagctcaagaagggcggtggtggaagaacacgttggatcctcgacactggcgtgacgaaccacatgacgggggattgcatggccttctctgaacttgacaccagcgtttgtgggatgttcgattcggcgatagctccatggtcaccatcgagggctgcggcactatcctctttaaggcaaggtcagcgagcactaggtgttgactagcatctacttcatcccctagtcgtcagtaaacatcgtcggcctgggtcagcttgacgaggatggccaaaggtcctaatcgagaatgacattcctaggatctgagaccagcattgacggttgctggtcaaggtggagcgttcggcgagccgccactacgaccttgacatcaacatcactcggcatgtgtgcctcgccgcccgaactcgaaagtgggctggcaatggcatggtgcatgtactactgccaatcgaccacgtcgaccgggctcagggaattgttgaagggtggcatggtgcacgtactactgccaatcgaccacgtcgaccaggtcttcgagagctgcttggtcgagaagcagtgacgacattcgttccctacaaggccaacaagtaccatgcgcctcatttgctcgacctagtgcacgcggacttgtgtggttcggtcacctcaaagacacttggagggaagttgttcctcctcgtcgacgacaagagtcgtttcatgttgctcgtgttactggcgtcaaagtaccaggctgcaacggccatcatccaactctaggtgcatggctaggtggaggcgagacaaaagatggggcgagacaatagatgggcactctttgcactgaccgcgatggcaagttcacgacacgcacgtttagcgactgctgcgccaagcacgacatctagtgtcatctcattgtgtagtacatgccccagcataagaacgtggaagggcgcaaccaaagggtgtttggcatggctagaagcatgctaaaggccaaggggatggtgggttggttgtggggggaggcggtagccacagctgtcttcatactcagtgtcgaagacatcatacgaagtctaatatgatgtaaagcctctggttcacttccttcgtacttttggttgtgtgacgcatgtgaaggtggttggaaagcaccagcaaaagctagatgactagagtacaccaatggtgtttattggatacgagctagggtccaaggcgtataggttctacaatcctgacataagttgtgtgatcatctcacgtgacgcgatgtttgaagaagaaaaggtgtaggactagagcagtgtcgacaggtctagctacgagagtggaaggcagacttaaaaatataccttaagatttgaaaggaaggcaccttgaagggagatttgaaaggatgaaacatacccaaagatctagcctcaaataggagtgcatgaaaaatactattcatgtgcctaaaccttgacttgag

SEQ ID NO: 2095 - DNA, 2083 bp, Zea Mays
aacaaagataccaagatctacttattacaatataaggatcttacatttcttgtatcattgggattgcgcatgtccataagaaacttttgtacctgctgaatcaagctaaaaagaacaaaaactatcttagtgttaacaaaacttaataaaacagaacataatgaaaccaaatcaatcatacaagaggacaacatagatatagacacattaaaattcatacaaatcaagacagcaaggattacgtgcatgtttgagagtgaagtatttttgcagcttctagacgataccatggtttttggaaatatcgtagtattttatgtcataagatgtttggttgcatttctgaaaactatgttttcaaaatcatggtatcccagataccatagtatttttggagtattggaaactccactctaacccaaagttttcatggcaactggctagcttttgcctaataccatggtttacaatgttgtatccaaacaatacggccttgtttggaagtgtagtatttttgcggtttcgaaacaatactatggtatttgatgatagtgtagtattggtctattggaactcaaaaggtgtttggtttgtacaggcaaaacacagtttcaaataccatggtttccccaaaaccgtggtatatttggagttttcgaaactccactcaggacctcagtttttttctcttttctctacatatactttgtttttccaatagaaccaaacagatctcggttttgagcaatactgtggttttactgtggtaaagtaataccgtagtatttgtgtcatgtacaattgtaaactatgatatctcaaaactacagtatttcaaaactgcattcccaaacaggccctacttctcataaccatggtacttttggagctgccaaaactacggtattgtcacgacaattgcaaagtatagtattgtaaaaccatagctttgagaaacattgttaccaaacaggccctaacacatatctgcacatcttcccattgtaatacatgaaacaccattgtaccttaactaagatggtgtttggttcccctaactaaagtttagtacgtgtcacattggatgtttgaacaccaattacgagtattaaatatagtctaattacgaaattgattatatagatgaagactaaacgacaagacgaatttattaagcttaataattcatgattagtaaatgtttactgtagcatcatatgagcgaaccatggactaattaggtttaatggatttgtcttaccgtttagtccttatttgtgtaattagttttgtaattagactatatttaatacttctaactagtgttcaaagatccgatgtgacggaactaaaatttagtccttttaatccaaatagaccttaataattcatctggatatattcaacaaaacaaaaaataatagtatcacaaatatcacatccatgattcctagatatacaatgttgaaattaacttaaaatagatcacaatgcgatacataatgttagcacggaatggcactcacatctcggaataccttttgtatgctttaaaattatataagttttagcattccccatatctaagtagaaaaaagttccaatacattactcatctatttgtatttgtataccacaaactgaagctaatctttgtttattcttgtaatctcaccagctgtatttctttgatatatgcaaaagagcctctaccgatggttaggtggtttgagtagcattcttccggtcctggttcgactttccatcagatcgaaattcaggctagggttaaaaaattctctcatttatcccatgccaaagcacaagactaaggcacatccctagtcatggtcgttctcacatgggctatggtgttgctgtgtatgtggggcagggccgcaggggtttctccagctctccaccaacgtgaaaaggacaaaaggtactctccttaatgcaatgcctgaccccccccccccaccagcgcagttcgaggttttttattattttttacatactatcactaatatttcaatcaccaatatgtaattagtttatctagttgtgccagaactatgcattg

SEQ ID NO: 2096 - DNA, 1119 bp, Zea Mays
ctccactcccagtgcgcgattgtcttttcacatatggagtagccgggttcaggcttacccatgatgaggtatgtggccagttaaaaggtcctagatcaacaagcctacaatcggtacggtccttgatcgacacagacgagcgacctgtccagctcaacgtctggtctcattttaaacaaattctcaaagtttgatacctggcagaggtaccctgcttgaatgatgaattcatccccgtggaggatggctccatcatcccaagccctttttctttttaaaaatcatgagtcatagatcaaaaacatttttcttaatctataagcataactaagcattactagtttttataaaacaggtaacaaggtatgataatcaatctttcaaggatggtaatgcatcaagtgtttaatcattcaactcctattacctaatgcagcatataagtgataaaattttgtaatacaaggaaggtggcaaatgcaccggggcttgccttagttgcagagacagaggtctaaatccctctattaaaccccagttagatggctcccatcacttgatgagcaggcactgaagcagactcctcttcagaaaccacttcttgaatttcatcttcttcttctgggaattctggtcacggcgaggtggactgattgccgacgatggtcaccacctagggactggtacaccaagctctgggcagatggaccaagatattgggaggggattaactccggggaaacataggctacaagagccaaggagatcactcgagctctaggactgcacggcctactggaccatgacttaagtaggagatgggaagactagggcagatcgagttggtggctgggaagaggagcctagacttacaaacacgaaccgctaagacaccaagtgaagcaactaaaacgtgagaacagcagggattacaatagcagtatttaagcaaagggatgggagacagatgttccagagctcggccaggacatgatggaggaggacgccggggacgccagcagccccacgattatggacacgtagcaggagtgcatggacagcacataggaggtaaacgcaggggtgatgaacctcatccacggctgggcacaagacgac

SEQ ID NO: 2097 - DNA, 1510 bp, Zea Mays
cttcaccgtaacaagcccaactattcacatgaaacttgtttgccttaccttggtatttcactttgttatggaactcctaacctaaaaccccatgatttggtcaccaaagagctccaaactgagcaccaacagtgaaattccagttttcagttaactgaatccagttcattagcaataccgctcccttttgctttcttctttgttcaagcccagatatctaacaattcttctcaacaaccaaccaacctttgtgaaccaatattactctcctactatagcccttcccatttggtataaaacccctaagctgaaaatacttagaacagtagctatggtgcacaaaagttagagcaaaacactgaaaagttcagttccttgatctgaaacagcaccttaccatgtctgatagagagttttgcaataggcttttctcaaaattccataaatcaacaagccaatctacttgtataaaactggttctcctacacttaggtctttcacctttctataaaactcttaacccaattctggtttgattaattaccacagagctccaaagttgactaaacaataccctaaacaggttttcagttagctgaaacagcccactccaagtctgacagaaggttttgtaacactattttctcgcaattccatatgagggctcaatgtatttccttactatgaatggttcctctataatctctctccatctttgttacaacagctactagctaaccctaaacagatctcaagttacagagcaccaaacttgaggtggaaacgcaaaggctaaatttcagctaactgaaaaagacctgaacacaacacctgacatagaaaattgcagcacatatttctccatattttacacagtagtaagccccactcctctgatgaagcttgttcaccttcatctggtctttgacttttctatacaactggtaactcaaaacctcatgaactggtcataggagagctccaaactgagcaatctgctgcaatccagttttcagctaatctggtcacggcgaggtggactgattgccgacgatggtcaccacctagggactggtacaccaagctctgggcagatggaccaagatattgggaggggattaactccggggaaacataggctacaagagccaaggagatcactcgagctctaggactgcacggcctactggaccatgacttaagtaggagatgggaagactagggcagatcgagttggtggctgggaagaggagcctagacttacaaacacgaaccgctaagacaccaagtgaagcaactaaaacgtgagaacagcagggattacaatagcagtatttaagcaaagggatgggagacagatgttccagagctcggccaggacatgatggaggaggacgccggggacgccagcagccccacgattatggacacgtagcaggagtgcatggacagcacataggaggtaaacgcaggggtgatgaacctcatccacggctgggcacaagacgac

SEQ ID NO: 2098 - DNA, 1233 bp, Zea Mays
gactctattttaaagcttgaagtaactcactgtgatatcctgtaggatgaagtgttgactatcatgacgcctagggaacttaacaactaccctcgaaaagatactctttacgtgtggtaagttattgaaatcttgaatatcatcaaataacacgaaactatataaaacacaaactgtagcttaagttcttcattcatatataaatgtgacaagtgaactatatacttacggaggaaagggatgaatgtctggaactgtcctattttggtttattctacctgatcccgccattgatcttgtaggaccaatcatggcattattgcaaagaaaacatcattaaaaggattaaatgacgaagtccctctgtcaaacaaatagatttcttttacatcataatgaaattacaagaaactattttgtagaaagtgtagactctatctacgtctttgttctttaagaaacctagcatcaaattgaagatttttcatataacaatatataaagttaaatcataaaatgtaacataatatgtctcatatgtttatctacatcttgtgacagttgctggtgaataataggacagcaagcgccagtgaaatagttgcttcagcacttcatgacaattgcaaagctgttcttgttggcgaaaggacttttggcaagggcttaatccaatctgtatttgaacttcatgatggttctggtattatcgtcacagttggcaaatacatgacaccaaaccacaaggatatcaatgggaatggaatagaaccggattacaatcgtcttcctggtactctaagaaaacgccagatttcttttgtggcaattgaattctgcaatatttcaatgaagccagaggttacctttcacgatgtggaattaaagaattaagctgacagacgtttgcggcagatttcaatgaagcattatattctgaaggttctctcacggtaagaagcttttatttacggttgcatagttgggtcttactgctctgcatacattggactatccaagtaacaacaaagaaataaagagcaaggcagaaattttgtatggttttacccctgcttctgagtccttacatgccttttgggtggttcaaacctgtcttttgcatttgcagggtcagacgacctaatatgatagaattgatatggaacaaataaagctgatgctctgcctgactactacacgaccctcaatgtcgcgcgcgctgatacgataagc

SEQ ID NO: 2099 - DNA, 1823 bp, Zea Mays
gtcagtttcacgtcctgtcacttctcatgcattcaactttaatcaaatatatatataggagctaccattaaatatatttttataaagtttattgcaatttaatggaacatcggtgctaataataaatcaaaagatactttgcttgcaatttatggtcttttctgactatcagtacactcaaacttttatatggtgcattttgtcaccaagcattgccttaaattagttcaatgtttttcctcacaaagtaatgcaccattttctatggaatggatcagtgctacctagatttggattagaaaaacgaaacaatgtattggttaatatgataataatatagattagataaaaataaatatcaataccttcactttctacaatcagttttctacttttctttttgtatggctggaaagcaactgaagatttttcaatttatattccacagtatcatttactgaacttcatgctgacgtgcatgttcgttatttccagaacaaggccatctcagataaaagtagatgtagctttcataggacttagttccagcaaagcaaaggttggcagtgcaccaaacaatagcgtttatacttcattcttatggattggagaagcctatgcaacatgtcaaaccagatgacatgcagatgagaaggttctgcatcaatagaaaccagagaaaaacctttgcatcaagagagcaccgatgaaaagctgatgaagaggccaattgacaaacttatggagaccagctgaccaaataattgaaaatctattgaactatgtatcaagttcattaatttatgtaattctgaacgagaccttttatgctactgcaacgtctgtgaccacaaatgactgttgcaacaagaccatactctaggagtggagttgtctatatgaagagtgtaggtagaggcaattggctaatattgtacaggtccagtttgcaggatcgtagcaacagggttcaaagacgtgtgtttgaaagggcagttcctgatgatcagcatgatgaaaggtggggagttctatagctggtttaagctggagctagcttctgaagtccggtcaggtgtctgtatgtgttgcccttttttatttcatttcatgagaaaggattgttatttgttccttgaactgtacttggtcgtacttgtgaataaatattttagcatggctgttcgacttcttataatgtttattcgacatcagttcatgatattagtgttacgtgatattttatcatatgaattttgcatatcatagtgatgtttatcgttccgtatctatattttatactaatctttaactctcgtggcaacgcatgggcacacacctagtctcacttaagggtgtttcgctttgtattgaactgtagacatagaaagaagaattaagagaagcgaagaagaatgaagttgcgcaagtgcaagtgcaccatacggaaagcatactaccagctaatcctttcaactatcatttagcatcaacctctatataccggaagcatgcttgtatataaacttcataccccaataaatacccctaatacacacaagtttgtcatgtccatatatattagttggaattttaatttaaatttgttctcaatacaattcatttgcttttacaatttggtaatagacatgacataacaaaacatgttcaaactgtaatagtagaacaggtcattcaaatattcaatataaaagaaatagtattaagaacacaaaatgaaagcatgaaagcactaaccaaagttttgttggacaatacagagctgcaaagatgggtacagaaattgaggcgaacacaattcc

SEQ ID NO: 2100 - DNA, 3468 bp, Zea Mays
tctttctatatcacccccttggtgtcaggtgtgcacgcacctaccggatgcgtaacgtatgcatgcaggatttccacggcatgtgttgagactgcatgcgcggccgactggtctggtcagcagcgcacccgtatgtaccagcagaagctgaatcgtgcacgtacgcatgtagccatcctttttttttttttggctaccccctcacctcacctcgcttcaattcactgatatatatgcttgcatagacgagcttccagatgacttgaccacccccggccggccctttcttcattctttccttcctttcttcctcctgctgctcttgccgtttcagtgattattagctgctgtacgtgcgtgcgtacattgttctctctgctgacacccatacacgctgtagcttctacacataccagttcgatcgcaagctatagcatggggcttcaatcatcgcccatgctgctgccagcgccgacggcaacggcggccggcggcgggtcacagtggcgcacggctgtggcaggcccatggagttcccgcatcaagaagaagacggatgcagtcgccgtccccgcggccgccggccggtggagggcgcgggcgcgggcccaggacaccagcgaatccgccgccgtcgccaaaggttcgtccctaacgcccatcgtgagaaccgatgccgaaagccgccgcacgagatggcctacggacgacgacgacgctgagccgctggtcgacgagatcagggcaatgctgacgtcgatgagcgacggggacatcagcgtgtcggcgtacgacaccgcctgggtcggtcttgtgcccaggctggacggcggcgagggcccgcagttcccggccgccgtgcggtggatccggaacaaccagctccccgacggctcgtggggcgacgcggccctgttctccgcgtacgaccgcctgatcaacacgctggcgtgcgtcgtcacgctcaccaggtggtcgctggagcccgagatgcgcggcagagggctctctttcctcggccggaacatgtggaagctagcgacggaggacgaggagtccatgccgatagggttcgagctcgcgttcccttccctcatcgaactagccaagagtctgggcgtccacgacttcccgtacgaccaccaggctctgcaggcaatatactcgagcagggagatcaaggtgaagaggattcctaaggaagtgatgcacacggttcccacatccattctccacagcctggaagggatgcccgggctagactgggcaaggcttctgaaactgcagtcgagcgacgggtccttcctcttctcacccgcggccaccgcgtacgctctcatgaacaccggcgacgacaggtgcttcagctacatcgacaggacagtcaagaaattcaacggaggagtgcccaacgtctaccccgtggaccttttcgagcacatatgggctgtcgatcgcctggagcgtctcgggatctcccgctacttccagaaagagattgagcagtgcatggactacgtgaacaggcactggactgaggacgggatctgctgggcgaggaactccgacgtgaaggaggtggacgacacggccatggctttccgcctgctacggctgcacggatacagcgtctcgccagatgtgttcaagaacttcgagaaggacggggagttcttcgccttcgtggggcagtcgaaccaggcggtgacggggatgtacaacctcaacagggcctcccagataagcttcccgggggaggacgtcctgcaccgtgcagggcctttctcgtacgagttcctcaggcggaaacaagccgagggagcgctccgtgacaaatggatcatatctaaggacctgcctggagaggtagtgtacaccctggacttcccttggtatgggaacctgccgcgcgtggaggccagagactatctcgaacagtacggcggcggcgacgatgtctggatcgggaagacgctctacaggatgcctcttgtgaataacgacgtgtatcttgagctggctaggatggacttcaaccattgccaagccctacatcagcttgagtggcaaggcctgaaaaagtggtacactgagaaccggctcatggatttcggagtggcgcaagaggatgctctgcgagcgtatttcctggccgccgcttccgtctacgagccgtgccgagccgcggagcggcttgcgtgggccagagcggcgatacttgccaacgccgtctctacccatctccgtaacagcccctcattcagagaacgcttggaacactccttgcgttgccgccccagtgaagaaacggatggatcatggttcaactcatcaagtggaagtgacgctgttcttgtgaaggcagttctgcggcttaccgactcgttagcgcgagaagcgcagccgattcacggcggtgatccggaggacatccacaagctactgagatcagcttgggctgaatgggtcagggagaaggcagatgcagcagacagcgtgtgtaatggatccagtgctgtggaacaagaagggtcgcgcatggttcatgacaagcaaacgtgtctgcttttagctcgaatgatcgagatcagcgctgggcgagctgcaggtgaggctgcgagcgaagatggtgaccgtcggattatccagctcactgggtctatatgtgacagtctcaagcagaagatgctagtatctcaggaccccgagaagaacgaagagatgatgagccatgtcgatgacgaattgaagctgcgtatacgagagttcgttcagtatcttctgagactcggtgagaagaaaaccggcagcagcgagacaaggcagacctttctgagcatcgtgaaaagctgttactacgctgctcactgcccgccgcatgtggtagacaggcatatttccagagttatttttgaacctgtttccgccgcaaaataatggtaatggtagatgtgaatgtgatatggagataagagagagagaaaatgttgatagtggaaattggcgttgatgtcgcctccacattctttacgcaaaagtagcgtctgttttggataaaaaaaatccagtttctgtaaattatagaataaatcaatcgctgtgtcccaaactctaaaatgttattctgtgaagtatggaataaatcggtcactatacctatcttgtggatgcaatccagatcctgaagttctaaaatatcgtttatgcgcttcatgaacttgtctccagtttggaactctcaaaatgccattttttggataccgaacttgtcagaaggataggcaaacaaatacttcatcatacttcggctaacaggaccaggccaggccaggcttgtcactgttctggcgcctaaaaaccgtcaggcctgactttttgctgcaaaagcaacccagctctgatcgagaggatcaggagaaccgcggaaactctgaagtttcagaatccacaacacataaggatctccgg

SEQ ID NO: 2101 - DNA, 1322 bp, Zea Mays
ccgctgttcccggacgattagacgggccaccctaccccaccggcaccgcagagaagcaaaagcgtgagcgtgcgcgtccacgaccgcgacacaggatctcccactcgtctcgaagacggccgcaccgcagacgccgcgggaatttaacgagagagactggcgccgcgcctcgcggagaccgcagcctggagccagcccgtgacgctgacgcggcgggccacgggcggggcgatgccaggagccatggagccggcagaggcggacgcggcggcagccgctgttgcgggaaggcggccgacggcgtccgagcgccggcgcatgtaccgcgacctggcgctgtcgctgcggtgcggactccgcgacgcggccgcggggttctcgttcctgcgcctgcgcggcctccgcgcgctcctccgcgccctccgctccacctccgacgccgacgccgacgccgacgcgggcctcttccgcgactcccagtccatccgagatctccaagtgatcccggtgctgttcgagcacagcctgcgcaaggcgaccggggacgcggtgctgacggtggcgcaggtgctgggcatggagcccgccgccgccaggctcaggaaccccgccacggactccgaggtcgtgcttgcgctcagggtgctcgaaggttgctgcctcctctgcccggcctgcgcagccgcggcgcaccgctacaatgccgtcaaggtggttttgaatatactgatgacacgtggtatcctcgagcaaagagcatgtctcgacactctcttagcgttgctggtgaattgttcaggaaacctgacggatttcaaagaacaagatggactaaataaaattgctgtcattgtaaaagatgcaaatagggatgaccatgttaaaatgttccgagtttctgcttctttactctggaaacgcaaaagaaaaatgtggcgcagattccgagtctaatatgcgagaagatttggcaaaggttttcggagaaaaatgtgcatcatttatctcctcaatgaacctattcagctcaactctagagtcacaaatgaggcaatctgagctaagctttcttgcagagcatgtgttggattacatgtagagccatactaaagataaccataatcgtgccattttctccacacacaacagagttcagtgctccaaaatgtatgtttcctattaacttgggtaattattgacgatgctactgtatatgaactcaactacgagaatgttactgttcaccgagttttattgttcattgaatgctactgtttctctgtttgagttgtgaatccaaacaagtaaatactattttattg

SEQ ID NO: 2102 - DNA, 1308 bp, Zea Mays
cgaaaccaagaacctccatggacggtcgaacttgtctgagcagaagatatgcaataaatccagagatggaagtcattaaagaccagatgaatagtatggatccaaaatcagtgcaggagggacaagctaaaatgaaagcgctgttcaaaaaacatggtgttagtccacttactccaatgaaaggactcctgatccaagggccaatattcatgagctttttctttgccatatcaaacatggttgagaaagtaccttcattcaaaggaggtggaacattgtggtttactgacctgacgactccagattctctttacatcttgcctatgttaacaggactgaccttcttggccacagtggagcttaacttgcaagaaggaatggagggaaatcctatggctggtaaaatgaagtacttttctagaggagtagctgttttgacagtcccatttacaatgaactttgccacggcagttttctgttactggacctcatcaaacatattcaccctgttatatggtcttgttatccggcgaccagctgtgaggaagtggtttgatcttcctgctttggaaaatacgcgttcgctcacggcaaagccagtattcaatatgtttggtggatccaaggcaataccagccgcacagtcaccagtagcgatcgcaggagcccagcaatctggtctggaccaacctgatgcttctgctcttggctataaggtcaaaaatcttgagaagaaagtgaaatccaggggtaaatctcggaaacacaggtaaaattttgtgcatctgtgccccagatgagcaatctgtacttccaccatcggaatgatggatacttgatttgtcctgatatgccccccaaaaatcagattttgtattaggaacctatcttttcgtcgtttttggctgcttttgttttgatttttcaggggggggcgggggtgaaataagccacataaatgtttgacttagtaccagagttgattatacacaaaatgtatttcagtaacttgtgatagttaaaacattggagggtcatcttccaaggattggtatgaaagctacgttgaagttcagggacagtcaatcaacttttgaggcaccattcgacattctgtagcaattggcaattaggttcaaagtgtgctgggcagaattttgtggcctgaatgaatattgagtttgtatgtactaaactgtcttagaataccatttacaggacgtttggatcctttcattttagaggaattggaattcactcaataaagtaacttatttagtttggaatttgacattccaccactttcta

SEQ ID NO: 2103 - DNA, 1785 bp, Zea Mays
cgcctcgcctagtcgcttcccactgcgcgccgccacgcaccagcccagccagccatggcgttcgccgcgcggaggagcatcgccacccggctctctcaccatctcacgcgacgcctccatccctgcgttccacattcgcgtacctccgactccctcgacgagcaggcgtcgagaccctcgccaccgctcccgctcccgctcccaccacttcacgtccagctcaagcaacgttctagagaagtccaaatcctaggcttcctccctttctcgctccgcctcgcggggccaacccgccgcaccttctcgtcctcagcccccgcccccaacctcgaggcggcaccagccgccgaggtcgatgccgcgggcgtgcttgcggatgcagcggaggcggcggcgtcagtgccagcgccgttcccaggggaggtagccgccgcggctgcggactcattcccccctgttgccgcacttcagcacattatcgacgctatccatacctttaccgggctgaactggtgggtgtgcatcgcgctgacaacatttattatccggatcgccacagtcccgttgctcgtgaaccagttgaaggccacgacgaagctaagagcaataaatccagagatggaagtcattaaagaccagatgaatagtatggatccaaaatcagtgcaggagggacaagctaaaatgaaagcgctgttcaaaaaatatcaaacatggttgagaaagtaccttcattcaaaggaggtggaacattgtggtttactgacctgacgactccagattctctttacatcttgcctatgttaacaggactgaccttcttggccacagtggagcttaacttgcaagaaggaatggagggaaatcctatggctggtaaaatgaagtacttttctagaggagtagctgttttgacagtcccatttacaatgaactttgccacggcagttttctgttactggacctcatcaaacatattcaccctgttatatggtcttgttatccggcgaccagctgtgaggaagtggtttgatcttcctgctttggaaaatacgcgttcgctcacggcaaagccagtattcaatatgtttggtggatccaaggcaataccagccgcacagtcaccagtagcgatcgcaggagcccagcaatctggtctggaccaacctgatgcttctgctcttggctataaggtcaaaaatcttgagaagaaagtgaaatccaggggtaaatctcggaaacacaggtaaaattttgtgcatctgtgccccagatgagcaatctgtacttccaccatcggaatgatggatacttgatttgtcctgatatgccccccaaaaatcagattttgtattaggaacctatcttttcgtcgtttttggctgcttttgttttgatttttcaggggggggcgggggtgaaataagccacataaatgtttgacttagtaccagagttgattatacacaaaatgtatttcagtaacttgtgatagttaaaacattggagggtcatcttccaaggattggtatgaaagctacgttgaagttcagggacagtcaatcaacttttgaggcaccattcgacattctgtagcaattggcaattaggttcaaagtgtgctgggcagaattttgtggcctgaatgaatattgagtttgtatgtactaaactgtcttagaataccatttacaggacgtttggatcctttcattttagaggaattggaattcactcaataaagtaacttatttagtttggaatttgacattccaccactttcta

SEQ ID NO: 2104 - DNA, 1802 bp, Zea Mays
cgcctcgcctagtcgcttcccactgcgcgccgccacgcaccagcccagccagccatggcgttcgccgcgcggaggagcatcgccacccggctctctcaccatctcacgcgacgcctccatccctgcgttccacattcgcgtacctccgactccctcgacgagcaggcgtcgagaccctcgccaccgctcccgctcccgctcccaccacttcacgtccagctcaagcaacgttctagagaagtccaaatcctaggcttcctccctttctcgctccgcctcgcggggccaacccgccgcaccttctcgtcctcagcccccgcccccaacctcgaggcggcaccagccgccgaggtcgatgccgcgggcgtgcttgcggatgcagcggaggcggcggcgtcagtgccagcgccgttcccaggggaggtagccgccgcggctgcggactcattcccccctgttgccgcacttcagcacattatcgacgctatccatacctttaccgggctgaactggtgggtgtgcatcgcgctgacaacatttattatccggatcgccacagtcccgttgctcgtgaaccagttgaaggccacgacgaagctaagagcaataaatccagagatggaagtcattaaagaccagatgaatacatggtgttagtccacttactccaatgaaaggactcctgatccaagggccaatattcatgagctttttctttgccatatcaaacatggttgagaaagtaccttcattcaaaggaggtggaacattgtggtttactgacctgacgactccagattctctttacatcttgcctatgttaacaggactgaccttcttggccacagtggagcttaacttgcaagaaggaatggagggaaatcctatggctggtaaaatgaagtacttttctagaggagtagctgttttgacagtcccatttacaatgaactttgccacggcagttttctgttactggacctcatcaaacatattcaccctgttatatggtcttgttatccggcgaccagctgtgaggaagtggtttgatcttcctgctttggaaaatacgcgttcgctcacggcaaagccagtattcaatatgtttggtggatccaaggcaataccagccgcacagtcaccagtagcgatcgcaggagcccagcaatctggtctggaccaacctgatgcttctgctcttggctataaggtcaaaaatcttgagaagaaagtgaaatccaggggtaaatctcggaaacacaggtaaaattttgtgcatctgtgccccagatgagcaatctgtacttccaccatcggaatgatggatacttgatttgtcctgatatgccccccaaaaatcagattttgtattaggaacctatcttttcgtcgtttttggctgcttttgttttgatttttcaggggggggcgggggtgaaataagccacataaatgtttgacttagtaccagagttgattatacacaaaatgtatttcagtaacttgtgatagttaaaacattggagggtcatcttccaaggattggtatgaaagctacgttgaagttcagggacagtcaatcaacttttgaggcaccattcgacattctgtagcaattggcaattaggttcaaagtgtgctgggcagaattttgtggcctgaatgaatattgagtttgtatgtactaaactgtcttagaataccatttacaggacgtttggatcctttcattttagaggaattggaattcactcaataaagtaacttatttagtttggaatttgacattccaccactttcta

SEQ ID NO: 2105 - DNA, 1813 bp, Zea Mays
cgcctcgcctagtcgcttcccactgcgcgccgccacgcaccagcccagccagccatggcgttcgccgcgcggaggagcatcgccacccggctctctcaccatctcacgcgacgcctccatccctgcgttccacattcgcgtacctccgactccctcgacgagcaggcgtcgagaccctcgccaccgctcccgctcccgctcccaccacttcacgtccagctcaagcaacgttctagagaagtccaaatcctaggcttcctccctttctcgctccgcctcgcggggccaacccgccgcaccttctcgtcctcagcccccgcccccaacctcgaggcggcaccagccgccgaggtcgatgccgcgggcgtgcttgcggatgcagcggaggcggcggcgtcagtgccagcgccgttcccaggggaggtagccgccgcggctgcggactcattcccccctgttgccgcacttcagcacattatcgacgctatccatacctttaccgggctgaactggtgggtgtgcatcgcgctgacaacatttattatccggatcgccacagtcccgttgctcgtgaaccagttgaaggccacgacgaagctaagagcaataaatccagagatggaagtcattaaagaccagatgaatagtatggatccaaaatcagtgcaggagggacaagctaaaatgaaagcgctgttcaaaaattgtacttcactgcactaccaattgtagatatcaaacatggttgagaaagtaccttcattcaaaggaggtggaacattgtggtttactgacctgacgactccagattctctttacatcttgcctatgttaacaggactgaccttcttggccacagtggagcttaacttgcaagaaggaatggagggaaatcctatggctggtaaaatgaagtacttttctagaggagtagctgttttgacagtcccatttacaatgaactttgccacggcagttttctgttactggacctcatcaaacatattcaccctgttatatggtcttgttatccggcgaccagctgtgaggaagtggtttgatcttcctgctttggaaaatacgcgttcgctcacggcaaagccagtattcaatatgtttggtggatccaaggcaataccagccgcacagtcaccagtagcgatcgcaggagcccagcaatctggtctggaccaacctgatgcttctgctcttggctataaggtcaaaaatcttgagaagaaagtgaaatccaggggtaaatctcggaaacacaggtaaaattttgtgcatctgtgccccagatgagcaatctgtacttccaccatcggaatgatggatacttgatttgtcctgatatgccccccaaaaatcagattttgtattaggaacctatcttttcgtcgtttttggctgcttttgttttgatttttcaggggggggcgggggtgaaataagccacataaatgtttgacttagtaccagagttgattatacacaaaatgtatttcagtaacttgtgatagttaaaacattggagggtcatcttccaaggattggtatgaaagctacgttgaagttcagggacagtcaatcaacttttgaggcaccattcgacattctgtagcaattggcaattaggttcaaagtgtgctgggcagaattttgtggcctgaatgaatattgagtttgtatgtactaaactgtcttagaataccatttacaggacgtttggatcctttcattttagaggaattggaattcactcaataaagtaacttatttagtttggaatttgacattccaccactttcta

SEQ ID NO: 2106 - DNA, 1844 bp, Zea Mays
cgcctcgcctagtcgcttcccactgcgcgccgccacgcaccagcccagccagccatggcgttcgccgcgcggaggagcatcgccacccggctctctcaccatctcacgcgacgcctccatccctgcgttccacattcgcgtacctccgactccctcgacgagcaggcgtcgagaccctcgccaccgctcccgctcccgctcccaccacttcacgtccagctcaagcaacgttctagagaagtccaaatcctaggcttcctccctttctcgctccgcctcgcggggccaacccgccgcaccttctcgtcctcagcccccgcccccaacctcgaggcggcaccagccgccgaggtcgatgccgcgggcgtgcttgcggatgcagcggaggcggcggcgtcagtgccagcgccgttcccaggggaggtagccgccgcggctgcggactcattcccccctgttgccgcacttcagcacattatcgacgctatccatacctttaccgggctgaactggtgggtgtgcatcgcgctgacaacatttattatccggatcgccacagtcccgttgctcgtgaaccagttgaaggccacgacgaagctaagagtaaaacatggtgttagtccacttactccaatgaaaggactcctgatccaagggccaatattcatgagctttttctttgccgtgagtttttttttactcactcaagtctttctttgaccttgctttttttagttgtacttcactgcactaccaattgtagatatcaaacatggttgagaaagtaccttcattcaaaggaggtggaacattgtggtttactgacctgacgactccagattctctttacatcttgcctatgttaacaggactgaccttcttggccacagtggagcttaacttgcaagaaggaatggagggaaatcctatggctggtaaaatgaagtacttttctagaggagtagctgttttgacagtcccatttacaatgaactttgccacggcagttttctgttactggacctcatcaaacatattcaccctgttatatggtcttgttatccggcgaccagctgtgaggaagtggtttgatcttcctgctttggaaaatacgcgttcgctcacggcaaagccagtattcaatatgtttggtggatccaaggcaataccagccgcacagtcaccagtagcgatcgcaggagcccagcaatctggtctggaccaacctgatgcttctgctcttggctataaggtcaaaaatcttgagaagaaagtgaaatccaggggtaaatctcggaaacacaggtaaaattttgtgcatctgtgccccagatgagcaatctgtacttccaccatcggaatgatggatacttgatttgtcctgatatgccccccaaaaatcagattttgtattaggaacctatcttttcgtcgtttttggctgcttttgttttgatttttcaggggggggcgggggtgaaataagccacataaatgtttgacttagtaccagagttgattatacacaaaatgtatttcagtaacttgtgatagttaaaacattggagggtcatcttccaaggattggtatgaaagctacgttgaagttcagggacagtcaatcaacttttgaggcaccattcgacattctgtagcaattggcaattaggttcaaagtgtgctgggcagaattttgtggcctgaatgaatattgagtttgtatgtactaaactgtcttagaataccatttacaggacgtttggatcctttcattttagaggaattggaattcactcaataaagtaacttatttagtttggaatttgacattccaccactttcta

SEQ ID NO: 2107 - DNA, 1857 bp, Zea Mays
cgcctcgcctagtcgcttcccactgcgcgccgccacgcaccagcccagccagccatggcgttcgccgcgcggaggagcatcgccacccggctctctcaccatctcacgcgacgcctccatccctgcgttccacattcgcgtacctccgactccctcgacgagcaggcgtcgagaccctcgccaccgctcccgctcccgctcccaccacttcacgtccagctcaagcaacgttctagagaagtccaaatcctaggcttcctccctttctcgctccgcctcgcggggccaacccgccgcaccttctcgtcctcagcccccgcccccaacctcgaggcggcaccagccgccgaggtcgatgccgcgggcgtgcttgcggatgcagcggaggcggcggcgtcagtgccagcgccgttcccaggggaggtagccgccgcggctgcggactcattcccccctgttgccgcacttcagcacattatcgacgctatccatacctttaccgggctgaactggtgggtgtgcatcgcgctgacaacatttattatccggatcgccacagtcccgttgctcgtgaaccagttgaaggccacgacgaagctaagagcaataaatccagagatggaagtcattaaagaccagatgaatagtatggatccaaaatcagtgcaggagggacaagctaaaatgaaagcgctgttcaaaaaacatggtgttagtccacttactccaatgaaaggactcctgatccaagggccaatattcatgagctttttctttgccatatcaaacatggttgagaaagtaccttcattcaaaggaggtggaacattgtggtttactgacctgacgactccagattctctttacatcttgcctatgttaacaggactgaccttcttggccacagtggagcttaacttgcaagaaggaatggagggaaatcctatggctggtaaaatgaagtacttttctagaggagtagctgttttgacagtcccatttacaatgaactttgccacgttttctgttactggacctcatcaaacatattcaccctgttatatggtcttgttatccggcgaccagctgtgaggaagtggtttgatcttcctgctttggaaaatacgcgttcgctcacggcaaagccagtattcaatatgtttggtggatccaaggcaataccagccgcacagtcaccagtagcgatcgcaggagcccagcaatctggtctggaccaacctgatgcttctgctcttggctataaggtcaaaaatcttgagaagaaagtgaaatccaggggtaaatctcggaaacacaggtaaaattttgtgcatctgtgccccagatgagcaatctgtacttccaccatcggaatgatggatacttgatttgtcctgatatgccccccaaaaatcagattttgtattaggaacctatcttttcgtcgtttttggctgcttttgttttgatttttcaggggggggcgggggtgaaataagccacataaatgtttgacttagtaccagagttgattatacacaaaatgtatttcagtaacttgtgatagttaaaacattggagggtcatcttccaaggattggtatgaaagctacgttgaagttcagggacagtcaatcaacttttgaggcaccattcgacattctgtagcaattggcaattaggttcaaagtgtgctgggcagaattttgtggcctgaatgaatattgagtttgtatgtactaaactgtcttagaataccatttacaggacgtttggatcctttcattttagaggaattggaattcactcaataaagtaacttatttagtttggaatttgacattccaccactttcta

SEQ ID NO: 2108 - DNA, 1395 bp, Zea Mays
caccactccaccttgtggcatcaagacttttatgtgcttctcagttactctcactgttttcttagacggaaaacggtagacggacggtgaggagctgtctaaggtttagacgtgtttagacggaattaaacggcctaaacggcaataaatccagagatggaagtcattaaagaccagatgaatagtatggatccaaaatcagtgcaggagggacaagctaaaatgaaagcgctgttcaaaaaacatggtgttagtccacttactccaatgaaaggactcctgatccaagggccaatattcatgagctttttctttgccatatcaaacatggttgagaaagtaccttcattcaaaggaggtggaacattgtggtttactgacctgacgactccagattctctttacatcttgcctatgttaacaggactgaccttcttggccacagtggagcttaacttgcaagaaggaatggagggaaatcctatggctggtaaaatgaagtacttttctagaggagtagctgttttgacagtcccatttacaatgaactttgccacgttttctgttactggacctcatcaaacatattcaccctgttatatggtcttgttatccggcgaccagctgtgaggaagtggtttgatcttcctgctttggaaaatacgcgttcgctcacggcaaagccagtattcaatatgtttggtggatccaaggcaataccagccgcacagtcaccagtagcgatcgcaggagcccagcaatctggtctggaccaacctgatgcttctgctcttggctataaggtcaaaaatcttgagaagaaagtgaaatccaggggtaaatctcggaaacacaggtaaaattttgtgcatctgtgccccagatgagcaatctgtacttccaccatcggaatgatggatacttgatttgtcctgatatgccccccaaaaatcagattttgtattaggaacctatcttttcgtcgtttttggctgcttttgttttgatttttcaggggggggcgggggtgaaataagccacataaatgtttgacttagtaccagagttgattatacacaaaatgtatttcagtaacttgtgatagttaaaacattggagggtcatcttccaaggattggtatgaaagctacgttgaagttcagggacagtcaatcaacttttgaggcaccattcgacattctgtagcaattggcaattaggttcaaagtgtgctgggcagaattttgtggcctgaatgaatattgagtttgtatgtactaaactgtcttagaataccatttacaggacgtttggatcctttcattttagaggaattggaattcactcaataaagtaacttatttagtttggaatttgacattccaccactttcta

SEQ ID NO: 2109 - DNA, 2122 bp, Zea Mays
ctcccaccttcctctttaaattgcccctcctattcccccgtcccgaagctagaggctctctggcgccgacggccgacccacacgcgcgtccagcgatttcgccggggggagatcttgccattccgtggagcaccatccgcggtagcctagccgcgactggggatcggggcttgcgggccgtggagccacccagaaggtagccgggaaaagcttgatccggccggggacggggccttcggaggttcgtccctcgatcgggtgtcgtctgcgaaagccgggtcgaacaaatcgtcgcgactggaggcggcgcggggtcatgggggcgtgggtctcggtcctgctcgggatggacggagccgcggcggccgggcctgctgctgtgggcctgggcgacctgccggagctctgcgccgcccaggtgctgctccggctcgacccgccggagatctgcaggctcgcgcaggtcaaccacgcgttccgcggcgccgcgggggctgacttcgtgtgggaagccaagctgccggagaactacaactatctgatggagttcgtggggagcggcgacgaggggaagcggaggcggcggcgggccgggaagaaggagatctacgcgaggctcgccaggcctgtgccttttggcgacggcaagaaggaattctggttggacaagaacaaaggcatgatctgtatggcactgtcgtccaaagcactggtgattactgggattgatgacagaagatactggcaacacatgccaacttcagaatcgaggtgaatatggctttgatatcacatttactaatatttgtctgttcaatttatgccagttttctgaaaacaaagatggtctgttggcattaattgcgatggaatgggctgaagatatttactcatggtgtgattgatctgttccttttctttcttaacttagcacgtcattgattttatattcagctttcgaaagtagtgttactttctccctataatgatttatatggatgaatacctggtctcataattgtaggtatttattttaagatctgcataagcttttttttaccctggaacacaatagatgtgaatgcatacatgttgtcaaatgttaggattgagtaattgagctgattgtctctcttgaacaagagaagtagcttcctgcctcttgcacaagaggcctgcatctgttttgcaatattcatctatagaatgtttagaagtaatccaattcaatatttctagttcaaagtataggtgatatcatattcttggaagtcaaatatctgaccaatagttattgtttcttatcatgcagattccagtctgtagcctaccttcagcaaatctggtggtttgaggtggttggtgaagtcgatttctgcttccctgttggaacatatagcttgtacttcagggtccatcttgggaagttctacagacgatttggccgccgccagtgcacctcagagcatgttcatggttgggacaagaagcctgttcgcttccagctatcgacctctgacgggcagcaggcattgtctcagtgctacctggaggagcccgggagctgggtcctgtaccatgctggcgattttgtggcctcaaagcctgaccagctgatgaagctgaagttctccatggcacagatcgactgcacgcacacaaaaggcgggctgtgcatcgactcggttcttatctatccaaaagggaaggggtttcaccaggagagggtggtcaggtctcagaaatgagggttgtagatgttgtggaggtattcacattaggatgttagagcaaatgcagcttgcagcctgatcttatttttactttgggctctagttcgcagcagaggtgaagtgtatgtggttgtagaactcaggtattgtgtggtcaggtgaccaccagagtgctctgtcagtcctttggcaaggtcgttttcgccccccttcagctgaatttggacagcgagatagccatgaaactgtactgaaatgagttcgaaggtgtcattcccagtttctaatttgctttctactgcttagtttcggatgctccctttttcctatttgtcatgatccggtcttgacttggtcttaacttaatattaagaatcattattatgatt

SEQ ID NO: 2110 - DNA, 1159 bp, Zea Mays
ggaaaattatacgagcggttctctagtttactagaggaggattcgaagccgccttccttgaattcgtcatattctgtttgcccatgaccgagtccttcctagttatgacccctggaacatttttgtggagctcaattggggcagtattatcttccaattgaaataggtcacttcttttccttttggaaaattgcgttcttctttttggggcagactcaaattagtggcaggaattctggttggacaagaacaaaggcatgatctgtatggcactgtcgtccaaagcactggtgattactgggattgatgacagaagatactggcaacacatgccaacttcagaatcgagattccagtctgtagcctaccttcagcaaatctggtggtttgaggtggttggtgaagtcgatttctgcttccctgttggaacatatagcttgtacttcagggtccatcttgggaagttctacagacgatttggccgccgccagtgcacctcagagcatgttcatggttgggacaagaagcctgttcgcttccagctatcgacctctgacgggcagcaggcattgtctcagtgctacctggaggagcccgggagctgggtcctgtaccatgctggcgattttgtggcctcaaagcctgaccagctgatgaagctgaagttctccatggcacagatcgactgcacgcacacaaaaggcgggctgtgcatcgactcggttcttatctatccaaaagggaaggggtttcaccaggagagggtggtcaggtctcagaaatgagggttgtagatgttgtggaggtattcacattaggatgttagagcaaatgcagcttgcagcctgatcttatttttactttgggctctagttcgcagcagaggtgaagtgtatgtggttgtagaactcaggtattgtgtggtcaggtgaccaccagagtgctctgtcagtcctttggcaaggtcgttttcgccccccttcagctgaatttggacagcgagatagccatgaaactgtactgaaatgagttcgaaggtgtcattcccagtttctaatttgctttctactgcttagtttcggatgctccctttttcctatttgtcatgatccggtcttgacttggtcttaacttaatattaagaatcattattatgatt

SEQ ID NO: 2111 - DNA, 974 bp, Zea Mays
gttcttctttttggggcagactcaaattagtggcaggaattctggttggacaagaacaaaggcatgatctgtatggcactgtcgtccaaagcactgttttctgaaaacaaagatggtctgttggcattaattgcgatggaatgggctgaagatatttactcatgattccagtctgtagcctaccttcagcaaatctggtggtttgaggtggttggtgaagtcgatttctgcttccctgttggaacatatagcttgtacttcagggtccatcttgggaagttctacagacgatttggccgccgccagtgcacctcagagcatgttcatggttgggacaagaagcctgttcgcttccagctatcgacctctgacgggcagcaggcattgtctcagtgctacctggaggagcccgggagctgggtcctgtaccatgctggcgattttgtggcctcaaagcctgaccagctgatgaagctgaagttctccatggcacagatcgactgcacgcacacaaaaggcgggctgtgcatcgactcggttcttatctatccaaaagggaaggggtttcaccaggagagggtggtcaggtctcagaaatgagggttgtagatgttgtggaggtattcacattaggatgttagagcaaatgcagcttgcagcctgatcttatttttactttgggctctagttcgcagcagaggtgaagtgtatgtggttgtagaactcaggtattgtgtggtcaggtgaccaccagagtgctctgtcagtcctttggcaaggtcgttttcgccccccttcagctgaatttggacagcgagatagccatgaaactgtactgaaatgagttcgaaggtgtcattcccagtttctaatttgctttctactgcttagtttcggatgctccctttttcctatttgtcatgatccggtcttgacttggtcttaacttaatattaagaatcattattatgatt

SEQ ID NO: 2112 - DNA, 1537 bp, Zea Mays
gtatgcgttcggcgacgcgacgcgcacggcgcaccattccgcggccacgaagagcacaatcctgttcgccacgccatgcctctccacgcccgcgcaccgccgctccgccactcccaccttctactcaccgccgccaccgctcggctccgcccgtgcgcagcgccagcgaccaagccccgccgccgctccctcgtcctcgtccgcgcctccagctcggaccctccgcagcagcagctcaacctctccgtgctccgcttcaccctcgggcgctgatgctgccagccgagtgccgttgcccgaggggagcatccaagtattcgtcatgtctgagaacctgtcagctgtgcagaaggaggacatggcgtgggcgtcgtacgtcctgctccggaacacaaacaccacgtctgtggtcatagcaattggggatctcttgtgcgtacgaggatactggaatccacctgcaaatacttcaaaatattccacgatcgagtggttcaaaagtcagatgcagcaactaggacttgttgatttgaggggtgctttatacttccctaattcgtcagattctcagcttgcgaagattctgccagatgggattctttctgtgctagcgcaacctattctgagtcctgatccagctaataatgaaacaaaaactgaaggtgtcatcctgttggcctgcaatgcaaattatgcatatagtgagaaagatagggcttggataagaacagttgcagacaaatttcaacgtgcttaatttagaggtaccaaagaaatgttgacagtcaggcagtactggaaaatggaccgggaaagattggggagtgtaaagtagactgactggtccaagaaggatttggagtcttggcaacgtggactgagcagaataagagagttttgcagttgggaggaaatcagcattaagctactgtttattagggttggcgctagttgaagcaaaatagtccagcaatagtttgttcagttggctagagactatgtggtgatgtgtttggtttgtctctgtgcctcttgctttggtatgtatgtctgattggatttggcattgaagcagaaaggctgctccagagattagtgacatgtgcaaagtagcaatgctgtcataatttacgcatactccagcccaattgaggcagttgatcacctggctgcatttatataagcagtaaaagcatttttagttcaaagtgttgtcacatttaagattgcaaatactgctgatcaatcacattccttcatatatgtacctagattttctattgcaggcttgcagctagtgaccttttcagttgctattgctagtatacacaaacttaacagacaagggaaatgtttgaatcttctgaaataaccatacatgaatgttcaaatgtttttttattgattacttcagtcatacttttcctctgtgtccaaaacccctgcatttctcctgattgttgagctgacaagtggtgagtgctgactacactttcctgacctttaatttgatcgttcaaaaatacaatgccttttc

SEQ ID NO: 2113 - DNA, 1597 bp, Zea Mays
gtatgcgttcggcgacgcgacgcgcacggcgcaccattccgcggccacgaagagcacaatcctgttcgccacgccatgcctctccacgcccgcgcaccgccgctccgccactcccaccttctactcaccgccgccaccgctcggctccgcccgtgcgcagcgccagcgaccaagccccgccgccgctccctcgtcctcgtccgcgcctccagctcggaccctccgcagcagcagctcaacctctccgtgctccgcttcaccctcgaggtccgaggctgtggggctgtgcctggccgcgttctcggcgacgctgccgttcctggggaggttccttgagggcgctgatgctgccagccgagtgccgttgcccgaggggagcatccaagtattcgtcatgtctgagaacctgtcagctgtgcagaaggaggacatggcgtgggcgtcgtacgtcctgctccggaacacaaacaccacgtctgtggtcatagcaattggggatctcttgtgcgtacgaggatactggaatccacctgcaaatacttcaaaatattccacgatcgagtggttcaaaagtcagatgcagcaactaggacttgttgatttgaggggtgctttatacttccctaattcgtcagattctcagcttgcgaagattctgccagatgggattctttctgtgctagcgcaacctattctgagtcctgatccagctaataatgaaacaaaaactgaaggtgtcatcctgttggcctgcaatgcaaattatgcatatagtgagaaagatagggcttggataagaacagttgcagacaaatttcaacgtgcttaatttagaggtaccaaagtcaggcagtactggaaaatggaccgggaaagattggggagtgtaaagtagactgactggtccaagaaggatttggagtcttggcaacgtggactgagcagaataagagagttttgcagttgggaggaaatcagcattaagctactgtttattagggttggcgctagttgaagcaaaatagtccagcaatagtttgttcagttggctagagactatgtggtgatgtgtttggtttgtctctgtgcctcttgctttggtatgtatgtctgattggatttggcattgaagcagaaaggctgctccagagattagtgacatgtgcaaagtagcaatgctgtcataatttacgcatactccagcccaattgaggcagttgatcacctggctgcatttatataagcagtaaaagcatttttagttcaaagtgttgtcacatttaagattgcaaatactgctgatcaatcacattccttcatatatgtacctagattttctattgcaggcttgcagctagtgaccttttcagttgctattgctagtatacacaaacttaacagacaagggaaatgtttgaatcttctgaaataaccatacatgaatgttcaaatgtttttttattgattacttcagtcatacttttcctctgtgtccaaaacccctgcatttctcctgattgttgagctgacaagtggtgagtgctgactacactttcctgacctttaatttgatcgttcaaaaatacaatgccttttc

SEQ ID NO: 2114 - DNA, 1957 bp, Zea Mays
gtatgcgttcggcgacgcgacgcgcacggcgcaccattccgcggccacgaagagcacaatcctgttcgccacgccatgcctctccacgcccgcgcaccgccgctccgccactcccaccttctactcaccgccgccaccgctcggctccgcccgtgcgcagcgccagcgaccaagccccgccgccgctccctcgtcctcgtccgcgcctccagctcggaccctccgcagcagcagctcaacctctccgtgctccgcttcaccctcgggattccggggctggacgaatcgtacctcccccggtggataggcctcggtttcggcgcgctcgtcgtgctcaaccacctcctctctgcgtccccgacgcccgcgcagctcaggtccgaggctgtggggctgtgcctggccgcgttctcggcgacgctgccgttcctggggaggttccttgagggcgctgatgctgccagccgagtgccgttgcccgaggggagcatccaagtattcgtcatgtctgagaacctgtcagctgtgcagaaggaggacatggcgtgggcgtcgtacgtcctgctccggaacacaaacaccacgtctgtggtatgaattcggattcttattatccttttgacttggaattgaacttgatggaattcagcataccatcagaggctgaagttagtatatgcagcaataacaaaatcttctcaggtttgctgttgtggatggtttgataatgtcgattggtctagtacattttccatttcttgtgtggatcttgttaaaataattgcaatttttacactggtcaaacgatcagagccttaatgtgtcttaattccccccccccctaggtcatagcaattggggatctcttgtgcgtacgaggatactggaatccacctgcaaatacttcaaaatattccacgatcgagtggttcaaaagtcagatgcagcaactaggacttgttgatttgaggggtgctttatacttccctaattcgtcagattctcagcttgcgaagattctgccagatgggattctttctgtgctagcgcaacctattctgagtcctgatccagctaataatgaaacaaaaactgaaggtgtcatcctgttggcctgcaatgcaaattatgcatatagtgagaaagatagggcttggataagaacagttgcagacaaatttcaacgtgcttaatttagaggtaccaaaggcagtactggaaaatggaccgggaaagattggggagtgtaaagtagactgactggtccaagaaggatttggagtcttggcaacgtggactgagcagaataagagagttttgcagttgggaggaaatcagcattaagctactgtttattagggttggcgctagttgaagcaaaatagtccagcaatagtttgttcagttggctagagactatgtggtgatgtgtttggtttgtctctgtgcctcttgctttggtatgtatgtctgattggatttggcattgaagcagaaaggctgctccagagattagtgacatgtgcaaagtagcaatgctgtcataatttacgcatactccagcccaattgaggcagttgatcacctggctgcatttatataagcagtaaaagcatttttagttcaaagtgttgtcacatttaagattgcaaatactgctgatcaatcacattccttcatatatgtacctagattttctattgcaggcttgcagctagtgaccttttcagttgctattgctagtatacacaaacttaacagacaagggaaatgtttgaatcttctgaaataaccatacatgaatgttcaaatgtttttttattgattacttcagtcatacttttcctctgtgtccaaaacccctgcatttctcctgattgttgagctgacaagtggtgagtgctgactacactttcctgacctttaatttgatcgttcaaaaatacaatgccttttc

SEQ ID NO: 2115 - DNA, 2861 bp, Zea Mays
ctcacagcaaattcgtctcacgcatattcgtcatccagctccgtttaaaatgcgtgctcattatccctcaagcatgcatatactatatatgatgcagatcatatatgacctttatacaattatcaccacctcgattcctcgcggcacatctttgcaccgcagaacgaccgtgcagtattttatacaaacatctactctcgatctacccatgagctaactcccaatatataagcgagccgaacttttctcctatctgagcactgctgctgctgaaaatggcgcctgggcttgcgaactgggtcgcgctggttctgaccgtcctccttggtctctcgtgcctcgtcgtcgcgctctcggaggatgaaacactggacaagctgcggttcgtgcgccacgcacaggacgcgcccctggtgtcgcagtacaactacatcgtgatcggcggcggcacggcggggtgcccgctggcggcgacgctgtcggagcactcgcgcgtgctgctcctggagcgcgggggcctcccgtcccgcaacatgtccgaccagcagcacttcacggacgcgctggcggacacgtccccggcgtcgcccgcgcagcggttcgtgtccgaggacggcgtggtgaacgcgcgggcccgggtgctgggcgggggcagctgcctcaacgccgggttctacacgcgggccagcaccgactacgtgcgcgccgccggctgggacgcccgcctcgtcaactcgtcctaccgctgggtggagcgcgcgctcgtgttccgccccgccgtgcccccgtggcaggccgcgctccgcgacgcgctgctcgaggccggcgtcacgcccgacaacggcttcaccttcgaccacgtcacgggcaccaagatcgggggcaccatcttcgacagcagcggccagcgccacaccgccgccgacttcctccgccacgcgcgccccagggggctcaccgtgttcctctacgctaccgtctccaggatcctcttcagacagcaagagggcgtgccgtacccggtggcgtacggtgtggtgttcacggacccgctcggggtgcagcaccgggtgtacctccgggacggcgccaagaacgaggtgatcctgtcggcggggacgctggggagcccgcagctgctgatgctgagcggcgtcggcccgcaggcgcacctggaggcgcacggcgtccaggtgctggtggaccagcccatggtcgggcagggcgtggctgacaacccgatgaactcggtgttcatcccgtcgccggtgcccgtcacgctgtcgctcgtgcaggtcgtcgggatcacccggtccggcagcttcatcgagggcgtgagcggctccgagttcggcatccccgtctccgagggcgcccgtcgcctggctcgcagcttcggcctcttctctccgcagacggggcagctgggcacgttgccgccgaagcagagaaccccagaggccctggagcgcgcggcggaggcgatgcggcggctggacaggcgggcgttccggggcggattcatcctggagaagatcctgggccccgtctcctcgggccacgtcgagctgcggtccgccgacccgcgcgcgaacccggcggtgacgttcaactacttccaggagtcggaggacctgcagcggtgcgtgcgcggcatccagacgatcgagcgcgtgatccagtcccgggccttcgccaacttcacctacgccaacgcttccacggagtccatcttcaccgactccgccaacttccccgtcaacctcctgccgcggcacgtcaacgactcccggacgcccgagcagtactgcagggacaccgtcatgaccatctggcattaccacggcgggtgccaggtcggcgccgtcgtggacgacgattaccgggtgttcggcgtgcagcgactgagggtgatcgacagctccacgttcaagtactcccccggcaccaacccgcaggccaccgtcatgatgctcggaaggtatatgggtgtgaaaattcaggccgagagatggaggaaatgatcgagatttcaagtttcagcatggtctagggactaggcctctagctgtgataatgaatatcaatcaacacatctgtaactgggtaactgctctagcctctagagtaggttttatttttctctagatatttttttaatctcctctagacatactcctagcttccgcatgttgttggttccatttcaccacacccctagatgcattgttcagcatttcgcgggaataatgagaattatgctgaaaaggcatgatcgctcctcctgcctattctacagaaaattaaataaagaaccgccatttcatcaaataaaccaaaggccgtgttctgtggattggaagggatcgaggaagattaaatcgtttctatttaattttcccttaattttaactagttaatctcatggagttccttctaatctacttctaactgaacaagaccaagcccaaaagggaaaaacacttgaaaatattctgcaggatcaatttacattctgaacatttaccagtactttccaggatctacattggaataccttggtccaaatgtgatattcctgaacctctttaatttttctatacatgtacccaataaaggtataaattgattggctacttatatatgtactgaacgaatccagaaaaaaaggtcaaggggagaaagcccatattaccatttcccctgcttgcctgcaacctgtagctattgcaaaattttcaccctatctacgctctcaagaaagaggataagctagtgctagggtccccctgggcagagccacagatgttcccacccatatctgggaatgttgtgcatccgggtagcggtttcaccttgcc

SEQ ID NO: 2116 - DNA, 2071 bp, Zea Mays
ggaattcacacttcctcttgtggcgccccattctctcaccagagtacgaactacgaagacccgacaggccgacacccgctcgtctcccctcgcacgtaggcggcgcaaccggaccccctccccctccagatcggtgctccgctgggagatctcctcgtgcaggcgccgaatctcttcgtcgtctcttccaagcacggttggcagcacaatagatctgtttgcaagcattctttggtactacttcaaggtccattcattgccagaacaaagcatcatcatggtaccggtgtttctagtatgaacatttgggacctgccactgatggtgtccaaataaaacaaatatgaccatacattacagattttgatatccagggactttctggggttttctaattagcctattggaatcttaagataaatcttgtagcccctgtccagtgactcagagtaatattgttttactgtcttttggtgtaagcagaggttagcattaacaaaacaatgtgattggtctgaacttgtgcgatatgaagcaatggattcagctcaacttgacttcaccgactttaccaagttcttaggaagaaatgcattaacatctatagatctaaataaatgcattatcaagacatgttcttaatgaagaattttataaaaaagcaatatgatattgtagacgttgatttgttttcctagaaatttagtttaaactagagaagtttaacttgggataaattgactgaggccccatttggatctcaagtgattctaaaaaatgtgactaaagaaaccagattatcataattgcagacaatggcagcgtcaagaaggtaggattaatttttgtatatggaggttaacaaacgaagattgtttttgttataccgcaaacagtctaattgatagggactcggttgattcgactaggtcttggtggagtgcaccaagatgaatgaagcactccaagatgaatgaagcagcagattggattgagaagaacgcccggactccggtgagatcgttgacggatctgatcaacggaactgaaccggggatttaccacggtgaccaagcagctgcatcgcagagaattaagccaacggaaaaaaaaagaagagagctactacagcaatggccggaggagatgacctgaagctgctgggcctgtgggcgagcccgtacgtgctgcgggtgaagctcgcgctcagcctcaagggcctgagctacgagaacgtggaggaggatctgagggacaagagcgagctcctgctcaagtccaaccccgtgcaccagaaggtccccgtgctgatccacggcggcaagcccatctgcgagtcgcaggtcatcctgcagtacatcgacgaggccttcgccggcaccggcccgtccctcctccccgccgacccctacgagcgcgccgtcgctcgcttctgggccgcctacatcgacgacaagatgctgcccgcctggaaccagtcgacgatgggcaagacggaggaggagagggccgaggggaagaagcagtcggtcgtgacggtggagacgctggagggcgcgctgagggactgcggcggccaagggaagcccttcttcggtggggacagcgtcgggtacgtcgacgtcgtgctcggcggcctgctcgggtgggtgcgcgcgtcggaggagctgcacggcgtcaggcccttcgaccccgagcggactccgctgctggcggcgtggtcggagcgcttcggcgcgctggatgccgtccagacggtgatgcccgacgtcggcaggctgctcgagttcggcaaggcgttgatggcacgtctggcggctgcggccgccgccggtgcaagcaataactgaaaagggcatggtgtatccgtcatgtgtttcaggttttcgtatagtgacaaaaaaaaaggaaaaaataatgctagctacgcatcggaacgcggctttgtgctttgccgtctcgccgttagttcagcttatgtgatgtgagtgttgccgtgcatgtgtgtgttacttcagatgtatcctgttcggttcagtgattatatggaacattttattttggttggata

SEQ ID NO: 2117 - DNA, 523 bp, Zea Mays
cccattctctcaccagagtacgaactacgaagacccgacaggccgacacccgctcgtctcccctcgcacgtaggcggcgcaaccggaccccctccccctccagatcggtgctccgctgggagatctcctcgtgcaggcgccgaatctcttcgtcgtctcttccaagcacggttggcagcacaatagatctgtttgcaagcattctttggtactacttcaaggctttgatgattgctttacagcgccgatatggcctcccgcccaaagctgtctggtattcagaagcaggttttggcgctgtacaggggattccttcgaacagcacgtcttaaggcccctgaagagcgccacaggatcgagtccgttgtcttggcagagttccgtgacaaggcaaagagtgttgaccgtaggaactttatacatatcgagtacttgttgaggagtgggaagaagcagcttgagcagctcaagaatcctgatattactggacttgctacccttgtagtaaagaaatgagaaacag

SEQ ID NO: 2118 - DNA, 810 bp, Zea Mays
cccattctctcaccagagtacgaactacgaagacccgacaggccgacacccgctcgtctcccctcgcacgtaggcggcgcaaccggaccccctccccctccagatcggtgctccgctgggagatctcctcgtgcaggcgccgaatctcttcgtcgtctcttccaagcacggttggcagcacaatagatctgtttgcaagcattctttggtactacttcaagcgccgatatggcctcccgcccaaagctgtctggtattcagaagcaggttttggcgctgtacaggggattccttcgaacagcacgtcttaaggcccctgaagagcgccacaggatcgagtccgttgtcttggcagagttccgtgacaaggcaaagagtgttgaccgtaggaactttatacatatcgagtacttgttgaggagtgggaagaagcagcttgagcagctcaagaatcctgatattactggacttgctacccttgtagtaaagaaatgaggtccattcattgccagaacaaagcatcatcatggtaccggtgtttctagtatgaacatttgggacctgccactgatggtgtccaaataaaacaaatatgaccatacattacagattttgatatccagggactttctggggttttctaattagcctattggaatcttaagataaatcttgtagcccctgtccagtgactcagagtaatattgttttactgtcttttggtgtaagcagaggttagcattaacaaaacaatgtgattggtctgaacttgtgcgatatgaagcaatggattcagctcaacttgacttc

SEQ ID NO: 2119 - DNA, 651 bp, Zea Mays
cccattctctcaccagagtacgaactacgaagacccgacaggccgacacccgctcgtctcccctcgcacgtaggcggcgcaaccggaccccctccccctccagatcggtgctccgctgggagatctcctcgtgcaggcgccgaatctcttcgtcgtctcttccaagcacggttggcagcacaatagatctgtttgcaagcattctttggtactacttcaaggctttgatgattgctttacagcgccgatatggcctcccgcccaaagctgtctggtattcagaagcaggttttggcgctgtacaggggattccttcgaacagcacgtcttaaggcccctgaagagcgccacaggatcgagtccgttgtcttggcagagttccgtgacaaggcaaagagtgttgaccgtaggaactttatacatatcgagtacttgttgaggagtgggaagaagcagcttgagcagctcaagaatcctgatattactggacttgctacccttgtagtaaagaaatgaggtcttggtggagtgcaccaagatgaatgaagcactccaagatgaatgaagcagcagattggattgagaagaacgcccggactccggtgagatcgttgacggatctgatcaacggaactgaaccggggatttacc

SEQ ID NO: 2120 - DNA, 355 bp, Zea Mays
cccattctctcaccagagtacgaactacgaagacccgacaggccgacacccgctcgtctcccctcgcacgtaggcggcgcaaccggaccccctccccctccagatcggtgctccgctgggagatctcctcgtgcaggcgccgaatctcttcgtcgtctcttccaagcacggttggcagcacaatagatctgtttgcaagcattctttggtactacttcaaggtcttggtggagtgcaccaagatgaatgaagcactccaagatgaatgaagcagcagattggattgagaagaacgcccggactccggtgagatcgttgacggatctgatcaacggaactgaaccggggatttacc

SEQ ID NO: 2121 - DNA, 645 bp, Zea Mays
ccaagatcgaaattagtccttggtacccaattcaggctttgatgattgctttacagcgccgatatggcctcccgcccaaagctgtctggtattcagaagcaggttttggcgctgtacaggggattccttcgaacagcacgtcttaaggcccctgaagagcgccacaggatcgagtccgttgtcttggcagagttccgtgacaaggcaaagagtgttgaccgtaggaactttatacatatcgagtacttgttgaggagtgggaagaagcagcttgagcagctcaagaatcctgatattactggacttgctacccttgtagtaaagaaatgaggtccattcattgccagaacaaagcatcatcatggtaccggtgtttctagtatgaacatttgggacctgccactgatggtgtccaaataaaacaaatatgaccatacattacagattttgatatccagggactttctggggttttctaattagcctattggaatcttaagataaatcttgtagcccctgtccagtgactcagagtaatattgttttactgtcttttggtgtaagcagaggttagcattaacaaaacaatgtgattggtctgaacttgtgcgatatgaagcaatggattcagctcaacttgacttc

SEQ ID NO: 2122 - DNA, 3851 bp, Zea Mays
cgcccttttgtcgaagtgagggcacgtcacggatgacgtacacaaactgtacgtctgatccatgcacatggtcgcatggaccgaatccggacgttcgcaccgatccaaaagaccaaaacagatgacgatctacatggagccatggactgaatgctgatgttcgcagaacggatagtccagagttcaaagaaactcgagactacagactactcacaggtcactgtctcactcacttgaagctctaacagcaagccatggcaggacgagaagcggacaaagacccagagctgaaggtgctcggcgtgtggtcgagcccgttcgttatcagggcccgcgtcgcgctaaacctcaagggcctcgcctaccgatacgtggaggacaacctggacagcaagagcgagctcctcctcgcctccaaccacgtgcacgggaaggtgccggtgctcctccacgacggcaggcccgtctgcgagtcccgggtcatcgtggagtatatcgacgaggccttcccggccagcggcccctgcctcctccccgccgacccgtaccgccgcgcggtcgaccgcttctgggcctcctacgtcgacgacaagctctttcccacctggatacccgtctacaacggcaggacgagcgaggacagggtcgcggcggcgaggcaggtagtggccgtgctggagaagtttgagcgggcgttcgatgagtgctccggaggcaaggcgttcttcggcggggacgctgctggcctcgtggacgtcgtgctaggcggcttcctcgggtggctgcgcgcgtctgaggtgatgtgtggcgtgagggtcatcgaccccgccaagacgccgctgctggcggcgtgggcggaccggttcgccgcgctcgacggcgtcagggaggtgatacctgacgtgcagaggctgctggagtataacaagattaggcgagctcgtcgtgggctgccgtaggtgctgggccttgggccatctatctgccagcatgtggtcagtcaactctaagcaggagactttgacaaggttaaagtttagttcatgaaggtgggcaatctaattaggatgctcatgctttagctaggagtgccattagttttcctgttgaaaggcatgtttggttcctctttcctactgaaagagtttgtaatatctttactactattaagaaggtaaggggtatgctgccattactagttctgtcattcccattcctaccgttctcattcctattcccattcccggttctgtctccacccccgatgcccctcccccgcgtaacccccgtggctcaccgcaccacacgaaacctctgatcccatgacctcgacggcggccatggccggcaagcaggtgcaataccgtgccccaactcgccccgcacgtcgcccatcctgtcacccccacgcgatggccgcaactccgcgagacaaccgctgtccgccccccaccaccctcccccgcgacgccccctcccacgacgctttgtgcgcgtgagtctgcgactgccgacagccgtcgccgtactggagcccgatctgctggctccccctcaacctcaccaccatgcccccatcggacctcgtcacgccgtgcgtggcggtgccggtgatggacgcggcgttgctagccgtcatcgtcccgcctcgacgttcgatccatgctcgccacggttggtgctcgcacgcgatgtggcgtggcgaggttaccgcgggcgccgcggaggtggagggggaaggggaggatgagggcacgggcaagagagtgcatcgcggtggacggtctcgtgagtgagtgctgctgcctgcccctctctctctgcctgcgttctcctggtgctgctctccctctcctcccctgcttcgacctcccgcctttccccaccgtttcttggatttctaggatccagacaaccgcccttgtgagcctgccttcctgcctactacctgcgtacatacaggagggaccttgggtgatccgggtgcttggtttcttggttctgcggctttcgctgctgttggatttgccgagccggagccgccggagatgaccgtcgacgagctgaagctgcaggcaagggccagcggcggccacgacctaaggaccagttccccgtcggcatgcgcgtgctcgccgtcgacgatgacccgacctgcctcaaggtccttgagaacctcttgttccgctgccagtaccatgtgacaacaatgggacaggcaaccacgaccttgagctgctgagggagaaaaaggaccagtttgaccttgtgatcagcaacgtccacatgctggacatggacggcttcaagctcctcaagcttgtgggtctcgagatggaccttccggggattaacagctgaaaacctcgcccgatttgtaaagaagttttcttgttcaatgcggcattgaatttgggaggaatggcaagtctcatgaaaacttctatatgccctacacgtgaccactaaaagaaagagttagacaggacaaaaggctgcaggtgaagcggcagaagaagagcttttacaataaaccctaaacccttacaatgctgattttgatggagatgaaatgaatttgcatgtccctcagacggaggaagctcgcactgaagcgcttaattctcataggggttcaaaataatttatgtactcctaagaatgtgatggggggtacttcaatgcaataatgagcttcccacaaaattacccaaacagcccgccatcagtcagatttacctctgaaatgtggcatccaaatgtctatcctgatgggtgggtttgtatctctattcttcatccacccagtgaagatccaaacggttatgagctcgcaagtgagcgatggacacctgtgcacacagtatggcttcgtatactttgtttacatatcttttccccattgtaatgatactcatctcccttttatgtgtatactttttagagagaatattaccttgtagtctcattgtttcagtttatggtccaatttacaatggcttcactgtaaatgggaaaacaactcggtaggaatgcttttttgaattataaattatttatatttcatacaatgcttataggtatgtgatgagtcctccaatctgagaagtagagcatggtaaagcactccaagctgctctttcatcgggaaatttataggtgacacttgtgtcatacattgaactatggagtcaaacaaattacatattatccttcaacatttttcaccagtgggaactgtagttattgcatagaatagatggtatattaatcgttgagagccaatgtttacattaactgttatgcagaagaaaatttatgttttattttatatctaactgtactttgttgcagcttgtaggtactgatcacagcacattcaactccacacagattgtccatgtttcttttagtcaccattgatttatcactaggtcattgtgtttgtggccaacgagtattgtttctaacagttatgttcccatagctagctggattcattgttgtgttttgttcagggtactttcaccacttctggtatggttctgtctgtaatgtgccagggattattatattgtttttggtttggatttggaatggtttggggtccacaacgatgatgcgtcagagctgttccaaggattggatgatttccattcccctgctgccaattcgactaggctcgccgtctccgctctgcccaactggcaccaagcagccaatggaacttgagcagccaatggatgatttccattcccctgctgccaattctctgaactgcttcgacccttcaactcaatctgcatgtacccagtaaatgttcaaatctgaatttggatcattgctagcag

SEQ ID NO: 2123 - DNA, 3854 bp, Zea Mays
cgcccttttgtcgaagtgagggcacgtcacggatgacgtacacaaactgtacgtctgatccatgcacatggtcgcatggaccgaatccggacgttcgcaccgatccaaaagaccaaaacagatgacgatctacatggagccatggactgaatgctgatgttcgcagaacggatagtccagagttcaaagaaactcgagactacagactactcacaggtcactgtctcactcacttgaagctctaacagcaagccatggcaggacgagaagcggacaaagacccagagctgaaggtgctcggcgtgtggtcgagcccgttcgttatcagggcccgcgtcgcgctaaacctcaagggcctcgcctaccgatacgtggaggacaacctggacagcaagagcgagctcctcctcgcctccaaccacgtgcacgggaaggtgccggtgctcctccacgacggcaggcccgtctgcgagtcccgggtcatcgtggagtatatcgacgaggccttcccggccagcggcccctgcctcctccccgccgacccgtaccgccgcgcggtcgaccgcttctgggcctcctacgtcgacgacaagctctttcccacctggatacccgtctacaacggcaggacgagcgaggacagggtcgcggcggcgaggcaggtagtggccgtgctggagaagtttgagcgggcgttcgatgagtgctccggaggcaaggcgttcttcggcggggacgctgctggcctcgtggacgtcgtgctaggcggcttcctcgggtggctgcgcgcgtctgaggtgatgtgtggcgtgagggtcatcgaccccgccaagacgccgctgctggcggcgtgggcggaccggttcgccgcgctcgacggcgtcagggaggtgatacctgacgtgcagaggctgctggagtataacaagattaggcgagctcgtcgtgggctgccgtaggtgctgggccttgggccatctatctgccagcatgtggtcagtcaactctaagcaggagactttgacaaggttaaagtttagttcatgaaggtgggcaatctaattaggatgctcatgctttagctaggagtgccattagttttcctgttgaaaggcatgtttggttcctctttcctactgaaagagtttgtaatatctttactactattaagaaggtaaggggtatgctgccattactagttctgtcattcccattcctaccgttctcattcctattcccattcccggttctgtctccacccccgatgcccctcccccgcgtaacccccgtggctcaccgcaccacacgaaacctctgatcccatgacctcgacggcggccatggccggcaagcaggtgcaataccgtgccccaactcgccccgcacgtcgcccatcctgtcacccccacgcgatggccgcaactccgcgagacaaccgctgtccgccccccaccaccctcccccgcgacgccccctcccacgacgctttgtgcgcgtgagtctgcgactgccgacagccgtcgccgtactggagcccgatctgctggctccccctcaacctcaccaccatgcccccatcggacctcgtcacgccgtgcgtggcggtgccggtgatggacgcggcgttgctagccgtcatcgtcccgcctcgacgttcgatccatgctcgccacggttggtgctcgcacgcgatgtggcgtggcgaggttaccgcgggcgccgcggaggtggagggggaaggggaggatgagggcacgggcaagagagtgcatcgcggtggacggtctcgtgagtgagtgctgctgcctgcccctctctctctgcctgcgttctcctggtgctgctctccctctcctcccctgcttcgacctcccgcctttccccaccgtttcttggatttctaggatccagacaaccgcccttgtgagcctgccttcctgcctactacctgcgtacatacaggagggaccttgggtgatccgggtgcttggtttcttggttctgcggctttcgctgctgttggatttgccgagccggagccgccggagatgaccgtcgacgagctgaagctgcaggcaagggccagcggcggccacgacctaaggaccagttccccgtcggcatgcgcgtgctcgccgtcgacgatgacccgacctgcctcaaggtccttgagaacctcttgttccgctgccagtaccatgtgacaacaatgggacaggcaaccacgaccttgagctgctgagggagaaaaaggaccagtttgaccttgtgatcagcaacgtccacatgctggacatggacggcttcaagctcctcaagcttgtgggtctcgagatggaccttccggggattaacagctgaaaacctcgcccgatttgtaaagaagttttcttgttcaatgcggcattgaatttgggaggaatggcaagtctcatgaaaacttctatatgccctacacgtgaccactaaaagaaagagttagacaggacaaaaggctgcaggtgaagcggcagaagaagagcttttacaataaaccctaaacccttacaatgctgattttgatggagatgaaatgaatttgcatgtccctcagacggaggaagctcgcactgaagcgcttaattctcataggggttcaaaataatttatgtactcctaagaatgtgatggggggtacttcaatgcaataatgagcttcccacaaaattacccaaacagcccgccatcagtcagatttacctctgaaatgtggcatccaaatgtctatcctgatgggtgggtttgtatctctattcttcatccacccagtgaagatccaaacggttatgagctcgcaagtgagcgatggacacctgtgcacacagtatggcttcgtatactttgtttacatatcttttccccattgtaatgatactcatctcccttttatgtgtatactttttagagagaatattaccttgtagtctcattgtttcagtttatggtccaatttacaatggcttcactgtaaatgggaaaacaactcggtaggaatgcttttttgaattataaattatttatatttcatacaatgcttataggtatgtgatgagtcctccaatctgagaagtagagcatggtaaagcactccaagctgctctttcatcgggaaatttataggtgacacttgtgtcatacattgaactatggagtcaaacaaattacatattatccttcaacatttttcaccagtgggaactgtagttattgcatagaatagatggtatattaatcgttgagagccaatgtttacattaactgttatgcagaagaaaatttatgttttattttatatctaactgtactttgttgcagcttgtaggtactgatcacagcacattcaactccacacagattgtccatgtttcttttagtcaccattgatttatcactaggtcattgtgtttgtggccaacgagtattgtttctaacagttatgttcccatagctagctggattcattgttgtgttttgttcagggtactttcaccacttctggtatggttctgtctgtaatgtgccagggattattatattgtttttggtttggatttggaatggtttggggtccacaacgatgatgcgtcagagctgttccaaggattggatgatttccattcccctgctgccaattcgactaggctcgccgtctccgctctgcccaactggcaccaagcagccaatggaacttgagcagccaatggatgatttccattcccctgctgccaattctctgaactgcttcgacccttcaactcaatctgcatgtacccaggattctttgcttgctcttctacttctgaaaattcgcaaaa

SEQ ID NO: 2124 - DNA, 2785 bp, Zea Mays
gaacggatagtccagagttcaaagaaactcgagactacagactactcacaggtcactgtctcactcacttgaagctctaacagcaagccatggcaggacgagaagcggacaaagacccagagctgaaggtgctcggcgtgtggtcgagcccgttcgttatcagggcccgcgtcgcgctaaacctcaagggcctcgcctaccgatacgtggaggacaacctggacagcaagagcgagctcctcctcgcctccaaccacgtgcacgggaaggtgccggtgctcctccacgacggcaggcccgtctgcgagtcccgggtcatcgtggagtatatcgacgaggccttcccggccagcggcccctgcctcctccccgccgacccgtaccgccgcgcggtcgaccgcttctgggcctcctacgtcgacgacaagctctttcccacctggatacccgtctacaacggcaggacgagcgaggacagggtcgcggcggcgaggcaggtagtggccgtgctggagaagtttgagcgggcgttcgatgagtgctccggaggcaaggcgttcttcggcggggacgctgctggcctcgtggacgtcgtgctaggcggcttcctcgggtggctgcgcgcgtctgaggtgatgtgtggcgtgagggtcatcgaccccgccaagacgccgctgctggcggcgtgggcggaccggttcgccgcgctcgacggcgtcagggaggtgatacctgacgtgcagaggctgctggagtataacaagattaggcgagctcgtcgtgggctgccgtaggtgctgggccttgggccatctatctgccagcatgtggtcagtcaactctaagcaggagactttgacaaggttaaagtttagttcatgaaggtgggcaatctaattaggatgctcatgctttagctaggagtgccattagttttcctgttgaaaggcatgtttggttcctctttcctactgaaagagtttgtaatatctttactactattaagaaggcaagggccagcggcggccacgacctaaggaccagttccccgtcggcatgcgcgtgctcgccgtcgacgatgacccgacctgcctcaaggtccttgagaacctcttgttccgctgccagtaccatgtgacaacaatgggacaggcaaccacgaccttgagctgctgagggagaaaaaggaccagtttgaccttgtgatcagcaacgtccacatgctggacatggacggcttcaagctcctcaagcttgtgggtctcgagatggaccttccggggattaacagctgaaaacctcgcccgatttgtaaagaagttttcttgttcaatgcggcattgaatttgggaggaatggcaagtctcatgaaaacttctatatgccctacacgtgaccactaaaagaaagagttagacaggacaaaaggctgcaggtgaagcggcagaagaagagcttttacaataaaccctaaacccttacaatgctgattttgatggagatgaaatgaatttgcatgtccctcagacggaggaagctcgcactgaagcgcttaattctcataggggttcaaaataatttatgtactcctaagaatgtgatggggggtacttcaatgcaataatgagcttcccacaaaattacccaaacagcccgccatcagtcagatttacctctgaaatgtggcatccaaatgtctatcctgatgggtgggtttgtatctctattcttcatccacccagtgaagatccaaacggttatgagctcgcaagtgagcgatggacacctgtgcacacagtatggcttcgtatactttgtttacatatcttttccccattgtaatgatactcatctcccttttatgtgtatactttttagagagaatattaccttgtagtctcattgtttcagtttatggtccaatttacaatggcttcactgtaaatgggaaaacaactcggtaggaatgcttttttgaattataaattatttatatttcatacaatgcttataggtatgtgatgagtcctccaatctgagaagtagagcatggtaaagcactccaagctgctctttcatcgggaaatttataggtgacacttgtgtcatacattgaactatggagtcaaacaaattacatattatccttcaacatttttcaccagtgggaactgtagttattgcatagaatagatggtatattaatcgttgagagccaatgtttacattaactgttatgcagaagaaaatttatgttttattttatatctaactgtactttgttgcagcttgtaggtactgatcacagcacattcaactccacacagattgtccatgtttcttttagtcaccattgatttatcactaggtcattgtgtttgtggccaacgagtattgtttctaacagttatgttcccatagctagctggattcattgttgtgttttgttcagggtactttcaccacttctggtatggttctgtctgtaatgtgccagggattattatattgtttttggtttggatttggaatggtttggggtccacaacgatgatgcgtcagagctgttccaaggattggatgatttccattcccctgctgccaattcgactaggctcgccgtctccgctctgcccaactggcaccaagcagccaatggaacttgagcagccaatggatgatttccattcccctgctgccaattctctgaactgcttcgacccttcaactcaatctgcatgtacccagtaaatgttcaaatctgaatttggatcattgctagcag

SEQ ID NO: 2125 - DNA, 2809 bp, Zea Mays
agactacagactactcacaggtcactgtctcactcacttgaagctctaacagcaagccatggcaggacgagaagcggacaaagacccagagctgaaggtgctcggcgtgtggtcgagcccgttcgttatcagggcccgcgtcgcgctaaacctcaagggcctcgcctaccgatacgtggaggacaacctggacagcaagagcgagctcctcctcgcctccaaccacgtgcacgggaaggtgccggtgctcctccacgacggcaggcccgtctgcgagtcccgggtcatcgtggagtatatcgacgaggccttcccggccagcggcccctgcctcctccccgccgacccgtaccgccgcgcggtcgaccgcttctgggcctcctacgtcgacgacaagctctttcccacctggatacccgtctacaacggcaggacgagcgaggacagggtcgcggcggcgaggcaggtagtggccgtgctggagaagtttgagcgggcgttcgatgagtgctccggaggcaaggcgttcttcggcggggacgctgctggcctcgtggacgtcgtgctaggcggcttcctcgggtggctgcgcgcgtctgaggtgatgtgtggcgtgagggtcatcgaccccgccaagacgccgctgctggcggcgtgggcggaccggttcgccgcgctcgacggcgtcagggaggtgatacctgacgtgcagaggctgctggagtataacaagattaggcgagctcgtcgtgggctgccgtaggtgctgggccttgggccatctatctgccagcatgtggtcagtcaactctaagcaggagactttgacaaggttaaagtttagttcatgaaggtgggcaatctaattaggatgctcatgctttagctaggagtgccattagttttcctgttgaaaggcatgtttggttcctctttcctactgaaagagtttgtaatatctttactactattaagaaggtaaggggtatgctgccattactagttctgtcattcccattcctaccgttctcattcctattcccattcccggttctgtctccacccccgatgcccctcccccgcgtaacccccgtggctcaccgcaccacacgaaacctctgatcccatgacctcgacggcggccatggccggcaagcagtgacaacaatgggacaggcaaccacgaccttgagctgctgagggagaaaaaggaccagtttgaccttgtgatcagcaacgtccacatgctggacatggacggcttcaagctcctcaagcttgtgggtctcgagatggaccttccggggattaacagctgaaaacctcgcccgatttgtaaagaagttttcttgttcaatgcggcattgaatttgggaggaatggcaagtctcatgaaaacttctatatgccctacacgtgaccactaaaagaaagagttagacaggacaaaaggctgcaggtgaagcggcagaagaagagcttttacaataaaccctaaacccttacaatgctgattttgatggagatgaaatgaatttgcatgtccctcagacggaggaagctcgcactgaagcgcttaattctcataggggttcaaaataatttatgtactcctaagaatgtgatggggggtacttcaatgcaataatgagcttcccacaaaattacccaaacagcccgccatcagtcagatttacctctgaaatgtggcatccaaatgtctatcctgatgggtgggtttgtatctctattcttcatccacccagtgaagatccaaacggttatgagctcgcaagtgagcgatggacacctgtgcacacagtatggcttcgtatactttgtttacatatcttttccccattgtaatgatactcatctcccttttatgtgtatactttttagagagaatattaccttgtagtctcattgtttcagtttatggtccaatttacaatggcttcactgtaaatgggaaaacaactcggtaggaatgcttttttgaattataaattatttatatttcatacaatgcttataggtatgtgatgagtcctccaatctgagaagtagagcatggtaaagcactccaagctgctctttcatcgggaaatttataggtgacacttgtgtcatacattgaactatggagtcaaacaaattacatattatccttcaacatttttcaccagtgggaactgtagttattgcatagaatagatggtatattaatcgttgagagccaatgtttacattaactgttatgcagaagaaaatttatgttttattttatatctaactgtactttgttgcagcttgtaggtactgatcacagcacattcaactccacacagattgtccatgtttcttttagtcaccattgatttatcactaggtcattgtgtttgtggccaacgagtattgtttctaacagttatgttcccatagctagctggattcattgttgtgttttgttcagggtactttcaccacttctggtatggttctgtctgtaatgtgccagggattattatattgtttttggtttggatttggaatggtttggggtccacaacgatgatgcgtcagagctgttccaaggattggatgatttccattcccctgctgccaattcgactaggctcgccgtctccgctctgcccaactggcaccaagcagccaatggaacttgagcagccaatggatgatttccattcccctgctgccaattctctgaactgcttcgacccttcaactcaatctgcatgtacccagtaaatgttcaaatctgaatttggatcattgctagcag

SEQ ID NO: 2126 - DNA, 2080 bp, Zea Mays
agactactcacaggtcactgtctcactcacttgaagctctaacagcaagccatggcaggacgagaagcggacaaagacccagagctgaaggtgctcggcgtgtggtcgagcccgttcgttatcagggcccgcgtcgcgctaaacctcaagggcctcgcctaccgatacgtggaggacaacctggacagcaagagcgagctcctcctcgcctccaaccacgtgcacgggaaggtgccggtgctcctccacgacggcaggcccgtctgcgagtcccgggtcatcgtggagtatatcgacgaggccttcccggccagcggcccctgcctcctccccgccgacccgtaccgccgcgcggtcgaccgcttctgggcctcctacgtcgacgacaagctctttcccacctggatacccgtctacaacggcaggacgagcgaggacagggtcgcggcggcgaggcaggtagtggccgtgctggagaagtttgagcgggcgttcgatgagtgctccggaggcaaggcgttcttcggcggggacgctgctggcctcgtggacgtcgtgctaggcggcttcctcgggtggctgcgcgcgtctgaggtgatgtgtggcgtgagggtcatcgaccccgccaagacgccgctgctggcggcgtgggcggaccggttcgccgcgctcgacggcgtcagggaggtgatacctgacgtgcagaggctgctggagtataacaagattaggcgagctcgtcgtgggctgccgtaggtgctgggccttgggccatctatctgccagcatgtggtcagtcaactctaagcaggagactttgacaaggttaaagtttagttcatgaaggtgggcaatctaattaggatgctcatgctttagctaggagtgccattagttttcctgttgaaaggcatgtttggttcctctttcctactgaaagagtttgtaatatctttactactattaagaaggtaaggggtatgctgccattactagttctgtcattcccattcctaccgttctcattcctattcccattcccggttctgtctccacccccgatgcccctcccccgcgtaacccccgtggctcaccgcaccacacgaaacctctgatcccatgacctcgacggcggccatggccggcaagcaggtgcaataccgtgccccaactcgccccgcacgtcgcccatcctgtcacccccacgcgatggccgcaactccgcgagacaaccgctgtccgccccccaccaccctcccccgcgacgccccctcccacgacgctttgtgcgcgtgagtctgcgactgccgacagccgtcgccgtactggagcccgatctgctggctccccctcaacctcaccaccatgcccccatcggacctcgtcacgccgtgcgtggcggtgccggtgatggacgcggcgttgctagccgtcatcgtcccgcctcgacgttcgatccatgctcgccacggttggtgctcgcacgcgatgtggcgtggcgaggttaccgcgggcgccgcggaggtggagggggaaggggaggatgagggcacgggcaagagagtgcatcgcggtggacggtctcgtgatgacaacaatgggacaggcaaccacgaccttgagctgctgagggagaaaaaggaccagtttgaccttgtgatcagcaacgtccacatgctggacatggacggcttcaagctcctcaagcttgtgggtctcgagatggaccttccggggattaacagctgaaaacctcgcccgatttgtaaagaagttttcttgttcaatgcggcattgaatttgggaggaatggcaagtctcatgaaaacttctatatgccctacacgtgaccactaaaagaaagagttagacaggacaaaaggctgcaggtgaagcggcagaagaagagcttttacaataaaccctaaacccttacaatgctgattttgatggagatgaaatgaatttgcatgtccctcagacggaggaagctcgcactgaagcgcttaattctcataggggttcaaaataatttatgtactcctaagaatgttatgttttctgacatcatgcataatat

SEQ ID NO: 2127 - DNA, 2790 bp, Zea Mays
agactactcacaggtcactgtctcactcacttgaagctctaacagcaagccatggcaggacgagaagcggacaaagacccagagctgaaggtgctcggcgtgtggtcgagcccgttcgttatcagggcccgcgtcgcgctaaacctcaagggcctcgcctaccgatacgtggaggacaacctggacagcaagagcgagctcctcctcgcctccaaccacgtgcacgggaaggtgccggtgctcctccacgacggcaggcccgtctgcgagtcccgggtcatcgtggagtatatcgacgaggccttcccggccagcggcccctgcctcctccccgccgacccgtaccgccgcgcggtcgaccgcttctgggcctcctacgtcgacgacaagctctttcccacctggatacccgtctacaacggcaggacgagcgaggacagggtcgcggcggcgaggcaggtagtggccgtgctggagaagtttgagcgggcgttcgatgagtgctccggaggcaaggcgttcttcggcggggacgctgctggcctcgtggacgtcgtgctaggcggcttcctcgggtggctgcgcgcgtctgaggtgatgtgtggcgtgagggtcatcgaccccgccaagacgccgctgctggcggcgtgggcggaccggttcgccgcgctcgacggcgtcagggaggtgatacctgacgtgcagaggctgctggagtataacaagattaggcgagctcgtcgtgggctgccgtaggtgctgggccttgggccatctatctgccagcatgtggtcagtcaactctaagcaggagactttgacaaggttaaagtttagttcatgaaggtgggcaatctaattaggatgctcatgctttagctaggagtgccattagttttcctgttgaaaggcatgtttggttcctctttcctactgaaagagtttgtaatatctttactactattaagaaggtaaggggtatgctgccattactagttctgtcattcccattcctaccgttctcattcctattcccattcccggttctgtctccacccccgatgcccctcccccgcgtaacccccgtggctcaccgcaccacacgaaacctctgatcccatgacctcgacggcggccatggccggcaagcaggtgcaataccgtgccccaactcgccccgcacgtcgcccatcctgtcacccccacgcgatggccgcaactccgcgagacaaccgctgtccgccccccaccaccctcccccgcgacgccccctcccacgacgctttgtgcgcgtgagtctgcgactgccgacagccgtcgccgtactggagcccgatctgctggctccccctcaacctcaccaccatgcccccatcggacctcgtcacgccgtgcgtggcggtgccggtgatggacgcggcgttgctagccgtcatcgtcccgcctcgacgttcgatccatgctcgccacggttggtgctcgcacgcgatgtggcgtggcgaggttaccgcgggcgccgcggaggtggagggggaaggggaggatgagggcacgggcaagagagtgcatcgcggtggacggtctcgtgagtgagtgctgctgcctgcccctctctctctgcctgcgttctcctggtgctgctctccctctcctcccctgcttcgacctcccgcctttccccaccgtttcttggatttctaggatccagacaaccgcccttgtgagcctgccttcctgcctactacctgcgtacatacaggagggaccttgggtgatccgggtgcttggtttcttggttctgcggctttcgctgctgttggatttgccgagccggagccgccggagatgaccgtcgacgagctgaagctgcaggcaagggccagcggcggccacgacctaaggaccagttccccgtcggcatgcgcgtgctcgccgtcgacgatgacccgacctgcctcaaggtccttgagaacctcttgttccgctgccagtaccatgtgacaacaatgggacaggcaaccacgaccttgagctgctgagggagaaaaaggaccagtttgaccttgtgatcagcaacgtccacatgctggacatggacggcttcaagctcctcaagcttgtgggtctcgagatggaccttccggggattagtgaagcggcagaagaagagcttttacaataaaccctaaacccttacaatgctgattttgatggagatgaaatgaatttgcatgtccctcagacggaggaagctcgcactgaagcgcttaattctcataggggttcaaaataatttatgtactcctaagaatgtgatggggggtacttcaatgcaataatgagcttcccacaaaattacccaaacagcccgccatcagtcagatttacctctgaaatgtggcatccaaatgtctatcctgatgggtgggtttgtatctctattcttcatccacccagtgaagatccaaacggttatgagctcgcaagtgagcgatggacacctgtgcacacacttgtaggtactgatcacagcacattcaactccacacagattgtccatgtttcttttagtcaccattgatttatcactaggtcattgtgtttgtggccaacgagtattgtttctaacagttatgttcccatagctagctggattcattgttgtgttttgttcagggtactttcaccacttctggtatggttctgtctgtaatgtgccagggattattatattgtttttggtttggatttggaatggtttggggtccacaacgatgatgcgtcagagct

SEQ ID NO: 2128 - DNA, 2611 bp, Zea Mays
agactactcacaggtcactgtctcactcacttgaagctctaacagcaagccatggcaggacgagaagcggacaaagacccagagctgaaggtgctcggcgtgtggtcgagcccgttcgttatcagggcccgcgtcgcgctaaacctcaagggcctcgcctaccgatacgtggaggacaacctggacagcaagagcgagctcctcctcgcctccaaccacgtgcacgggaaggtgccggtgctcctccacgacggcaggcccgtctgcgagtcccgggtcatcgtggagtatatcgacgaggccttcccggccagcggcccctgcctcctccccgccgacccgtaccgccgcgcggtcgaccgcttctgggcctcctacgtcgacgacaagctctttcccacctggatacccgtctacaacggcaggacgagcgaggacagggtcgcggcggcgaggcaggtagtggccgtgctggagaagtttgagcgggcgttcgatgagtgctccggaggcaaggcgttcttcggcggggacgctgctggcctcgtggacgtcgtgctaggcggcttcctcgggtggctgcgcgcgtctgaggtgatgtgtggcgtgagggtcatcgaccccgccaagacgccgctgctggcggcgtgggcggaccggttcgccgcgctcgacggcgtcagggaggtgatacctgacgtgcagaggctgctggagtataacaagattaggcgagctcgtcgtgggctgccgtaggtgctgggccttgggccatctatctgccagcatgtggtcagtcaactctaagcaggagactttgacaaggttaaagtttagttcatgaaggtgggcaatctaattaggatgctcatgctttagctaggagtgccattagttttcctgttgaaaggcatgtttggttcctctttcctactgaaagagtttgtaatatctttactactattaagaaggtaaggggtatgctgccattactagttctgtcattcccattcctaccgttctcattcctattcccattcccggttctgtctccacccccgatgcccctcccccgcgtaacccccgtggctcaccgcaccacacgaaacctctgatcccatgacctcgacggcggccatggccggcaagcaggtgcaataccgtgccccaactcgccccgcacgtcgcccatcctgtcacccccacgcgatggccgcaactccgcgagacaaccgctgtccgccccccaccaccctcccccgcgacgccccctcccacgacgctttgtgcgcgtgagtctgcgactgccgacagccgtcgccgtactggagcccgatctgctggctccccctcaacctcaccaccatgcccccatcggacctcgtcacgccgtgcgtggcggtgccggtgatggacgcggcgttgctagccgtcatcgtcccgcctcgacgttcgatccatgctcgccacggttggtgctcgcacgcgatgtggcgtggcgaggttaccgcgggcgccgcggaggtggagggggaaggggaggatgagggcacgggcaagagagtgcatcgcggtggacggtctcgtgagagggaccttgggtgatccgggtgcttggtttcttggttctgcggctttcgctgctgttggatttgccgagccggagccgccggagatgaccgtcgacgagctgaagctgcaggcaagggccagcggcggccacgacctaaggaccagttccccgtcggcatgcgcgtgctcgccgtcgacgatgacccgacctgcctcaaggtccttgagaacctcttgttccgctgccagtaccatgtgacaacaatgggacaggcaaccacgaccttgagctgctgagggagaaaaaggaccagtttgaccttgtgatcagcaacgtccacatgctggacatggacggcttcaagctcctcaagcttgtgggtctcgagatggaccttccggggattaacagctgaaaacctcgcccgatttgtaaagaagttttcttgttcaatgcggcattgaatttgggaggaatggcaagtctcatgaaaacttctatatgccctacacgtgaccactaaaagaaagagttagacaggacaaaaggctgcaggtgaagcggcagaagaagagcttttacaataaaccctaaacccttacaatgctgattttgatggagatgaaatgaatttgcatgtccctcagacggaggaagctcgcactgaagcgcttaattctcataggggttcaaaataatttatgtactcctaagaatgtgatggggggtacttcaatgcaataatgagcttcccacaaaattacccaaacagcccgccatcagtcagatttacctctgaaatgtggcatccaaatgtctatcctgatgggtgggtttgtatctctattcttcatccacccagtgaagatccaaacggttatgagctcgcaagtgagcgatggacacctgtgcacacacttgtagggtactttcaccacttctggtatggttctgtctgtaatgtgccagggattattatattgtttttggtttggatttggaatggtttggggtccacaacgatgatgcgtcagagct

SEQ ID NO: 2129 - DNA, 2805 bp, Zea Mays
agactactcacaggtcactgtctcactcacttgaagctctaacagcaagccatggcaggacgagaagcggacaaagacccagagctgaaggtgctcggcgtgtggtcgagcccgttcgttatcagggcccgcgtcgcgctaaacctcaagggcctcgcctaccgatacgtggaggacaacctggacagcaagagcgagctcctcctcgcctccaaccacgtgcacgggaaggtgccggtgctcctccacgacggcaggcccgtctgcgagtcccgggtcatcgtggagtatatcgacgaggccttcccggccagcggcccctgcctcctccccgccgacccgtaccgccgcgcggtcgaccgcttctgggcctcctacgtcgacgacaagctctttcccacctggatacccgtctacaacggcaggacgagcgaggacagggtcgcggcggcgaggcaggtagtggccgtgctggagaagtttgagcgggcgttcgatgagtgctccggaggcaaggcgttcttcggcggggacgctgctggcctcgtggacgtcgtgctaggcggcttcctcgggtggctgcgcgcgtctgaggtgatgtgtggcgtgagggtcatcgaccccgccaagacgccgctgctggcggcgtgggcggaccggttcgccgcgctcgacggcgtcagggaggtgatacctgacgtgcagaggctgctggagtataacaagattaggcgagctcgtcgtgggctgccgtaggtgctgggccttgggccatctatctgccagcatgtggtcagtcaactctaagcaggagactttgacaaggttaaagtttagttcatgaaggtgggcaatctaattaggatgctcatgctttagctaggagtgccattagttttcctgttgaaaggcatgtttggttcctctttcctactgaaagagtttgtaatatctttactactattaagaaggtaaggggtatgctgccattactagttctgtcattcccattcctaccgttctcattcctattcccattcccggttctgtctccacccccgatgcccctcccccgcgtaacccccgtggctcaccgcaccacacgaaacctctgatcccatgacctcgacggcggccatggccggcaagcagtgacaacaatgggacaggcaaccacgaccttgagctgctgagggagaaaaaggaccagtttgaccttgtgatcagcaacgtccacatgctggacatggacggcttcaagctcctcaagcttgtgggtctcgagatggaccttccggggattaacagctgaaaacctcgcccgatttgtaaagaagttttcttgttcaatgcggcattgaatttgggaggaatggcaagtctcatgaaaacttctatatgccctacacgtgaccactaaaagaaagagttagacaggacaaaaggctgcaggtgaagcggcagaagaagagcttttacaataaaccctaaacccttacaatgctgattttgatggagatgaaatgaatttgcatgtccctcagacggaggaagctcgcactgaagcgcttaattctcataggggttcaaaataatttatgtactcctaagaatgtgatggggggtacttcaatgcaataatgagcttcccacaaaattacccaaacagcccgccatcagtcagatttacctctgaaatgtggcatccaaatgtctatcctgatgggtgggtttgtatctctattcttcatccacccagtgaagatccaaacggttatgagctcgcaagtgagcgatggacacctgtgcacacagtatggcttcgtatactttgtttacatatcttttccccattgtaatgatactcatctcccttttatgtgtatactttttagagagaatattaccttgtagtctcattgtttcagtttatggtccaatttacaatggcttcactgtaaatgggaaaacaactcggtaggaatgcttttttgaattataaattatttatatttcatacaatgcttataggtatgtgatgagtcctccaatctgagaagtagagcatggtaaagcactccaagctgctctttcatcgggaaatttataggtgacacttgtgtcatacattgaactatggagtcaaacaaattacatattatccttcaacatttttcaccagtgggaactgtagttattgcatagaatagatggtatattaatcgttgagagccaatgtttacattaactgttatgcagaagaaaatttatgttttattttatatctaactgtactttgttgcagcttgtaggtactgatcacagcacattcaactccacacagattgtccatgtttcttttagtcaccattgatttatcactaggtcattgtgtttgtggccaacgagtattgtttctaacagttatgttcccatagctagctggattcattgttgtgttttgttcagggtactttcaccacttctggtatggttctgtctgtaatgtgccagggattattatattgtttttggtttggatttggaatggtttggggtccacaacgatgatgcgtcagagctgttccaaggattggatgatttccattcccctgctgccaattcgactaggctcgccgtctccgctctgcccaactggcaccaagcagccaatggaacttgagcagccaatggatgatttccattcccctgctgccaattctctgaactgcttcgacccttcaactcaatctgcatgtacccaggattctttgcttgctcttctacttctgaaaattcgcaaaa

SEQ ID NO: 2130 - DNA, 1043 bp, Zea Mays
aaagcttttccaaccaccagctgcgcgatttctgtacacttgtgtgtcctgcaatttctggctgtccatttccgatctccactgtggtctggttttgttcaactgacaacaatgggacaggcaaccacgaccttgagctgctgagggagaaaaaggaccagtttgaccttgtgatcagcaacgtccacatgctggacatggacggcttcaagctcctcaagcttgtgggtctcgagatggaccttccggggattaacagctgaaaacctcgcccgatttgtaaagaagttttcttgttcaatgcggcattgaatttgggaggaatggcaagtctcatgaaaacttctatatgccctacacgtgaccactaaaagaaagagttagacaggacaaaaggctgcaggtgaagcggcagaagaagagcttttacaataaaccctaaacccttacaatgctgattttgatggagatgaaatgaatttgcatgtccctcagacggaggaagctcgcactgaagcgcttaattctcataggggttcaaaataatttatgtactcctaagaatgtgatggggggtacttcaatgcaataatgagcttcccacaaaattacccaaacagcccgccatcagtcagatttacctctgaaatgtggcatccaaatgtctatcctgatgggtgggtttgtatctctattcttcatccacccagtgaagatccaaacggttatgagctcgcaagtgagcgatggacacctgtgcacacacttgtaggtactgatcacagcacattcaactccacacagattgtccatgtttcttttagtcaccattgatttatcactaggtcattgtgtttgtggccaacgagtattgtttctaacagttatgttcccatagctagctggattcattgttgtgttttgttcagggtactttcaccacttctggtatggttctgtctgtaatgtgccagggattattatattgtttttggtttggatttggaatggtttggggtccacaacgatgatgcgtcagagct

SEQ ID NO: 2131 - DNA, 1064 bp, Zea Mays
tggctgtccatttccgatctccactgtggtctggttttgttcaactgacaacaatgggacaggcaaccacgaccttgagctgctgagggagaaaaaggaccagtttgaccttgtgatcagcaacgtccacatgctggacatggacggcttcaagctcctcaagcttgtgggtctcgagatggaccttccggggattaacagctgaaaacctcgcccgatttgtaaagaagttttcttgttcaatgcggcattgaatttgggaggaatggcaagtctcatgaaaacttctatatgccctacacgtgaccactaaaagaaagagttagacaggacaaaaggctgcaggtgaagcggcagaagaagagcttttacaataaaccctaaacccttacaatgctgattttgatggagatgaaatgaatttgcatgtccctcagacggaggaagctcgcactgaagcgcttaattctcataggggttcaaaataatttatgtactcctaagaatgtgatggggggtacttcaatgcaataatgagcttcccacaaaattacccaaacagcccgccatcagtcagatttacctctgaaatgtggcatccaaatgtctatcctgatgggtgggtttgtatctctattcttcatccacccagtgaagatccaaacggttatgagctcgcaagtgagcgatggacacctgtgcacacagtatgtgatgagtcctccaatctgagaagtagagcatggtaaagcactccaagctgctctttcatcgggaaatttatagcttgtaggtactgatcacagcacattcaactccacacagattgtccatgtttcttttagtcaccattgatttatcactaggtcattgtgtttgtggccaacgagtattgtttctaacagttatgttcccatagctagctggattcattgttgtgttttgttcagggtactttcaccacttctggtatggttctgtctgtaatgtgccagggattattatattgtttttggtttggatttggaatggtttggggtccacaacgatgatgcgtcagagct

SEQ ID NO: 2132 - DNA, 968 bp, Zea Mays
ctttcctcggagtcgagtgattccacattgacaacaatgggacaggcaaccacgaccttgagctgctgagggagaaaaaggaccagtttgaccttgtgatcagcaacgtccacatgctggacatggacggcttcaagctcctcaagcttgtgggtctcgagatggaccttccggggattaacagctgaaaacctcgcccgatttgtaaagaagttttcttgttcaatgcggcattgaatttgggaggaatggcaagtctcatgaaaacttctatatgccctacacgtgaccactaaaagaaagagttagacaggacaaaaggctgcaggtgaagcggcagaagaagagcttttacaataaaccctaaacccttacaatgctgattttgatggagatgaaatgaatttgcatgtccctcagacggaggaagctcgcactgaagcgcttaattctcataggggttcaaaataatttatgtactcctaagaatgtgatggggggtacttcaatgcaataatgagcttcccacaaaattacccaaacagcccgccatcagtcagatttacctctgaaatgtggcatccaaatgtctatcctgatgggtgggtttgtatctctattcttcatccacccagtgaagatccaaacggttatgagctcgcaagtgagcgatggacacctgtgcacacacttgtaggtactgatcacagcacattcaactccacacagattgtccatgtttcttttagtcaccattgatttatcactaggtcattgtgtttgtggccaacgagtattgtttctaacagttatgttcccatagctagctggattcattgttgtgttttgttcagggtactttcaccacttctggtatggttctgtctgtaatgtgccagggattattatattgtttttggtttggatttggaatggtttggggtccacaacgatgatgcgtcagagct

SEQ ID NO: 2133 - DNA, 1102 bp, Zea Mays
gtttgtaagcccaagaatttgtaaaaccaggaaataattccaatgaaagatcggtgcggggcggaattttcttggctttttgtagtggctaccgtagtacatcaacttgggcacttggcgacatgtccggtgcccagctccatcacatatcaatctgaaattaaacatgtgtctgagttctgaatgaaaaaattcagctaacagctaacactacgcactactaacagacctcaagcataatactgttgatttgatgtccttgtatttatcttgaagcattgcattcatgcagtcatgtaaatagtactttatttatcttctggccaacacactaataaccaacctttgcagtgatggggggtacttcaatgcaataatgagcttcccacaaaattacccaaacagcccgccatcagtcagatttacctctgaaatgtggcatccaaatgtctatcctgatgggtgggtttgtatctctattcttcatccacccagtgaagatccaaacggttatgagctcgcaagtgagcgatggacacctgtgcacacagtatgtgatgagtcctccaatctgagaagtagagcatggtaaagcactccaagctgctctttcatcgggaaatttataggtgacacttgtgtcatacattgaactatggagtcaaacaaattacatattatccttcaacatttttcaccagtgggaactgtagttattgcatagaatagatggtatattaatcgttgagagccaatgtttacattaactgttatgcagaagaaaatttatgttttattttatatctaactgtactttgttgcagcttgtaggtactgatcacagcacattcaactccacacagattgtccatgtttcttttagtcaccattgatttatcactaggtcattgtgtttgtggccaacgagtattgtttctaacagttatgttcccatagctagctggattcattgttgtgttttgttcagggtactttcaccacttctggtatggttctgtctgtaatgtgccagggattattatattgtttttggtttggatttggaatggtttggggtccacaacgatgatgcgtcagagct

SEQ ID NO: 2134 - DNA, 1319 bp, Zea Mays
gtttgtaagcccaagaatttgtaaaaccaggaaataattccaatgaaagatcggtgcggggcggaattttcttggctttttgtagtggctaccgtagtacatcaacttgggcacttggcgacatgtccggtgcccagctccatcacatatcaatctgaaattaaacatgtgtctgagttctgaatgaaaaaattcagctaacagctaacactacgcactactaacagacctcaagcataatactgttgatttgatgtccttgtatttatcttgaagcattgcattcatgcagtcatgtaaatagtactttatttatcttctggccaacacactaataaccaacctttgcagtgatggggggtacttcaatgcaataatgagcttcccacaaaattacccaaacagcccgccatcagtcagatttacctctgaaatgtggcatccaaatgtctatcctgatgggtgggtttgtatctctattcttcatccacccagtgaagatccaaacggttatgagctcgcaagtgagcgatggacacctgtgcacacagtatggcttcgtatactttgtttacatatcttttccccattgtaatgatactcatctcccttttatgtgtatactttttagagagaatattaccttgtagtctcattgtttcagtttatggtccaatttacaatggcttcactgtaaatgggaaaacaactcggtaggaatgcttttttgaattataaattatttatatttcatacaatgcttataggtatgtgatgagtcctccaatctgagaagtagagcatggtaaagcactccaagctgctctttcatcgggaaatttataggtgacacttgtgtcatacattgaactatggagtcaaacaaattacatattatccttcaacatttttcaccagtgggaactgtagttattgcatagaatagatggtatattaatcgttgagagccaatgtttacattaactgttatgcagaagaaaatttatgttttattttatatctaactgtactttgttgcagcttgtaggtactgatcacagcacattcaactccacacagattgtccatgtttcttttagtcaccattgatttatcactaggtcattgtgtttgtggccaacgagtattgtttctaacagttatgttcccatagctagctggattcattgttgtgttttgttcagggtactttcaccacttctggtatggttctgtctgtaatgtgccagggattattatattgtttttggtttggatttggaatggtttggggtccacaacgatgatgcgtcagagct

SEQ ID NO: 2135 - DNA, 1532 bp, Zea Mays
ccccattcctgccccctatgctatgcatcaactgttcttttgtagccgaagatatattagtgaatttgaaactagagcaattagtatattcttcgcaattaccttatggttgttctaaacaacttgtaataatttgaaattgtaatttgaaactggaggtagtagtatattcttcacaattggaatgatgagatcttattatcatagaatgatttaaggtccctgacaaaaacgacaataatgcacaagtagcaatgcgtatcggttgaacatggtcacactagcacaacaaatgaccttccaatcggccaaaaccgcgatggagcactactatggctgcatttatctgtacacatccaccagttcattctagagtgttcaaagagaatggccatagaaagatgtagaccaagggtgtctatagagccacttcataaccagggacagatgcttaaaccagcgacaccacttcataaccagcaggcagacaacacactccttcagatcggtgggatgttcgaaaaagataagcccttgtaacctttgtatgcatagtaggcaatccttgtgtagtagaacccagggatgaacattacaatgcccaacatcataaagaaaattccttacaatgcccaacatcataaagaaaattcctgatacaacataaagggccataagttcaggtaaagggagtaaaaaatcatgcataagcacaacatttcatttgaataagtacttaactaaaaacttcaagagcaacttgattccaaggtaccttgatttttttcaatccatgatatgaagggactggactatttgtgtctggaaaattgggattcttcactagcagtcacaatacgagaagaaaaaaaatgagttttgagggtttccagatatgctctagagggattcctaaagatggaaatgtcttgggtccttttgctagagggattcaacaaagtaaataagtcttgagtgatcaataatgatcttttcttagatacctggttgacctaattttaggtctaatatgtcaacactgattaccagtgtaggaatcttaattccaatttatagctgattaccagtgtaggaatcttattctgtgcttggccaggcaaaagccaagccatgctaccctgtgcttatctactgtggtgttgtagttgtagggagggagggcagcaaagaaagcaagcaagaaagaagccgattccactggtggttaaggttttggattaaaggagagaggtgcagagaaaaaaaaggttgcaactccctgggccaagtagtagcgcaacaagttcagcaccaatggcagccatatgaaatataaggcaaagcagataaaaagcttatttttttttcaagaaggtaaaggcaatgacagaaaagtgaggagggtcagaggtgtacagataaggatgagggctgaaaagaggagcaggaagaagcacaaaactaatcaggaccaaccactgcaaaatgtgattgacatagatctcacacatctcttcaacattgcacaaaca

SEQ ID NO: 2136 - DNA, 1320 bp, Zea Mays
gtttcgtccatgatcttggtagctgcggctgctacctttcctgggtcgagcaaggtgtgacgaccatgctggcgaaatcgataaagcgaccaaaagttccagtcaccggagcggcggagccacaacattgaacatacccgtcaagatgaccagagccgaaagctggagcttccaatggcgggaggcaacgacctgaaggtgctcggcgtgtggacgagcccgttcgtgatccgggtccgcatcgtgctcaacctgaagggcctggcgtacgagtacgtggaggaggacctcggcaacaagagcgcgctcctcctgggatccaacccggtgcacaagagcgtgccggtgctcctccacgccggccgcgccataaacgagtcccaggtcatcctgcagtacatcgacgaggtgtgggcggggacggggccggccgtgcttccggccgacccctacgagcgcgcggtggcgcggttctggggcgcgtacatcgacgacaaggtggagtcggcgtggctggggatgctgttcaggtgcgcgaacgaggaggagagggcggcggcggtggcgcgcgcccgcgaggcgctcgacgcgctggagggcgcgttccgggactgctccagggggaggccgttcttcggcggcgacgacatcgggttcgtggacgccgttctcggcgggtacctcggctggttcggggccgtcggcaggatcatcgggagcaggctcatcgacccggcccggacgccgctgctggccgcgtgggaggaccggttccgcgccgccgacgtggccaagggcgtcgtgcccgacgacctcgacaagatgctcgcgttcctgcagaccctttcatgtcgatacgtctatcactcagttttgcttcttccgtcaataatcggtgtgctgaatacatgtacaacagctgcctataattttgcttctttcttctaatacctccgtttttaatttgatagttcaactttataataacaaatgtcaaatttaaaaaaaaaatcggaaggagtatttttttaatacatccaagtccatccaataaaagtgctcgtggggctttctattactcatctgtttcagctaaatcgctttcactacaggaaaacgaccagtttccgacggcctaaaccgtcggaaataagtcctgaaccgtcggaagtagttacttccgacggcttaagacgggtcccgtcggaagtaacgccgtaggggatacccagtcggaagtatcagcgtttccgacggcgccgtcggaagtaaacctatttccgacggccagggtggcgccgtcggaaataaagcgaggtg

SEQ ID NO: 2137 - DNA, 2620 bp, Zea Mays
ttggtttgccaaaagcactagctgagtctaaaaacagttttagcttttccagttctagcatatttaattaagctaggcttgctcctttctaagcatacatggtaacaatcatttagtgcaatcaacatcttttgccagtatcctcattttcacttattactcaatacagtacaatggatcaagcagtctcattagctgcaagaagcaaacaattcgaatcgagttttaaccttgcaaggtaaaccctaaacacatgacatgtaggggcactccgccccccacacgcgtcaaccgtccccatcgatcccccgttcacggccatgactcacggccttgggcgtacaatgctccaattgtcccgggctaccgccgtgcaatggccgcacttgtacccaccataatccgatatgggagactccgtctcaggtccagtgaggggtaaagtccgcgtccggcttcactcaggtactaggcttaccggttaccatattttctaacatgtgtttagtacgttcaaacgcttaacacatgtatccgcacgttaatccttattccaatttcgtctcgtaggcagcgcatccccatggatctgtgtccacagaccatcatcattctgtataaaaaatggatacaaccaattcctgacctcgcgcgagtgctagaaaaatcactcgacttctatcgagatccctaattagcaaagcagctactcgacctagcatactagtatccatctcaaaaaggaatcctgagtttatgcaactagggtttcaagcaactcctatacttaagtgcacattacgaacctacaaacattaagtgtagtaaaatatcatatataaacggttatgcataaaaccagggcttgcctggaatccaacactagatagtgtttgctatatgacactcacttagcgagcatccactggttaagtccatcattctttgggtcatccaccatctgtatcttgtggttggcaccacatcacttgcacgatcatcatctctcgatcctaaatgagatgcaagatgcatatgtatgaatataatgaagatatacaatgacacacaatagcgagctagatataaggcgcaagacacggtaccaccaacgatcatacgtaggtgctaattagccatacgttattgacctacgaatttaacactactaagaaaccgacaaacactatcatatatatagccaccacaaacacgacatcacgagtacaagcatttatttaattggatacggcttttcattagttcttccattgatcgcacaaaagcatcccagacaacacaagttcaatagaggacataaacatcaatgtctatggaactcctatatcacaatcaactagagaaagaaatatataaaacatgacacacatgcaatgttaagcttagtcatgacaaatctacattaattaagtgctaaccaaacatttttagcaaaaagggtgaactaaacaatcaaatgagcacttgcagatttttggacagcaacacagtagttacttgttttaatcataactcttcaaatattaatccaaaaataacaaactagaactttctggaaagcttaaaaagtgctctacaactttggtatttttacctcaacatgattcaatacttatcaaggacaaaaagtgctaacatgacagctctgtccagatttggacagattcagaattgcgacttcaaaaattcataactagagactcaggttgatttccatttgatcttagactttctggaaagataattaaattgtctaccaatcatttgtaaacaacccaggttgatttaaagcgtatcaaggttaaaagacactaggaagactttgctgtccagatttggatagattcagtcttcctacttcaaacacctataacttaatcttcagaccacaaaaagagtgatccaagactttttggaaagcttagcaaaagtaatacataaattttataatcatcaagaagtgattctatgtttaaccaattcaaacaatatagtcttcgaaatctgttctgacagtggataggattcaataaccatcttataaaatttataactctccaactatcaggtttattgtcataaaactttaacaccagtatgataagaaaattatctacaactttcttataattgacaaggactgattctaaactaaatttaagcaaacaatgcgatctctgaaatctataccgaaattggacagattcaattactgaacttatgaaaagcataacatctaaacgatcagacttatgactgtcaaattttaacacaagcaagttaataaagttatctacaacttttctatatgacttttctatagaaaacataatgtagttcattaaacagacagcacggcaaaaacagtgtgtgcagcccaaaacagcaactaataaatttcagctcctatttacttcaagaatttgccatgttctatagacttgaattactctaacactttaccatttgttagagttaaaacaatcaaatgatgaccaacaagtcgaattacaaattctattaagtcatttcgtgcgctagaattaccacacacaattaacaaacgcatctaccacaatactcgtacctggtacatata

SEQ ID NO: 2138 - DNA, 1133 bp, Zea Mays
gccgaggagcgatgcgcgaggcgtgacgacgacaagggctgcgagcacggcacagtttattacacgatttattggtgcggtcatttaatcgaacatgaaaagcgcgggacagcggggtctcaccacgggttttgacgacggcacgtagggactgcgtagacctggcgaagcgagatgcggagacggtagaactgcgcagatcgacgacgcagcatggggctatccaagcaccaacgggacggcgtgggtcggggctgcgcagatctgcggtggagctcgctgcgcggcgatgtcgggactgctactgtagccaggaaccagattgaggggggctcgacgtgggagagcactctcgtgcagccaagggggggcagcaggggtgcgcggtggctgatgtcgagaaggtgttgcggaggttgaaggcaagcatgaggtggaagagtgcgccgttgctgctacatggcgttgcacagcgaggctcgacaaggaagggagcttgtcgtcaagtgcgcagcgataggaatcgagcgcgcgcctagagggaacgacggtgtccgggcttggccatagcggtagaaggggttgttgctcctgctgcgccttttaccgaacaccctgcaagcgtggcagggaaatcaacataagggcagtgtgctgcgctgcacgatgagggagcgagggagtagcagcgacgtcctacggcaatgcaagggaggagctcactggggatatggttaggggcgagctgctggaagctgctgccagccatggggaggagcagccatgggaattacctgcgccagtaggaggaggggcgtcggctcccaaacttgctgcacattggggaagactgcagggggaaaactctccatgaggggagaggaagggagcagtgaggaaggggccgagcaggggaggggcgctggccatggagctcctgctaggcaccatccatggaagaagggaagaagcatggaggaggaagaactatgctggctgctactgccgtgagggagaaggagacagggagagggaagcgttggacgagcgagaggtagaagaacgcgtgtgtgtgctagcttcgcgtacaagaagacatagggcgttgcgcttatcctttaaagagacctgct

SEQ ID NO: 2139 - DNA, 3886 bp, Zea Mays
cgaaaaaccaaaacacacaggcaaagcataaaccgtattaacccccctcttttctccactcctccgccccctcgccgagcaagcacccctcgtcgtcggtgccgacctcgccgcgctgccgccgggttgggaccgataaataaaggggaggttaacgcgctaaccctcgcgacctcgggtagcgcgcgactcctctccatcgtcttcgccgtcgccctcgccctcgcgcgcccctcctacgccgcccccgtccctctctttcaccaccggcggccggcggctcccgctgccgctgcttcgaggccgtcctcccctaatcacagggaatcccccgccgccaaccccgctcaccgcactcctccagtccgcagctccggcggcgacctcgccgtctcgctgccccgccgggcctcggcccaccgccgagtcacggccacggctgccctgaaaccacagacttcgcctgcgacgagcatccgtcagctccaaagtgccaagggagatggatgataccttagctaccataaggatgaaattgaagaagcggaagaaaggcaaggatagtaatgattttgatgcagtggctgaatgtggacccgaggttccggcattggttcaacaggaaggtgaacgggctgttgttgatataggtgatggtgttgctgatgagaagagcaatttgaatgtcgtgaaactggagggtagtgatgtttctgggaattgtgcacagggtttggatgatttggggttgaaagactccttggcagtgctgtttacaagacctggtcggaagtcacggcaggtctcagaggaggcagaaggcatggaagtttcttgtccgcatgatgaggatggtcttaacaagggatctggtttggctccagacacagcttccaagggcattaaaaggagaaggcgacgcacaaaggaagagatgaagaatgcttctgtgcaggatcagaaagcctcattgcctcggaaagcaaagacaaatggtagcaagtctactaaactctataaggtcggtgctggtcctgggcaagctttgggaggattgtcttctgtttctcctcaactggaaaagtctgggaaagagaatgctgtagatgatggatcattttaccaatcattaggtgaagtgcttctacaagatgtggaagccagcaaagtactgaaggatggatcaattacctctttcaatggggtcactgatcactttgaaatctcagcttgggcaagcaatcaccctgggctggaatctcgttcaggaaatcttgatgaaaaaacacctcgcacagcagaacatacgaccaatcttggtgtttctgatgcacacacacgttcccaaacgctagggaaggaaagcagtgatgatgttgattgttctcaaggcaagtcaccaacatcaaccataaaaaggaaaattggtctaaaaccaaaacaggttcctgggaaatctgttcgacgaaaagaggaagtattatctgttgacgctgataataaaccaactgatacaacagaaattattgaagcaagtactactccggttattgaggaaaatttggatcagctgcctgttatggcccccaaggattcttgttcttcacatgacattgttggaaatagtcctatgtgtctaggtgcagacatggcagcacctgtgaaatatgtggatatagttgatgttgcaacaccattggattatgaagacaaggagaacacatcaaaggtgaaacgtgttacacgaggttccaaaaaacgcaaacatggtgacatggcatatgagggtgatgttgactgggaaactctaatgcaagagcaggggctgttctcaaacccctcagcaggttttccagatcagtcaataaaaacaaaaaataaaattaaaacttcagaagtttatgagggtggaggtgatactggtgttgctgcagtacgtgctggcctaaaggcaaagactattacaccgattgagaagataaagttcaaggaggttttgaagcgaaagggtggccttcaggagtacctagagtgcagaaatatgatactaagtcgctggagcaaggatgtcaagcatttattggatcttgcagactgtggtgtttcagacgttccgttgaaagatgagttgccacatcaagcacttactcgtgctgtgtttttattcttagaccaatatggctacataaatgctggaattgcatcagataaggtggcgaaggggcacaatgacactccatatgaggttattgaagtaccaaagctaaatgaatcacatcaaatggaatcagtcaacattcaaaatagcgttgtatctgtatcacaaaagaatgaggattttgagcatggaacgagcactgaatgctgcagaactgcatatgcatctgtagaggcagagataagtgtgcctcgtgagcttccaaagataccgtcgttccaatcttttgtgatgcgtgatcaccatttggacgaatctgatgcaagaaaaagaacattgaaggatgattttgggagacttgagtgcatatcagaaaatgattccaagaatggcgaagttaaggatttgcctgaaaacaccaagtacgctgatggtgatagcttgaaaatgtctcatgataattttactcagcagagccactcaaatgagacagcttgcctagcaaacgctcaggatcattcaacagatactgttgttgtagacggtcggtttacaagggcatgggtggatactgatacaatctgcattgatggtgtcaaggatcctctagccattgagaggtggcaggcacaggcgatggaggctgataaagaattctacagtcggatacgcatacctgatgaagatgattcaagtagtcagaagcacacatgccgtagttctgcttcacagggtgccgatagcaaacctgcatctgagcggcaatcaagaggtgtggagcatataaaacagggtctcgtgaactttatagcctcgctgctgatgccattatatagaggaaaaaagatcgaccgagaggggtacaaaacaatcatgcgcaaatctgttaacaagatcattgatacatgctcagaaggagagaaatcaatgactactcttgagtttcttgatgataaaaggaaaattaagattgaatcctttgtgggcaaaatggttgacaagcatttgcatgttgttagcaagtcggccaaaccttaagattcatatgtgtagtgaggtgttctctgcaaagagatctactctcttttaaaacacctatgaatcagtgattgttgatccaagtgaactaaaatctcacttcagaagccagcatgactcatcagtgttgccgcaagatcaacaagaacacatattacccagactatatgcgtggtccagaagagcattgaccagatcaataccatgtaattctgtacttatataggcatcatttccatcttcgtagctatagctcagtcaaaggtttagacctctgtgcactcgacaagcatgttgggcatgcagtaagcttggatgccaagttaagtttctgtggcttgatgaagtggcgtatgaagatccgggattcagtgtggtctcatatgcaatgagggtttttatgtctttcatggcggtagttcagtctagcctagcggattaatcctgttcattgttcagagttaactttaccaaagtagatcctcctctctctttgttgtacagttttgcagtttctaacaagcgtttaacttatagaaaggctggagtttggcagagatttgcagcccgttgtatatccttggctgcttataatgagcctcattgatgattctcgaatgcggaatgattgccccgaagttcctcagttgatttctctccatacgttataattgtatgatatgattgatt

SEQ ID NO: 2140 - DNA, 6580 bp, Zea Mays
gaaaaaccaaaacacacaggcaaagcataaaccgtattaacccccctcttttctccactcctccgccccctcgccgagcaagcacccctcgtcgtcggtgccgacctcgccgcgctgccgccgggttgggaccgataaataaaggggaggttaacgcgctaaccctcgcgacctcgggtagcgcgcgactcctctccatcgtcttcgccgtcgccctcgccctcgcgcgcccctcctacgccgcccccgtccctctctttcaccaccggcggccggcggctcccgctgccgctgcttcgaggccgtcctcccctaatcacagggaatcccccgccgccaaccccgctcaccgcactcctccagtccgcagctccggcggcgacctcgccgtctcgctgccccgccgggcctcggcccaccgccgagtcacggccacggctgccctgaaaccacagacttcgcctgcgacgagcatccgtcagctccaaagtgccaagggagatggatgataccttagctaccataaggatgaaattgaagaagcggaagaaaggcaaggatagtaatgattttgatgcagtggctgaatgtggacccgaggttccggcattggttcaacaggaaggtgaacgggctgttgttgatataggtgatggtgttgctgatgagaagagcaatttgaatgtcgtgaaactggagggtagtgatgtttctgggaattgtgcacagggtttggatgatttggggttgaaagactccttggcagtgctgtttacaagacctggtcggaagtcacggcaggtctcagaggaggcagaaggcatggaagtttcttgtccgcatgatgaggatggtcttaacaagggatctggtttggctccagacacagcttccaagggcattaaaaggagaaggcgacgcacaaaggaagagatgaagaatgcttctgtgcaggatcagaaagcctcattgcctcggaaagcaaagacaaatggtagcaagtctactaaactctataaggtcggtgctggtcctgggcaagctttgggaggattgtcttctgtttctcctcaactggaaaagtctgggaaagagaatgctgtagatgatggatcattttaccaatcattaggtgaagtgcttctacaagatgtggaagccagcaaagtactgaaggatggatcaattacctctttcaatggggtcactgatcactttgaaatctcagcttgggcaagcaatcaccctgggctggaatctcgttcaggaaatcttgatgaaaaaacacctcgcacagcagaacatacgaccaatcttggtgtttctgatgcacacacacgttcccaaacgctagggaaggaaagcagtgatgatgttgattgttctcaaggcaagtcaccaacatcaaccataaaaaggaaaattggtctaaaaccaaaacaggttcctgggaaatctgttcgacgaaaagaggaagtattatctgttgacgctgataataaaccaactgatacaacagaaattattgaagcaagtactactccggttattgaggaaaatttggatcagctgcctgttatggcccccaaggattcttgttcttcacatgacattgttggaaatagtcctatgtgtctaggtgcagacatggcagcacctgtgaaatatgtggatatagttgatgttgcaacaccattggattatgaagacaaggagaacacatcaaaggtgaaacgtgttacacgaggttccaaaaaacgcaaacatggtgacatggcatatgagggtgatgttgactgggaaactctaatgcaagagcaggggctgttctcaaacccctcagcaggttttccagatcagtcaataaaaacaaaaaataaaattaaaacttcagaagtttatgagggtggaggtgatactggtgttgctgcagtacgtgctggcctaaaggcaaagactattacaccgattgagaagataaagttcaaggaggttttgaagcgaaagggtggccttcaggagtacctagagtgcagaaatatgatactaagtcgctggagcaaggatgtcaagcatttattggatcttgcagactgtggtgtttcagacgttccgttgaaagatgagttgccacatcaagcacttactcgtgctgtgtttttattcttagaccaatatggctacataaatgctggaattgcatcagataaggtggcgaaggggcacaatgacactccatatgaggttattgaagtaccaaagctaaatgaatcacatcaaatggaatcagtcaacattcaaaatagcgttgtatctgtatcacaaaagaatgaggattttgagcatggaacgagcactgaatgctgcagaactgtaagtgttaaaaatactgaatgtgctttagtagaagcatcaaatgaaaaaaatcgttccacggttcactgtggtgtcctggagttgctgcctcacttgatgtctgaagaacatccaatggaaaaaaatattctagacgtgtcaactgaagttaggaatgcatcactgccatccagcaatttggatatccaatttacatcatatatgaatagttctgttggaaaagttgaggcccctcatcaacaagaagcacttgaaattgaaaatagtggaaacaactgtcaaagtgacagggctgagtttgctgtgcatggcaaaagaataatcattgtcggagcgggccctgctggtttaactgctgctcgccatttgcaacggcaaggttttttggtcactgttcttgaggcacgagaaaggattggtggccgtgtttatacggatcgcacatcactttcagttcctgtagatttgggtgctagcattattacaggggtggaggctgatatagctactgaaagacgggctgatccatcctctttgatctgttatcagcttggtcttgaacttactacgttgaatagtgcttgccctctgtatgatgtagtaactggtgacaaggttcctgattctctggatgaagatttagaagctgaatacaatggccttcttgatgagatggcactgctttttgcgcataatggtgacagtgcaatcggtttatccctggaggatggactggagtatgctcttaggaagcatcgcgcaactcaacctatggattctgtggaccaggatggccacttgagatttatgacaaattctagagctgtagacatttccgtaagtgcttcaataggaaaggagatagatcattgtggaaagaatgataagatagatgtcctcagccctctcgagagaagggttatgaactggcactttgcacatttagagtatggttgtgctgcaacgctgaaatctgtatcccttccatactggaaccaggacgatgtatacggaggattcggaggtgctcattgcatgatcaaaggtggctatgacactgttctacggagccttgctaaaggacttgatattaggttaaatcatgttgtcactgaagtactgtatggatctgaggagttaggtgatagctgtaaggatgggaaatatgtcaaggtttccacttcaactggaagtgaatttactggagatgctgtgttgataactatccctcttggttgcttgaaagcagataccatcaatttttcaccttcgttgccagactggaaagtatcttctataaaccggcttggatttggtgttctaaacaagatagtattggagttccctgaggtattttgggatgataatgtggattactttggtgcaactgcagaagaaacagatttaagaggacaatgctttatgttttggaatctcagaaagacagctggggctccagttctgatagctctacttgttgggaaggctgctatagatggacaaagcatcagttctggtgatcatgttaacaatgctatggtggttctccgaaagctttttaagaatgcttctgtaccagatccagttgcatctgttgtgacaaattggggacttgatccctttagtagaggtgcttactcttatgttgcagttggagcatcagggcgagattatgatattcttggaaggccagttgacaattgcttattctttgcgggtgaagcaacatgcaaagagcatccagatactgttggtggtgccattttgagtggtttgcgagaagctgttcgcatcgttgacttactgaacactggcagtgactatattgccgaggtagaaacgctacagacataccaaatgcagacagacagtgaaagaaatgaagtcaaggacatgtcaaatagacttgaagcatgtgaactttcgactgctctaagtaagaactcatctgatgcaatgtatccaattgttagcaaggaatctttgctgcaagaaatgttcttcagtgcaaagacaacatcagggcgcctacatttggctaaggagttattgaagcttcctacagatgttcttaaatcatttgctgggtgtaaagaaggactaagattcacttgggaaaaatgctactcaactactgcggcactgtgtgcgtttgcttgtgcttgtttccactgatctggtagctgtacgtttatcaggaattgggaagactgtaaaggaaaaggtttgtgtgcacacaagccgagatattcgtgctatagctcggcagttggtcagtgtgtggattgaagtttttcgtagagaaaaggatagcaacggcggactcaaattgctgcgtcgaatgccatcaattgaatcgagtaagaccaagagtaaggatctgcaatcaggaaagcctaccttacgtgtgccaaatggaactttggacaacaataaagtagtgtcccagcgccagcgtacaagattcgcaagtagtcaatcaccaccaaagataaacaagaagtatgataacaaggaaatgaaattggaaactgtgacagctgctatgtctgatggcaagttgctttcccaaaagcaacaacatggtattgaatctaaggtggaggaatgtggcattcctatgtctgaggaagaagctgctgcattcgctgctgctgaggctgctcgagctgctgctatagcagctgcacaggcatatgcatctgtagaggcagagataagtgtgcctcgtgagcttccaaagataccgtcgttccaatcttttgtgatgcgtgatcaccatttggacgaatctgatgcaagaaaaagaacattgaaggatgattttgggagacttgagtgcatatcagaaaatgattccaagaatggcgaagttaaggatttgcctgaaaacaccaagtacgctgatggtgatagcttgaaaatgtctcatgataattttactcagcagagccactcaaatgagacagcttgcctagcaaacgctcaggatcattcaacagatactgttgttgtagacggtcggtttacaagggcatgggtggatactgatacaatctgcattgatggtgtcaaggatcctctagccattgagaggtggcaggcacaggcgatggaggctgataaagaattctacagtcggatacgcatacctgatgaagatgattcaagtagtcagaagcacacatgccgtagttctgcttcacagggtgccgatagcaaacctgcatctgagcggcaatcaagaggtgtggagcatataaaacagggtctcgtgaactttatagcctcgctgctgatgccattatatagaggaaaaaagatcgaccgagaggggtacaaaacaatcatgcgcaaatctgttaacaagatcattgatacatgctcagaaggagagaaatcaatgactactcttgagtttcttgatgataaaaggaaaattaagattgaatcctttgtgggcaaaatggttgacaagcatttgcatgttgttagcaagtcggccaaaccttaagattcatatgtgtagtgaggtgttctctgcaaagagatctactctcttttaaaacacctatgaatcagtgattgttgatccaagtgaactaaaatctcacttcagaagccagcatgactcatcagtgttgccgcaagatcaacaagaacacatattacccagactatatgcgtggtccagaagagcattgaccagatcaataccatgtaattctgtacttatataggcatcatttccatcttcgtagctatagctcagtcaaaggtttagacctctgtgcactcgacaagcatgttgggcatgcagtaagcttggatgccaagttaagtttctgtggcttgatgaagtggcgtatgaagatccgggattcagtgtggtctcatatgcaatgagggtttttatgtctttcatggcggtagttcagtctagcctagcggattaatcctgttcattgttcagagttaactttaccaaagtagatcctcctctctctttgttgtacagttttgcagtttctaacaagcgtttaacttatagaaaggctggagtttggcagagatttgcagcccgttgtatatccttggctgcttataatgagcctcattgatgattctcgaatgcggaatgattgccccgaagttcctcagttgatttctctccatacgttataattgtatgatatgattgatt

SEQ ID NO: 2141 - DNA, 3684 bp, Zea Mays
ccaaaacacacaggcaaagcataaaccgtattaacccccctcttttctccactcctccgccccctcgccgagcaagcacccctcgtcgtcggtgccgacctcgccgcgctgccgccgggttgggaccgataaataaaggggaggttaacgcgctaaccctcgcgacctcgggtagcgcgcgactcctctccatcgtcttcgccgtcgccctcgccctcgcgcgcccctcctacgccgcccccgtccctctctttcaccaccggcggccggcggctcccgctgccgctgcttcgaggccgtcctcccctaatcacagggaatcccccgccgccaaccccgctcaccgcactcctccagtccgcagctccggcggcgacctcgccgtctcgctgccccgccgggcctcggcccaccgccgagtcacggccacggctgccctgaaaccacagacttcgcctgcgacgagcatccgtcagctccaaagtgccaagggagatggatgataccttagctaccataaggatgaaattgaagaagcggaagaaaggcaaggatagtaatgattttgatgcagtggctgaatgtggacccgaggttccggcattggttcaacaggaaggtgaacgggctgttgttgatataggtgatggtgttgctgatgagaagagcaatttgaatgtcgtgaaactggagggtagtgatgtttctgggaattgtgcacagggtttggatgatttggggttgaaagactccttggcagtgctgtttacaagacctggtcggaagtcacggcaggtctcagaggaggcagaaggcatggaagtttcttgtccgcatgatgaggatggtcttaacaagggatctggtttggctccagacacagcttccaagggcattaaaaggagaaggcgacgcacaaaggaagagatgaagaatgcttctgtgcaggatcagaaagcctcattgcctcggaaagcaaagacaaatggtagcaagtctactaaactctataaggtcggtgctggtcctgggcaagctttgggaggattgtcttctgtttctcctcaactggaaaagtctgggaaagagaatgctgtagatgatggatcattttaccaatcattaggtgaagtgcttctacaagatgtggaagccagcaaagtactgaaggatggatcaattacctctttcaatggggtcactgatcactttgaaatctcagcttgggcaagcaatcaccctgggctggaatctcgttcaggaaatcttgatgaaaaaacacctcgcacagcagaacatacgaccaatcttggtgtttctgatgcacacacacgttcccaaacgctagggaaggaaagcagtgatgatgttgattgttctcaaggcaagtcaccaacatcaaccataaaaaggaaaattggtctaaaaccaaaacaggttcctgggaaatctgttcgacgaaaagaggaagtattatctgttgacgctgataataaaccaactgatacaacagaaattattgaagcaagtactactccggttattgaggaaaatttggatcagctgcctgttatggcccccaaggattcttgttcttcacatgacattgttggaaatagtcctatgtgtctaggtgcagacatggcagcacctgtgaaatatgtggatatagttgatgttgcaacaccattggattatgaagacaaggagaacacatcaaaggtgaaacgtgttacacgaggttccaaaaaacgcaaacatggtgacatggcatatgagggtgatgttgactgggaaactctaatgcaagagcaggggctgttctcaaacccctcagcaggttttccagatcagtcaataaaaacaaaaaataaaattaaaacttcagaagtttatgagggtggaggtgatactggtgttgctgcagtacgtgctggcctaaaggcaaagactattacaccgattgagaagataaagttcaaggaggttttgaagcgaaagggtggccttcaggagtacctagagtgcagaaatatgatactaagtcgctggagcaaggatgtcaagcatttattggatcttgcagactgtggtgtttcagacgttccgttgaaagatgagttgccacatcaagcacttactcgtgctgtgtttttattcttagaccaatatgcatatgcatctgtagaggcagagataagtgtgcctcgtgagcttccaaagataccgtcgttccaatcttttgtgatgcgtgatcaccatttggacgaatctgatgcaagaaaaagaacattgaaggatgattttgggagacttgagtgcatatcagaaaatgattccaagaatggcgaagttaaggatttgcctgaaaacaccaagtacgctgatggtgatagcttgaaaatgtctcatgataattttactcagcagagccactcaaatgagacagcttgcctagcaaacgctcaggatcattcaacagatactgttgttgtagacggtcggtttacaagggcatgggtggatactgatacaatctgcattgatggtgtcaaggatcctctagccattgagaggtggcaggcacaggcgatggaggctgataaagaattctacagtcggatacgcatacctgatgaagatgattcaagtagtcagaagcacacatgccgtagttctgcttcacagggtgccgatagcaaacctgcatctgagcggcaatcaagaggtgtggagcatataaaacagggtctcgtgaactttatagcctcgctgctgatgccattatatagaggaaaaaagatcgaccgagaggggtacaaaacaatcatgcgcaaatctgttaacaagatcattgatacatgctcagaaggagagaaatcaatgactactcttgagtttcttgatgataaaaggaaaattaagattgaatcctttgtgggcaaaatggttgacaagcatttgcatgttgttagcaagtcggccaaaccttaagattcatatgtgtagtgaggtgttctctgcaaagagatctactctcttttaaaacacctatgaatcagtgattgttgatccaagtgaactaaaatctcacttcagaagccagcatgactcatcagtgttgccgcaagatcaacaagaacacatattacccagactatatgcgtggtccagaagagcattgaccagatcaataccatgtaattctgtacttatataggcatcatttccatcttcgtagctatagctcagtcaaaggtttagacctctgtgcactcgacaagcatgttgggcatgcagtaagcttggatgccaagttaagtttctgtggcttgatgaagtggcgtatgaagatccgggattcagtgtggtctcatatgcaatgagggtttttatgtctttcatggcggtagttcagtctagcctagcggattaatcctgttcattgttcagagttaactttaccaaagtagatcctcctctctctttgttgtacagttttgcagtttctaacaagcgtttaacttatagaaaggctggagtttggcagagatttgcagcccgttgtatatccttggctgcttataatgagcctcattgatgattctcgaatgcggaatgattgccccgaagttcctcagttgatttctctccatacgttataattgtatgatatgattgatt

SEQ ID NO: 2142 - DNA, 2214 bp, Zea Mays
gtttattgtacccaataggtttcatttggaatttagcttttaccaaagtgcgtgagatgccaaatgtattaattcttcctcgaagtgcagactacagtgaagaagtgtggatggagatcagagagaaagcaatcgcaatattgcagtcctttctctatgatggtgttgttccaaacaatgttatttctgatgaagatgaagagataagcgaaatgggatgtgacgatgatcaacttgataaacaaggaaaagaacatcctttacagatttgtgatggtgaacagcaaacagaagaaagccaattgactgcagaatatgacaagagaagagccatttcacaacctgaagagcctcaagcttctgcacaatctcaaagcattggctccagatctgaagggaggcgcagccgatctggaaagaaagggaaaaagagacctgctcgccgtagatcacaacagaaaatggatgaattgtcaactgtagaaggtggaagtaactattcttcacgcagagacgatgataaccaagtgttaagttctagttcacgatttgcatcgcctgaggactcaaaaaataaacagaagtcttctgttgagtctccaatggagataatttctgaaaataagttgcctgtagggcttggtagaaggcctcctgaaaagctaaaagaaggttttgttattgctctaaagacaagagacaattcaggtttttatgtttcaagagagagggtcactggcggtggatggtatcttgatgtgataccaaatgccacaaagagggatcctgctgctcagtttttagtcactttcagaaacaaggacactatgggattgcgatcttttgttgctggaggcaaactattacaggctaataataagatggagttcgtcttcgcaagtcattcttttgatgtttgtgagagctggatgctggaagggtgcctttcagaatactgcaaacttgttaatcgcaaaaatgctatggctgtacttggggtctatattgaggtccttggagctccgagtgaagatggtgtcgttcggtggcttgattaatacatcaaggctatgctatatttagagaacattttaaggctatgttgtttctatagaacaatttaggcttatgctgccaactgctatcctcgggttaggtcttctctgagtctctcttgccaagtctcagttttggctgttctactgcatctgcatggacatggactcgcaacgcagtcttttttagtttgtttgtttttttactgtctgtttgttgtaagctgtgtctattgtattttaattatacagtgtgacaagcaatcgctattatagtattctctattcaaaattcagtacttgtgtattactcagctaatttatattttctttttactgaaaggtaggatcgatacccccaacgaatattacatgatcagtagcaaggtgcgcaagattttcagtctcatgtccagccggtcatttcttcttctgctttgccttctgcttctcaatctcttcctgccacagcacgggccagttggcccgggcctcgtcgatgccgagcagcgacccttccttgtcggggtcccagctagccgacagcgtgccgtaggcgatacccagcgccgacgtgccgaaggcgacgaggatggtcagcaatggcacccacgatggcaccaccaccccctggccgcgcttgagcgcgtcgtacacgttgagcagcgcgacgcccgacgccatgggaaggcccaccgtgaacgcgatccggcgcaggatgcggtcgaacacgggctgcggaagctcgtcgtcgtcgtcaacctcgccgttgctgccgccgccgtcttgcttcgccagggacgcttcttccatccccaggagctgctgctgccgttcctgcacgtcctgctgccgccgccgctcctgttgcttctccttccgggtggtcttcttggacggcgtctcgccggagctgaagctgctgtccgtggccgccgagcggatggctggggcgcgccgtcgtttagagagcggtgagaggcggctgtgtgtggagttgagagcccatgggcggtggggtggttttgcggtcggggtagccgcttggtggagtaaggcggccatggctatcctccgcgtggcttcaccgtcggaaacgacgacgagctctcacgcgcggtatggtgttttagtgcgtggtttcgccgatgataaatgg

SEQ ID NO: 2143 - DNA, 5166 bp, Zea Mays
actttgctctgttatagagtagtaaaaacttcacctttggatcatttacctcactctctacaactacaagtctacaaggtaatgctcatgtaaaaaattctctttgaagggcttaacgaagagttttacagggataggcatgcaaatcctaaagctatatccgcttaaaaaaatctaggaatccgtaaacagtgtacaggtcaaaacaaaagaaagaaaaaaaactgcacacgacgtcaatcactctcactgcctctttccaccctgctgtagactgccctttctaccgttatatacccagcacaggatgtcgcgaccgatcggtttcccgagctgcagaggaattcttgcgtggatgctcgtctcttgcctagttgtttgtttcttgcagaggaattttttcctgaacttgtccccgccgtcttgaaggtttcttgtttgggagcagggcggaggcgctcctttccttcttggccgacgatggtatggactgggcagcggcgcgcgcgagcgatttttgcggcaaaccccctgcgagaaacatcgtccgcagaacacctcactttcactttttgtactcttccgtctctgccctcgcgttattgcctcgtctcgctcgcctggctggctcgtgccttgccttgctcagcgtacgcgaacgcagcgagaaggaggagcaaggaaatagagagagagagaaaaaaaaatcaagtcatccccctttcctctaagctcgttccatggagaactcttctcacaagcggacgcgggaggcggccgacctcgccgccggaggctgtggagaggagggctcgccgcaggccgacgccaagaggctgcggccgcaggacctgctcgacatgctggaggacgacaccgacacggccgcggtcggcgacctaccgtcggtcatgcggagcctgtaggaggagatagctagcttcgacgaggccgcggagacgccggcgccgacatcggggcagcagccagagctgggcttcctactcgaggcctcggacgatgagctggggttgccgccgacgggcgccgcctcctcttcgtcggaggaggctgggcgcgcgggggcaccggagcccgcgctcgacggccagatctggggcttggagggcggaggtgctcctttccttcttggccggcggcggcatggactgggcagcggctttcgggtctccgtcgtggagcgcggtggcgacggaccctggcccgaccatgctgtccttcgcaggcccgtcctcctccgccaccgacgccgaggtgcgactccaggatttcaccgtgggtcgcatggaagcggaggcgacggtcgcgagcatcacgcacggatgggggcaggcgatagcacggcatgcagacgcccaagtccagcaatgctggggcatcacgagcgggcgggggtaccgcggcgtgcgtcacggggacggggcgggcgcacgggcgggcatcgcgatgacgggtgcgggagcaggcgggggcacgcgaatcacgggagtggagccacggtggtggtggacgccctcgttagtgtcttatagagtagtagagatagagattgtaggcgtccacaattcccagtggcgcacggttctgctgtccctccatcctcccgcgctccctccgtgctacatcaacgcccgcaggttctgcctctccctgtcactacgccgcctgcccccgccgcacccctccccgttactaggtgcggcgccgcgccgcgccgcctcctcggcctcgcctccgcgctcgccgacgactcgtcctgctccgacctcctcccgctgttcccagtccccgccggctacgccgcctctgacgccgcggatccccgatgccgagagctgcccgtcgcccgctgccgtcagcagcgtcttcagtaagttccgcgacccggcgccatctcctgtgacccctgacgacgctgcggcggcgcctgacgagcccagggatcttggcttcgacgatgacgacagtttcgacgccgattctattctgtgcggcgtccaccagagcgcggccgagggcatcgatggcatcatggcttctggcaggatcagaatatcatcatcaatcaagcgctgaagcggcatagtgtcgatcctgaatggtggatgtgccctgccatacctgtgaaagacattaccccggcaccaccgccttcagtggcaatggcgaaggaagactaagaagaagtcactggggacaatatacgaggaggggactcctgagcctgccaatggcgacgacgatggagctttggcactgccagagacaggattggggcttagcttgaatactgatggggtgctcaaggcgtggtgtggcagaggctctgcgtttgctgatggcaatgggcctgacttgccattgtcccctgctcatgtggtagtaagtatttccagcttatctaaagatataaaagatcttacatttccagttaaaaattaaagatggctagagctcttggaaccctgagtagtacctgctattagttcatatcgtctggtaagtagaatctatttcacttcagtagaagtacagatcgtctgttgttttatatcagcagtgatcagaaaaatcttggcatgcattgctttgtttcagtcccttcgcatttcttgtcaatggaagatttctcccagaagaaaatctgtgtctgaaatttgctaatatgaaatagtacagtatgcccaccagtacttgactttactggctcaatgggccaggcagaaggaaattccaattggttgttttctttgagttgaatcattataacaaacttagccctcattatgttgtatctgcagtttttgaattcaattgaagtaaaaggaaatatcatagtttggtcctttcgcgaattttttttgtccaattttttgtccttgtaggtttttccgttgcattagaaaacactgtaggctgcttccttgcgttgcctctccgtttgcaggaacaagagaccagtttttatgtcatagacatgaactactttcctggtatgtggctgctttcttgcgttgtctctccgtttgcagggaagggtgctcccagcccccgtcatgccccttggcccctcccaaccctcgtcgtcataacggagggtgctgcgacaagccagcggatgagcgtggcgatcccgctggagcagtccatcacgccggtgctttaggactttatgaatctcaacatatgctatctaccagtgtattactgtggagcctcgtcgtcgactcccacgtccatgagaccacctaggagttgctcgtgtacagctagctctaccaattcgagggatacataagtgggagtactgagggaggtgccgggggagaaaatttttctcagtttggtgctgatttatcaagacgaatgacttattgccacagagctaaggatgacagtgtgagtatttttgctgttcaatgtaactcagttctgttatttttttgactgttgttgatgcatttctgtctagactggactgcagagagaaagttggggcagatttccggcttcaatttatgtccttatcagcactacaacagcaacgacgagcacagtagcaaagcagtccgagccttgtggaggagagcctccacaagaagtgcctcgacgggttccctacctccgccgccggtatcgtgtcattgatgggccacttcatcgctatctagcacaagttcttccgagacgtcaagcgtgtgcgagaacaaggagctatagatgatcgtgacactttcctccatgcagtgcgagatctcctatgttttcactcaaatgtccaaggaagctgtgtttgctgtggaatttcaaggaagctgtgtttggtgtggagaaggagattgagataaccagattggaaggctgtaacacctgcgacggaagtggtgccaagccaggtacaaaggcaacggcatgtaaaacttgtggaggtcagggccaggtagtctcctccacaagaacactgcttggaatattccagcaagtctccacctgcaatacttgtggtggcatcggtgaattctccactccttgcaacacctgtgggggtgatggctgggtgcgaaggacaaagaggatcagcctaaaggttcctgctggagtggattctggaagcatgctgagggtctggtctgagggtaatgctggcaggagaggaggccctcctgggacctttatgtcttcattgatgttctctctgatcctattcttaagcgagatgggacaaacattctctacacatgcaaggtttcttacattgatgcaatccttgggaccaccgtcaaaatccccactgttgacggaacagttgaccttaagataccctcagggactcagccaggcacagctctggtgatgtccaagaaaggtgtcccgcttctcgagaagtcaaatgcccgtggagaccagctggtgtgtgtccaggttgatattctgaagcgtctgagcagcgacgagaagaagctaattgaggagcttgcaaacctgaacaaggctcaaacaaccaatagcaggagatgattgtcacacaaggcttcgtaggacaacgtgcttgtgtggtaggcaattttgatgcaaactgcagtgatgattggatggaaagagttggtagtgataaactcttctacgaactacatacagcaaggggtacactggagcaaaaatgtgtcgttccacatctgtaacctcgtttttaagctattaaagttgagtcagtgaactggacgtttttgcaatagcttagcatatgcactaggcaactttattagcctttttttgttgttatacgacttttgtattcttgaaagccttaggcaaaatatctgatggtggaatcaggtttagacttgacatttctttcacaaatgctgcaccatgcattcatggaatctgtaagctgtaccatggaaatgttaactgtagttttattgtttgtgatgcatttggggtttattggtttgctcttcaaatacgttatgcagacactacgtttttttctcccttcggcagctgttgatttgaagctgcctctcgtagagcaggtgcgttttgctctaggctactgttaatatgaagctgtgtcatgtgtgtccactggacatgacactggataggataagctatattcaattaaatttgtagtataac

SEQ ID NO: 2144 - DNA, 3962 bp, Zea Mays
tttgctctgttatagagtagtaaaaacttcacctttggatcatttacctcactctctacaactacaagtctacaaggtaatgctcatgtaaaaaattctctttgaagggcttaacgaagagttttacagggataggcatgcaaatcctaaagctatatccgcttaaaaaaatctaggaatccgtaaacagtgtacaggtcaaaacaaaagaaagaaaaaaaactgcacacgacgtcaatcactctcactgcctctttccaccctgctgtagactgccctttctaccgttatatacccagcacaggatgtcgcgaccgatcggtttcccgagctgcagaggaattcttgcgtggatgctcgtctcttgcctagttgtttgtttcttgcagaggaattttttcctgaacttgtccccgccgtcttgaaggtttcttgtttgggagcagggcggaggcgctcctttccttcttggccgacgatggtatggactgggcagcggcgcgcgcgagcgatttttgcggcaaaccccctgcgagaaacatcgtccgcagaacacctcactttcactttttgtactcttccgtctctgccctcgcgttattgcctcgtctcgctcgcctggctggctcgtgccttgccttgctcagcgtacgcgaacgcagcgagaaggaggagcaaggaaatagagagagagagaaaaaaaaatcaagtcatccccctttcctctaagctcgttccatggagaactcttctcacaagcggacgcgggaggcggccgacctcgccgccggaggctgtggagaggagggctcgccgcaggccgacgccaagaggctgcggccgcaggacctgctcgacatgctggaggacgacaccgacacggccgcggtcggcgacctaccgtcggtcatgcggagcctgtaggaggagatagctagcttcgacgaggccgcggagacgccggcgccgacatcggggcagcagccagagctgggcttcctactcgaggcctcggacgatgagctggggttgccgccgacgggcgccgcctcctcttcgtcggaggaggctgggcgcgcgggggcaccggagcccgcgctcgacggccagatctggggcttggagggcggaggtgctcctttccttcttggccggcggcggcatggactgggcagcggctttcgggtctccgtcgtggagcgcggtggcgacggaccctggcccgaccatgctgtccttcgcaggcccgtcctcctccgccaccgacgccgaggtgcgactccaggatttcaccgtgggtcgcatggaagcggaggcgacggtcgcgagcatcacgcacggatgggggcaggcgatagcacggcatgcagacgcccaagtccagcaatgctggggcatcacgagcgggcgggggtaccgcggcgtgcgtcacggggacggggcgggcgcacgggcgggcatcgcgatgacgggtgcgggagcaggcgggggcacgcgaatcacgggagtggagccacggtggtggtggacgccctcgttagtgtcttatagagtagtagagatagagattgtaggcgtccacaattcccagtggcgcacggttctgctgtccctccatcctcccgcgctccctccgtgctacatcaacgcccgcaggttctgcctctccctgtcactacgccgcctgcccccgccgcacccctccccgttactaggtgcggcgccgcgccgcgccgcctcctcggcctcgcctccgcgctcgccgacgactcgtcctgctccgacctcctcccgctgttcccagtccccgccggctacgccgcctctgacgccgcggatccccgatgccgagagctgcccgtcgcccgctgccgtcagcagcgtcttcagtaagttccgcgacccggcgccatctcctgtgacccctgacgacgctgcggcggcgcctgacgagcccagggatcttggcttcgacgatgacgacagtttcgacgccgattctattctgtgcggcgtccaccagagcgcggccgagggcatcgatggcatcatggcttctggcaggatcagaatatcatcatcaatcaagcgctgaagcggcatagtgtcgatcctgaatggtggatgtgccctgccatacctgtgaaagacattaccccggcaccaccgccttcagtggcaatggcgaaggaagactaagaagaagtcactggggacaatatacgaggaggggactcctgagcctgccaatggcgacgacgatggagctttggcactgccagagacaggattggggcttagcttgaatactgatggggtgctcaaggcgtggtgtggcagaggctctgcgtttgctgatggcaatgggcctgacttgccattgtcccctgctcatgtggtagtaagtatttccagcttatctaaagatataaaagatcttacatttccagttaaaaattaaagatggctagagctcttggaaccctgagtagtacctgctattagttcatatcgtctggtaagtagaatctatttcacttcagtagaagtacagatcgtctgttgttttatatcagcagtgatcagaaaaatcttggcatgcattgctttgtttcagtcccttcgcatttcttgtcaatggaagatttctcccagaagaaaatctgtgtctgaaatttgctaatatgaaatagtacagtatgcccaccagtacttgactttactggctcaatgggccaggcagaaggaaattccaattggttgttttctttgagttgaatcattataacaaacttagccctcattatgttgtatctgcagtttttgaattcaattgaagtaaaaggaaatatcatagtttggtcctttcgcgaattttttttgtccaattttttgtccttgtaggtttttccgttgcattagaaaacactgtaggctgcttccttgcgttgcctctccgtttgcaggaacaagagaccagtttttatgtcatagacatgaactactttcctggtatgtggctgctttcttgcgttgtctctccgtttgcagggaagggtgctcccagcccccgtcatgccccttggcccctcccaaccctcgtcgtcataacggagggtgctgcgacaagccagcggatgagcgtggcgatcccgctggagcagtccatcacgccggtgctttaggactttatgaatctcaacatatgctatctaccagtgtattactgtggagcctcgtcgtcgactcccacgtccatgagaccacctaggagttgctcgtgtacagctagctctaccaattcgagggatacataagtgggagtactgagggaggtgccgggggagaaaatttttctcagtttggtgctgatttatcaagacgaatgacttattgccacagagctaaggatgacagtactggactgcagagagaaagttggggcagatttccggcttcaatttatgtccttatcagcactacaacagcaacgacgagcacagtagcaaagcagtccgagccttgtggaggagagcctccacaagaagtgcctcgacgggttccctacctccgccgccggtatcgtgtcattgatgggccacttcatcgctatctagcacaaggtgcaacacccccttccctcgctccttcgctcttcctggctccaatctgatacaccctctacgttagggtatgagtgaccgagtgacacttgatctgtcgactttaaccggggcagtcgacaaagcacgcgcctggatgccctactatatgtattgagtacataggattattagtacacttcctttgcactgtcacagcgatctagatctccacgaactaaatgtggatcctctctcttggcgtgcacaccgatcttttcattcacactgcactcaccgtcatggcatccaccaaggacttctcgttcgtctctgccttcaggtccaacaaatactttt

SEQ ID NO: 2145 - DNA, 3975 bp, Zea Mays
tttgctctgttatagagtagtaaaaacttcacctttggatcatttacctcactctctacaactacaagtctacaaggtaatgctcatgtaaaaaattctctttgaagggcttaacgaagagttttacagggataggcatgcaaatcctaaagctatatccgcttaaaaaaatctaggaatccgtaaacagtgtacaggtcaaaacaaaagaaagaaaaaaaactgcacacgacgtcaatcactctcactgcctctttccaccctgctgtagactgccctttctaccgttatatacccagcacaggatgtcgcgaccgatcggtttcccgagctgcagaggaattcttgcgtggatgctcgtctcttgcctagttgtttgtttcttgcagaggaattttttcctgaacttgtccccgccgtcttgaaggtttcttgtttgggagcagggcggaggcgctcctttccttcttggccgacgatggtatggactgggcagcggcgcgcgcgagcgatttttgcggcaaaccccctgcgagaaacatcgtccgcagaacacctcactttcactttttgtactcttccgtctctgccctcgcgttattgcctcgtctcgctcgcctggctggctcgtgccttgccttgctcagcgtacgcgaacgcagcgagaaggaggagcaaggaaatagagagagagagaaaaaaaaatcaagtcatccccctttcctctaagctcgttccatggagaactcttctcacaagcggacgcgggaggcggccgacctcgccgccggaggctgtggagaggagggctcgccgcaggccgacgccaagaggctgcggccgcaggacctgctcgacatgctggaggacgacaccgacacggccgcggtcggcgacctaccgtcggtcatgcggagcctgtaggaggagatagctagcttcgacgaggccgcggagacgccggcgccgacatcggggcagcagccagagctgggcttcctactcgaggcctcggacgatgagctggggttgccgccgacgggcgccgcctcctcttcgtcggaggaggctgggcgcgcgggggcaccggagcccgcgctcgacggccagatctggggcttggagggcggaggtgctcctttccttcttggccggcggcggcatggactgggcagcggctttcgggtctccgtcgtggagcgcggtggcgacggaccctggcccgaccatgctgtccttcgcaggcccgtcctcctccgccaccgacgccgaggtgcgactccaggatttcaccgtgggtcgcatggaagcggaggcgacggtcgcgagcatcacgcacggatgggggcaggcgatagcacggcatgcagacgcccaagtccagcaatgctggggcatcacgagcgggcgggggtaccgcggcgtgcgtcacggggacggggcgggcgcacgggcgggcatcgcgatgacgggtgcgggagcaggcgggggcacgcgaatcacgggagtggagccacggtggtggtggacgccctcgttagtgtcttatagagtagtagagatagagattgtaggcgtccacaattcccagtggcgcacggttctgctgtccctccatcctcccgcgctccctccgtgctacatcaacgcccgcaggttctgcctctccctgtcactacgccgcctgcccccgccgcacccctccccgttactaggtgcggcgccgcgccgcgccgcctcctcggcctcgcctccgcgctcgccgacgactcgtcctgctccgacctcctcccgctgttcccagtccccgccggctacgccgcctctgacgccgcggatccccgatgccgagagctgcccgtcgcccgctgccgtcagcagcgtcttcagtaagttccgcgacccggcgccatctcctgtgacccctgacgacgctgcggcggcgcctgacgagcccagggatcttggcttcgacgatgacgacagtttcgacgccgattctattctgtgcggcgtccaccagagcgcggccgagggcatcgatggcatcatgggtaagctctctatggaaaacaacggggcgtccggatcaggctcaagcgttgactccaacatgcccgaatccaagatgcacccctacctcaggaaccttatggtgctcgggctcagcttctggcaggatcagaatatcatcatcaatcaagcgctgaagcggcatagtgtcgatcctgaatggtggatgtgccctgccatacctgtgaaagacattaccccggcaccaccgccttcagtggcaatggcgaaggaagactaagaagaagtcactggggacaatatacgaggaggggactcctgagcctgccaatggcgacgacgatggagctttggcactgccagagacaggattggggcttagcttgaatactgatggggtgctcaaggcgtggtgtggcagaggctctgcgtttgctgatggcaatgggcctgacttgccattgtcccctgctcatgtggtagtaagtatttccagcttatctaaagatataaaagatcttacatttccagttaaaaattaaagatggctagagctcttggaaccctgagtagtacctgctattagttcatatcgtctggtaagtagaatctatttcacttcagtagaagtacagatcgtctgttgttttatatcagcagtgatcagaaaaatcttggcatgcattgctttgtttcagtcccttcgcatttcttgtcaatggaagatttctcccagaagaaaatctgtgtctgaaatttgctaatatgaaatagtacagtatgcccaccagtacttgactttactggctcaatgggccaggcagaaggaaattccaattggttgttttctttgagttgaatcattataacaaacttagccctcattatgttgtatctgcagtttttgaattcaattgaagtaaaaggaaatatcatagtttggtcctttcgcgaattttttttgtccaattttttgtccttgtaggtttttccgttgcattagaaaacactgtaggctgcttccttgcgttgcctctccgtttgcaggaacaagagaccagtttttatgtcatagacatgaactactttcctggtatgtggctgctttcttgcgttgtctctccgtttgcagggaagggtgctcccagcccccgtcatgccccttggcccctcccaaccctcgtcgtcataacggagggtgctgcgacaagccagcggatgagcgtggcgatcccgctggagcagtccatcacgccggtgctttaggactttatgaatctcaacatatgctatctaccagtgtattactgtggagtactgagggaggtgccgggggagaaaatttttctcagtttggtgctgatttatcaagacgaatgacttattgccacagagctaaggatgacagtagagaaagttggggcagatttccggcttcaatttatgtccttatcagcactacaacagcaacgacgagcacagtagcaaagcagtccgagccttgtggaggagagcctccacaagaagtgcctcgacgggttccctacctccgccgccggtatcgtgtcattgatgggccacttcatcgctatctagcacaaggtgcaacacccccttccctcgctccttcgctcttcctggctccaatctgatacaccctctacgttagggtatgagtgaccgagtgacacttgatctgtcgactttaaccggggcagtcgacaaagcacgcgcctggatgccctactatatgtattgagtacataggattattagtacacttcctttgcactgtcacagcgatctagatctccacgaactaaatgtggatcctctctcttggcgtgcacaccgatcttttcattcacactgcactcaccgtcatggcatccaccaaggacttctcgttcgtctctgccttcaggtccaacaaatactttt

SEQ ID NO: 2146 - DNA, 4806 bp, Zea Mays
tttgctctgttatagagtagtaaaaacttcacctttggatcatttacctcactctctacaactacaagtctacaaggtaatgctcatgtaaaaaattctctttgaagggcttaacgaagagttttacagggataggcatgcaaatcctaaagctatatccgcttaaaaaaatctaggaatccgtaaacagtgtacaggtcaaaacaaaagaaagaaaaaaaactgcacacgacgtcaatcactctcactgcctctttccaccctgctgtagactgccctttctaccgttatatacccagcacaggatgtcgcgaccgatcggtttcccgagctgcagaggaattcttgcgtggatgctcgtctcttgcctagttgtttgtttcttgcagaggaattttttcctgaacttgtccccgccgtcttgaaggtttcttgtttgggagcagggcggaggcgctcctttccttcttggccgacgatggtatggactgggcagcggcgcgcgcgagcgatttttgcggcaaaccccctgcgagaaacatcgtccgcagaacacctcactttcactttttgtactcttccgtctctgccctcgcgttattgcctcgtctcgctcgcctggctggctcgtgccttgccttgctcagcgtacgcgaacgcagcgagaaggaggagcaaggaaatagagagagagagaaaaaaaaatcaagtcatccccctttcctctaagctcgttccatggagaactcttctcacaagcggacgcgggaggcggccgacctcgccgccggaggctgtggagaggagggctcgccgcaggccgacgccaagaggctgcggccgcaggacctgctcgacatgctggaggacgacaccgacacggccgcggtcggcgacctaccgtcggtcatgcggagcctgtaggaggagatagctagcttcgacgaggccgcggagacgccggcgccgacatcggggcagcagccagagctgggcttcctactcgaggcctcggacgatgagctggggttgccgccgacgggcgccgcctcctcttcgtcggaggaggctgggcgcgcgggggcaccggagcccgcgctcgacggccagatctggggcttggagggcggaggtgctcctttccttcttggccggcggcggcatggactgggcagcggctttcgggtctccgtcgtggagcgcggtggcgacggaccctggcccgaccatgctgtccttcgcaggcccgtcctcctccgccaccgacgccgaggtgcgactccaggatttcaccgtgggtcgcatggaagcggaggcgacggtcgcgagcatcacgcacggatgggggcaggcgatagcacggcatgcagacgcccaagtccagcaatgctggggcatcacgagcgggcgggggtaccgcggcgtgcgtcacggggacggggcgggcgcacgggcgggcatcgcgatgacgggtgcgggagcaggcgggggcacgcgaatcacgggagtggagccacggtggtggtggacgccctcgttagtgtcttatagagtagtagagatagagattgtaggcgtccacaattcccagtggcgcacggttctgctgtccctccatcctcccgcgctccctccgtgctacatcaacgcccgcaggttctgcctctccctgtcactacgccgcctgcccccgccgcacccctccccgttactaggtgcggcgccgcgccgcgccgcctcctcggcctcgcctccgcgctcgccgacgactcgtcctgctccgacctcctcccgctgttcccagtccccgccggctacgccgcctctgacgccgcggatccccgatgccgagagctgcccgtcgcccgctgccgtcagcagcgtcttcagtaagttccgcgacccggcgccatctcctgtgacccctgacgacgctgcggcggcgcctgacgagcccagggatcttggcttcgacgatgacgacagtttcgacgccgattctattctgtgcggcgtccaccagagcgcggccgagggcatcgatggcatcatgggatcagaatatcatcatcaatcaagcgctgaagcggcatagtgtcgatcctgaatggtggatgtgccctgccatacctgtgaaagacattaccccggcaccaccgccttcagtggcaatggcgaaggaagactaagaagaagtcactggggacaatatacgaggaggggactcctgagcctgccaatggcgacgacgatggagctttggcactgccagagacaggattggggcttagcttgaatactgatggggtgctcaaggcgtggtgtggcagaggctctgcgtttgctgatggcaatgggcctgacttgccattgtcccctgctcatgtggtagtaagtatttccagcttatctaaagatataaaagatcttacatttccagttaaaaattaaagatggctagagctcttggaaccctgagtagtacctgctattagttcatatcgtctggtaagtagaatctatttcacttcagtagaagtacagatcgtctgttgttttatatcagcagtgatcagaaaaatcttggcatgcattgctttgtttcagtcccttcgcatttcttgtcaatggaagatttctcccagaagaaaatctgtgtctgaaatttgctaatatgaaatagtacagtatgcccaccagtacttgactttactggctcaatgggccaggcagaaggaaattccaattggttgttttctttgagttgaatcattataacaaacttagccctcattatgttgtatctgcagtttttgaattcaattgaagtaaaaggaaatatcatagtttggtcctttcgcgaattttttttgtccaattttttgtccttgtaggtttttccgttgcattagaaaacactgtaggctgcttccttgcgttgcctctccgtttgcaggaacaagagaccagtttttatgtcatagacatgaactactttcctggtatgtggctgctttcttgcgttgtctctccgtttgcagggaagggtgctcccagcccccgtcatgccccttggcccctcccaaccctcgtcgtcataacggagggtgctgcgacaagccagcggatgagcgtggcgatcccgctggagcagtccatcacgccggtgctttaggactttatgaatctcaacatatgctatctaccagtgtattactgtggagcctcgtcgtcgactcccacgtccatgagaccacctaggagttgctcgtgtacagctagctctaccaattcgagggatacataagtgggaggcgtccacaattcccagtggcgcacggttctgccgtctctccgccctcccgcgctgcatcaaccgacaaagctaatttaaccaaacaattacaatagcagattttaaaaaatctatatattaagtaggtgtaggtgactcacacggtttgattatttgctggactctgtaccatggtttgtagtttgtactacatccgatgcaagaaagaataaaattatagttctggaattaaagttcagttttgttctcataatgcagagttctggaattaaagttcaataatacagttctcagccaccatgttacatgtgcctccttcaaaaaggattgtgttattagagttcagtattagagtttagtactggtacctggtactccttttttgtgctactgctctgcttcgcccatcaaaaatatagtagcttgtatgactgcacacctgatgtggtagattaaatcactctacacagccacctgttttcttagctaaatgtgtgtgtggtgcgagcagaaggttcttcggattatcctctcatttttagtattcccagttctctatccggatgactacaaaatcacaggttgaactgttttatatatctttcagtttggacagtcatatttcacattcattggaaacagctaacctgaacgctttcaaggcataaccataaccttttaagtctttgtaattttttctcctccaactgcatttgcatttttaaatacatcacgtgtcccatagtctattagctaggtgctaaggcaaatatgaaagtatgactatttttatatgtgattttagcttttcaatgcagcaactacaacttctttgcaactctattttccatctcatgttttcagtactgagggaggtgccgggggagaaaatttttctcagtttggtgctgatttatcaagacgaatgacttattgccacagagctaaggatgacagtagagaaagttggggcagatttccggcttcaatttatgtccttatcagcactacaacagcaacgacgagcacagtagcaaagcagtccgagccttgtggaggagagcctccacaagaagtgcctcgacgggttccctacctccgccgccggtatcgtgtcattgatgggccacttcatcgctatctagcacaaggtgcaacacccccttccctcgctccttcgctcttcctggctccaatctgatacaccctctacgttagggtatgagtgaccgagtgacacttgatctgtcgactttaaccggggcagtcgacaaagcacgcgcctggatgccctactatatgtattgagtacataggattattagtacacttcctttgcactgtcacagcgatctagatctccacgaactaaatgtggatcctctctcttggcgtgcacaccgatcttttcattcacactgcactcaccgtcatggcatccaccaaggacttctcgttcgtctctgccttcaggtccaacaaatactttt

SEQ ID NO: 2147 - DNA, 4751 bp, Zea Mays
tttgctctgttatagagtagtaaaaacttcacctttggatcatttacctcactctctacaactacaagtctacaaggtaatgctcatgtaaaaaattctctttgaagggcttaacgaagagttttacagggataggcatgcaaatcctaaagctatatccgcttaaaaaaatctaggaatccgtaaacagtgtacaggtcaaaacaaaagaaagaaaaaaaactgcacacgacgtcaatcactctcactgcctctttccaccctgctgtagactgccctttctaccgttatatacccagcacaggatgtcgcgaccgatcggtttcccgagctgcagaggaattcttgcgtggatgctcgtctcttgcctagttgtttgtttcttgcagaggaattttttcctgaacttgtccccgccgtcttgaaggtttcttgtttgggagcagggcggaggcgctcctttccttcttggccgacgatggtatggactgggcagcggcgcgcgcgagcgatttttgcggcaaaccccctgcgagaaacatcgtccgcagaacacctcactttcactttttgtactcttccgtctctgccctcgcgttattgcctcgtctcgctcgcctggctggctcgtgccttgccttgctcagcgtacgcgaacgcagcgagaaggaggagcaaggaaatagagagagagagaaaaaaaaatcaagtcatccccctttcctctaagctcgttccatggagaactcttctcacaagcggacgcgggaggcggccgacctcgccgccggaggctgtggagaggagggctcgccgcaggccgacgccaagaggctgcggccgcaggacctgctcgacatgctggaggacgacaccgacacggccgcggtcggcgacctaccgtcggtcatgcggagcctgtaggaggagatagctagcttcgacgaggccgcggagacgccggcgccgacatcggggcagcagccagagctgggcttcctactcgaggcctcggacgatgagctggggttgccgccgacgggcgccgcctcctcttcgtcggaggaggctgggcgcgcgggggcaccggagcccgcgctcgacggccagatctggggcttggagggcggaggtgctcctttccttcttggccggcggcggcatggactgggcagcggctttcgggtctccgtcgtggagcgcggtggcgacggaccctggcccgaccatgctgtccttcgcaggcccgtcctcctccgccaccgacgccgaggtgcgactccaggatttcaccgtgggtcgcatggaagcggaggcgacggtcgcgagcatcacgcacggatgggggcaggcgatagcacggcatgcagacgcccaagtccagcaatgctggggcatcacgagcgggcgggggtaccgcggcgtgcgtcacggggacggggcgggcgcacgggcgggcatcgcgatgacgggtgcgggagcaggcgggggcacgcgaatcacgggagtggagccacggtggtggtggacgccctcgttagtgtcttatagagtagtagagatagagattgtaggcgtccacaattcccagtggcgcacggttctgctgtccctccatcctcccgcgctccctccgtgctacatcaacgcccgcaggttctgcctctccctgtcactacgccgcctgcccccgccgcacccctccccgttactaggtgcggcgccgcgccgcgccgcctcctcggcctcgcctccgcgctcgccgacgactcgtcctgctccgacctcctcccgctgttcccagtccccgccggctacgccgcctctgacgccgcggatccccgatgccgagagctgcccgtcgcccgctgccgtcagcagcgtcttcagtaagttccgcgacccggcgccatctcctgtgacccctgacgacgctgcggcggcgcctgacgagcccagggatcttggcttcgacgatgacgacagtttcgacgccgattctattctgtgcggcgtccaccagagcgcggccgagggcatcgatggcatcatgggatcagaatatcatcatcaatcaagcgctgaagcggcatagtgtcgatcctgaatggtggatgtgccctgccatacctgtgaaagacattaccccggcaccaccgccttcagtggcaatggcgaaggaagactaagaagaagtcactggggacaatatacgaggaggggactcctgagcctgccaatggcgacgacgatggagctttggcactgccagagacaggattggggcttagcttgaatactgatggggtgctcaaggcgtggtgtggcagaggctctgcgtttgctgatggcaatgggcctgacttgccattgtcccctgctcatgtggtagtaagtatttccagcttatctaaagatataaaagatcttacatttccagttaaaaattaaagatggctagagctcttggaaccctgagtagtacctgctattagttcatatcgtctggtaagtagaatctatttcacttcagtagaagtacagatcgtctgttgttttatatcagcagtgatcagaaaaatcttggcatgcattgctttgtttcagtcccttcgcatttcttgtcaatggaagatttctcccagaagaaaatctgtgtctgaaatttgctaatatgaaatagtacagtatgcccaccagtacttgactttactggctcaatgggccaggcagaaggaaattccaattggttgttttctttgagttgaatcattataacaaacttagccctcattatgttgtatctgcagtttttgaattcaattgaagtaaaaggaaatatcatagtttggtcctttcgcgaattttttttgtccaattttttgtccttgtaggtttttccgttgcattagaaaacactgtaggctgcttccttgcgttgcctctccgtttgcaggaacaagagaccagtttttatgtcatagacatgaactactttcctggtatgtggctgctttcttgcgttgtctctccgtttgcagggaagggtgctcccagcccccgtcatgccccttggcccctcccaaccctcgtcgtcataacggagggtgctgcgacaagccagcggatgagcgtggcgatcccgctggagcagtccatcacgccggtgctttaggactttatgaatctcaacatatgctatctaccagtgtattactgtggagcctcgtcgtcgactcccacgtccatgagaccacctaggagttgctcgtgtacagctagctctaccaattcgagggatacataagtgggaggcgtccacaattcccagtggcgcacggttctgccgtctctccgccctcccgcgctgcatcaaccgacaaagctaatttaaccaaacaattacaatagcagattttaaaaaatctatatattaagtaggtgtaggtgactcacacggtttgattatttgctggactctgtaccatggtttgtagtttgtactacatccgatgcaagaaagaataaaattatagttctggaattaaagttcagttttgttctcataatgcagagttctggaattaaagttcaataatacagttctcagccaccatgttacatgtgcctccttcaaaaaggattgtgttattagagttcagtattagagtttagtactggtacctggtactccttttttgtgctactgctctgcttcgcccatcaaaaatatagtagcttgtatgactgcacacctgatgtggtagattaaatcactctacacagccacctgttttcttagctaaatgtgtgtgtggtgcgagcagaaggttcttcggattatcctctcatttttagtattcccagttctctatccggatgactacaaaatcacaggttgaactgttttatatatctttcagtttggacagtcatatttcacattcattggaaacagctaacctgaacgctttcaaggcataaccataaccttttaagtctttgtaattttttctcctccaactgcatttgcatttttaaatacatcacgtgtcccatagtctattagctaggtgctaaggcaaatatgaaagtatgactatttttatatgtgattttagcttttcaatgcagcaactacaacttctttgcaactctattttccatctcatgttttcagtactgagggaggtgccgggggagaaaatttttctcagtttggtgctgatttatcaagacgaatgacttattgccacagagctaaggatgacagtactggactgcagagagaaagttggggcagatttccggcttcaatttatgtccttatcagcactacaacagcaacgacgagcacagtagcaaagcagtccgagccttgtggaggagagcctccacaagaagtgcctcgacgggttccctacctccgccgccggtatcgtgtcattgatgggccacttcatcgctatctagcacaagggtatgagtgaccgagtgacacttgatctgtcgactttaaccggggcagtcgacaaagcacgcgcctggatgccctactatatgtattgagtacataggattattagtacacttcctttgcactgtcacagcgatctagatctccacgaactaaatgtggatcctctctcttggcgtgcacaccgatcttttcattcacactgcactcaccgtcatggcatccaccaaggacttctcgttcgtctctgccttcaggtccaacaaatactttt

SEQ ID NO: 2148 - DNA, 3950 bp, Zea Mays
tttgctctgttatagagtagtaaaaacttcacctttggatcatttacctcactctctacaactacaagtctacaaggtaatgctcatgtaaaaaattctctttgaagggcttaacgaagagttttacagggataggcatgcaaatcctaaagctatatccgcttaaaaaaatctaggaatccgtaaacagtgtacaggtcaaaacaaaagaaagaaaaaaaactgcacacgacgtcaatcactctcactgcctctttccaccctgctgtagactgccctttctaccgttatatacccagcacaggatgtcgcgaccgatcggtttcccgagctgcagaggaattcttgcgtggatgctcgtctcttgcctagttgtttgtttcttgcagaggaattttttcctgaacttgtccccgccgtcttgaaggtttcttgtttgggagcagggcggaggcgctcctttccttcttggccgacgatggtatggactgggcagcggcgcgcgcgagcgatttttgcggcaaaccccctgcgagaaacatcgtccgcagaacacctcactttcactttttgtactcttccgtctctgccctcgcgttattgcctcgtctcgctcgcctggctggctcgtgccttgccttgctcagcgtacgcgaacgcagcgagaaggaggagcaaggaaatagagagagagagaaaaaaaaatcaagtcatccccctttcctctaagctcgttccatggagaactcttctcacaagcggacgcgggaggcggccgacctcgccgccggaggctgtggagaggagggctcgccgcaggccgacgccaagaggctgcggccgcaggacctgctcgacatgctggaggacgacaccgacacggccgcggtcggcgacctaccgtcggtcatgcggagcctgtaggaggagatagctagcttcgacgaggccgcggagacgccggcgccgacatcggggcagcagccagagctgggcttcctactcgaggcctcggacgatgagctggggttgccgccgacgggcgccgcctcctcttcgtcggaggaggctgggcgcgcgggggcaccggagcccgcgctcgacggccagatctggggcttggagggcggaggtgctcctttccttcttggccggcggcggcatggactgggcagcggctttcgggtctccgtcgtggagcgcggtggcgacggaccctggcccgaccatgctgtccttcgcaggcccgtcctcctccgccaccgacgccgaggtgcgactccaggatttcaccgtgggtcgcatggaagcggaggcgacggtcgcgagcatcacgcacggatgggggcaggcgatagcacggcatgcagacgcccaagtccagcaatgctggggcatcacgagcgggcgggggtaccgcggcgtgcgtcacggggacggggcgggcgcacgggcgggcatcgcgatgacgggtgcgggagcaggcgggggcacgcgaatcacgggagtggagccacggtggtggtggacgccctcgttagtgtcttatagagtagtagagatagagattgtaggcgtccacaattcccagtggcgcacggttctgctgtccctccatcctcccgcgctccctccgtgctacatcaacgcccgcaggttctgcctctccctgtcactacgccgcctgcccccgccgcacccctccccgttactaggtgcggcgccgcgccgcgccgcctcctcggcctcgcctccgcgctcgccgacgactcgtcctgctccgacctcctcccgctgttcccagtccccgccggctacgccgcctctgacgccgcggatccccgatgccgagagctgcccgtcgcccgctgccgtcagcagcgtcttcagtaagttccgcgacccggcgccatctcctgtgacccctgacgacgctgcggcggcgcctgacgagcccagggatcttggcttcgacgatgacgacagtttcgacgccgattctattctgtgcggcgtccaccagagcgcggccgagggcatcgatggcatcatggcttctggcaggatcagaatatcatcatcaatcaagcgctgaagcggcatagtgtcgatcctgaatggtggatgtgccctgccatacctgtgaaagacattaccccggcaccaccgccttcagtggcaatggcgaaggaagactaagaagaagtcactggggacaatatacgaggaggggactcctgagcctgccaatggcgacgacgatggagctttggcactgccagagacaggattggggcttagcttgaatactgatggggtgctcaaggcgtggtgtggcagaggctctgcgtttgctgatggcaatgggcctgacttgccattgtcccctgctcatgtggtagtaagtatttccagcttatctaaagatataaaagatcttacatttccagttaaaaattaaagatggctagagctcttggaaccctgagtagtacctgctattagttcatatcgtctggtaagtagaatctatttcacttcagtagaagtacagatcgtctgttgttttatatcagcagtgatcagaaaaatcttggcatgcattgctttgtttcagtcccttcgcatttcttgtcaatggaagatttctcccagaagaaaatctgtgtctgaaatttgctaatatgaaatagtacagtatgcccaccagtacttgactttactggctcaatgggccaggcagaaggaaattccaattggttgttttctttgagttgaatcattataacaaacttagccctcattatgttgtatctgcagtttttgaattcaattgaagtaaaaggaaatatcatagtttggtcctttcgcgaattttttttgtccaattttttgtccttgtaggtttttccgttgcattagaaaacactgtaggctgcttccttgcgttgcctctccgtttgcaggaacaagagaccagtttttatgtcatagacatgaactactttcctggtatgtggctgctttcttgcgttgtctctccgtttgcagggaagggtgctcccagcccccgtcatgccccttggcccctcccaaccctcgtcgtcataacggagggtgctgcgacaagccagcggatgagcgtggcgatcccgctggagcagtccatcacgccggtgctttaggactttatgaatctcaacatatgctatctaccagtgtattactgtggagcctcgtcgtcgactcccacgtccatgagaccacctaggagttgctcgtgtacagctagctctaccaattcgagggatacataagtgggagtactgagggaggtgccgggggagaaaatttttctcagtttggtgctgatttatcaagacgaatgacttattgccacagagctaaggatgacagtagagaaagttggggcagatttccggcttcaatttatgtccttatcagcactacaacagcaacgacgagcacagtagcaaagcagtccgagccttgtggaggagagcctccacaagaagtgcctcgacgggttccctacctccgccgccggtatcgtgtcattgatgggccacttcatcgctatctagcacaaggtgcaacacccccttccctcgctccttcgctcttcctggctccaatctgatacaccctctacgttagggtatgagtgaccgagtgacacttgatctgtcgactttaaccggggcagtcgacaaagcacgcgcctggatgccctactatatgtattgagtacataggattattagtacacttcctttgcactgtcacagcgatctagatctccacgaactaaatgtggatcctctctcttggcgtgcacaccgatcttttcattcacactgcactcaccgtcatggcatccaccaaggacttctcgttcgtctctgccttcaggtccaacaaatactttt

SEQ ID NO: 2149 - DNA, 5304 bp, Zea Mays
tttgctctgttatagagtagtaaaaacttcacctttggatcatttacctcactctctacaactacaagtctacaaggtaatgctcatgtaaaaaattctctttgaagggcttaacgaagagttttacagggataggcatgcaaatcctaaagctatatccgcttaaaaaaatctaggaatccgtaaacagtgtacaggtcaaaacaaaagaaagaaaaaaaactgcacacgacgtcaatcactctcactgcctctttccaccctgctgtagactgccctttctaccgttatatacccagcacaggatgtcgcgaccgatcggtttcccgagctgcagaggaattcttgcgtggatgctcgtctcttgcctagttgtttgtttcttgcagaggaattttttcctgaacttgtccccgccgtcttgaaggtttcttgtttgggagcagggcggaggcgctcctttccttcttggccgacgatggtatggactgggcagcggcgcgcgcgagcgatttttgcggcaaaccccctgcgagaaacatcgtccgcagaacacctcactttcactttttgtactcttccgtctctgccctcgcgttattgcctcgtctcgctcgcctggctggctcgtgccttgccttgctcagcgtacgcgaacgcagcgagaaggaggagcaaggaaatagagagagagagaaaaaaaaatcaagtcatccccctttcctctaagctcgttccatggagaactcttctcacaagcggacgcgggaggcggccgacctcgccgccggaggctgtggagaggagggctcgccgcaggccgacgccaagaggctgcggccgcaggacctgctcgacatgctggaggacgacaccgacacggccgcggtcggcgacctaccgtcggtcatgcggagcctgtaggaggagatagctagcttcgacgaggccgcggagacgccggcgccgacatcggggcagcagccagagctgggcttcctactcgaggcctcggacgatgagctggggttgccgccgacgggcgccgcctcctcttcgtcggaggaggctgggcgcgcgggggcaccggagcccgcgctcgacggccagatctggggcttggagggcggaggtgctcctttccttcttggccggcggcggcatggactgggcagcggctttcgggtctccgtcgtggagcgcggtggcgacggaccctggcccgaccatgctgtccttcgcaggcccgtcctcctccgccaccgacgccgaggtgcgactccaggatttcaccgtgggtcgcatggaagcggaggcgacggtcgcgagcatcacgcacggatgggggcaggcgatagcacggcatgcagacgcccaagtccagcaatgctggggcatcacgagcgggcgggggtaccgcggcgtgcgtcacggggacggggcgggcgcacgggcgggcatcgcgatgacgggtgcgggagcaggcgggggcacgcgaatcacgggagtggagccacggtggtggtggacgccctcgttagtgtcttatagagtagtagagatagagattgtaggcgtccacaattcccagtggcgcacggttctgctgtccctccatcctcccgcgctccctccgtgctacatcaacgcccgcaggttctgcctctccctgtcactacgccgcctgcccccgccgcacccctccccgttactaggtgcggcgccgcgccgcgccgcctcctcggcctcgcctccgcgctcgccgacgactcgtcctgctccgacctcctcccgctgttcccagtccccgccggctacgccgcctctgacgccgcggatccccgatgccgagagctgcccgtcgcccgctgccgtcagcagcgtcttcagtaagttccgcgacccggcgccatctcctgtgacccctgacgacgctgcggcggcgcctgacgagcccagggatcttggcttcgacgatgacgacagtttcgacgccgattctattctgtgcggcgtccaccagagcgcggccgagggcatcgatggcatcatgggtaagctctctatggaaaacaacggggcgtccggatcaggctcaagcgttgactccaacatgcccgaatccaagatgcacccctacctcaggaaccttatggtgctcgggctcagcttctggcaggatcagaatatcatcatcaatcaagcgctgaagcggcatagtgtcgatcctgaatggtggatgtgccctgccatacctgtgaaagacattaccccggcaccaccgccttcagtggcaatggcgaaggaagactaagaagaagtcactggggacaatatacgaggaggggactcctgagcctgccaatggcgacgacgatggagctttggcactgccagagacaggattggggcttagcttgaatactgatggggtgctcaaggcgtggtgtggcagaggctctgcgtttgctgatggcaatgggcctgacttgccattgtcccctgctcatgtggtagtaagtatttccagcttatctaaagatataaaagatcttacatttccagttaaaaattaaagatggctagagctcttggaaccctgagtagtacctgctattagttcatatcgtctggtaagtagaatctatttcacttcagtagaagtacagatcgtctgttgttttatatcagcagtgatcagaaaaatcttggcatgcattgctttgtttcagtcccttcgcatttcttgtcaatggaagatttctcccagaagaaaatctgtgtctgaaatttgctaatatgaaatagtacagtatgcccaccagtacttgactttactggctcaatgggccaggcagaaggaaattccaattggttgttttctttgagttgaatcattataacaaacttagccctcattatgttgtatctgcagtttttgaattcaattgaagtaaaaggaaatatcatagtttggtcctttcgcgaattttttttgtccaattttttgtccttgtaggtttttccgttgcattagaaaacactgtaggctgcttccttgcgttgcctctccgtttgcaggaacaagagaccagtttttatgtcatagacatgaactactttcctggtatgtggctgctttcttgcgttgtctctccgtttgcagggaagggtgctcccagcccccgtcatgccccttggcccctcccaaccctcgtcgtcataacggaggtatattctgccctgaataaaatgatttctgctgtattgtacttacacgtgtttttataaggatgtaaggagggcccaaaacctcgccccaaatcgacgcagacctaccatcgacgcgcatttgggtgttcgcttaatcgtcctatttaaatcagcagggtgctgcgacaagccagcggatgagcgtggcgatcccgctggagcagtccatcacgccggtgctttaggactttatgaatctcaacatatgctatctaccagtgtattactgtggagtactgagggaggtgccgggggagaaaatttttctcagtttggtgctgatttatcaagacgaatgacttattgccacagagctaaggatgacagtactggactgcagagagaaagttggggcagatttccggcttcaatttatgtccttatcagcactacaacagcaacgacgagcacagtagcaaagcagtccgagccttgtggaggagagcctccacaagaagtgcctcgacgggttccctacctccgccgccggtatcgtgtcattgatgggccacttcatcgctatctagcacaagtgatgttgaaggctgccctttgtgctcaagttcttccgagacgtcaagcgtgtgcgagaacaaggagctatagatgatcgtgacactttcctccatgcagtgcgagatctcctatgttttcactcaaatgtccaaggaagctgtgtttgctgtggaatttcaaggaagctgtgtttggtgtggagaaggagattgagataaccagattggaaggctgtaacacctgcgacggaagtggtgccaagccaggtacaaaggcaacggcatgtaaaacttgtggaggtcagggccaggtagtctcctccacaagaacactgcttggaatattccagcaagtctccacctgcaatacttgtggtggcatcggtgaattctccactccttgcaacacctgtgggggtgatggctgggtgcgaaggacaaagaggatcagcctaaaggttcctgctggagtggattctggaagcatgctgagggtctggtctgagggtaatgctggcaggagaggaggccctcctgggacctttatgtcttcattgatgttctctctgatcctattcttaagcgagatgggacaaacattctctacacatgcaaggtttcttacattgatgcaatccttgggaccaccgtcaaaatccccactgttgacggaacagttgaccttaagataccctcagggactcagccaggcacagctctggtgatgtccaagaaaggtgtcccgcttctcgagaagtcaaatgcccgtggagaccagctggtgtgtgtccaggttgatattctgaagcgtctgagcagcgacgagaagaagctaattgaggagcttgcaaacctgaacaaggctcaaacaaccaatagcaggagatgattgtcacacaaggcttcgtaggacaacgtgcttgtgtggtaggcaattttgatgcaaactgcagtgatgattggatggaaagagttggtagtgataaactcttctacgaactacatacagcaaggggtacactggagcaaaaatgtgtcgttccacatctgtaacctcgtttttaagctattaaagttgagtcagtgaactggacgtttttgcaatagcttagcatatgcactaggcaactttattagcctttttttgttgttatacgacttttgtattcttgaaagccttaggcaaaatatctgatggtggaatcaggtttagacttgacatttctttcacaaatgctgcaccatgcattcatggaatctgtaagctgtaccatggaaatgttaactgtagttttattgtttgtgatgcatttggggtttattggtttgctcttcaaatacgttatgcagacactacgtttttttctcccttcggcagctgttgatttgaagctgcctctcgtagagcaggtgcgttttgctctaggctactgttaatatgaagctgtgtcatgtgtgtccactggacatgacactggataggataagctatattcaattaaatttgtagtataac

SEQ ID NO: 2150 - DNA, 5349 bp, Zea Mays
tttgctctgttatagagtagtaaaaacttcacctttggatcatttacctcactctctacaactacaagtctacaaggtaatgctcatgtaaaaaattctctttgaagggcttaacgaagagttttacagggataggcatgcaaatcctaaagctatatccgcttaaaaaaatctaggaatccgtaaacagtgtacaggtcaaaacaaaagaaagaaaaaaaactgcacacgacgtcaatcactctcactgcctctttccaccctgctgtagactgccctttctaccgttatatacccagcacaggatgtcgcgaccgatcggtttcccgagctgcagaggaattcttgcgtggatgctcgtctcttgcctagttgtttgtttcttgcagaggaattttttcctgaacttgtccccgccgtcttgaaggtttcttgtttgggagcagggcggaggcgctcctttccttcttggccgacgatggtatggactgggcagcggcgcgcgcgagcgatttttgcggcaaaccccctgcgagaaacatcgtccgcagaacacctcactttcactttttgtactcttccgtctctgccctcgcgttattgcctcgtctcgctcgcctggctggctcgtgccttgccttgctcagcgtacgcgaacgcagcgagaaggaggagcaaggaaatagagagagagagaaaaaaaaatcaagtcatccccctttcctctaagctcgttccatggagaactcttctcacaagcggacgcgggaggcggccgacctcgccgccggaggctgtggagaggagggctcgccgcaggccgacgccaagaggctgcggccgcaggacctgctcgacatgctggaggacgacaccgacacggccgcggtcggcgacctaccgtcggtcatgcggagcctgtaggaggagatagctagcttcgacgaggccgcggagacgccggcgccgacatcggggcagcagccagagctgggcttcctactcgaggcctcggacgatgagctggggttgccgccgacgggcgccgcctcctcttcgtcggaggaggctgggcgcgcgggggcaccggagcccgcgctcgacggccagatctggggcttggagggcggaggtgctcctttccttcttggccggcggcggcatggactgggcagcggctttcgggtctccgtcgtggagcgcggtggcgacggaccctggcccgaccatgctgtccttcgcaggcccgtcctcctccgccaccgacgccgaggtgcgactccaggatttcaccgtgggtcgcatggaagcggaggcgacggtcgcgagcatcacgcacggatgggggcaggcgatagcacggcatgcagacgcccaagtccagcaatgctggggcatcacgagcgggcgggggtaccgcggcgtgcgtcacggggacggggcgggcgcacgggcgggcatcgcgatgacgggtgcgggagcaggcgggggcacgcgaatcacgggagtggagccacggtggtggtggacgccctcgttagtgtcttatagagtagtagagatagagattgtaggcgtccacaattcccagtggcgcacggttctgctgtccctccatcctcccgcgctccctccgtgctacatcaacgcccgcaggttctgcctctccctgtcactacgccgcctgcccccgccgcacccctccccgttactaggtgcggcgccgcgccgcgccgcctcctcggcctcgcctccgcgctcgccgacgactcgtcctgctccgacctcctcccgctgttcccagtccccgccggctacgccgcctctgacgccgcggatccccgatgccgagagctgcccgtcgcccgctgccgtcagcagcgtcttcagtaagttccgcgacccggcgccatctcctgtgacccctgacgacgctgcggcggcgcctgacgagcccagggatcttggcttcgacgatgacgacagtttcgacgccgattctattctgtgcggcgtccaccagagcgcggccgagggcatcgatggcatcatgggtaagctctctatggaaaacaacggggcgtccggatcaggctcaagcgttgactccaacatgcccgaatccaagatgcacccctacctcaggaaccttatggtgctcgggctcagcttctggcaggatcagaatatcatcatcaatcaagcgctgaagcggcatagtgtcgatcctgaatggtggatgtgccctgccatacctgtgaaagacattaccccggcaccaccgccttcagtggcaatggcgaaggaagactaagaagaagtcactggggacaatatacgaggaggggactcctgagcctgccaatggcgacgacgatggagctttggcactgccagagacaggattggggcttagcttgaatactgatggggtgctcaaggcgtggtgtggcagaggctctgcgtttgctgatggcaatgggcctgacttgccattgtcccctgctcatgtggtagtaagtatttccagcttatctaaagatataaaagatcttacatttccagttaaaaattaaagatggctagagctcttggaaccctgagtagtacctgctattagttcatatcgtctggtaagtagaatctatttcacttcagtagaagtacagatcgtctgttgttttatatcagcagtgatcagaaaaatcttggcatgcattgctttgtttcagtcccttcgcatttcttgtcaatggaagatttctcccagaagaaaatctgtgtctgaaatttgctaatatgaaatagtacagtatgcccaccagtacttgactttactggctcaatgggccaggcagaaggaaattccaattggttgttttctttgagttgaatcattataacaaacttagccctcattatgttgtatctgcagtttttgaattcaattgaagtaaaaggaaatatcatagtttggtcctttcgcgaattttttttgtccaattttttgtccttgtaggtttttccgttgcattagaaaacactgtaggctgcttccttgcgttgcctctccgtttgcaggaacaagagaccagtttttatgtcatagacatgaactactttcctggtatgtggctgctttcttgcgttgtctctccgtttgcagggaagggtgctcccagcccccgtcatgccccttggcccctcccaaccctcgtcgtcataacggagggtgctgcgacaagccagcggatgagcgtggcgatcccgctggagcagtccatcacgccggtgctttaggactttatgaatctcaacatatgctatctaccagtgtattactgtggagcctcgtcgtcgactcccacgtccatgagaccacctaggagttgctcgtgtacagctagctctaccaattcgagggatacataagtgggagtactgagggaggtgccgggggagaaaatttttctcagtttggtgctgatttatcaagacgaatgacttattgccacagagctaaggatgacagtactggactgcagagagaaagttggggcagatttccggcttcaatttatgtccttatcagcactacaacagcaacgacgagcacagtagcaaagcagtccgagccttgtggaggagagcctccacaagaagtgcctcgacgggttccctacctccgccgccggtatcgtgtcattgatgggccacttcatcgctatctagcacaagtttaggccatggagacacaccattgctgtggaattttgtttagtggtggtgctagatgcgtctggattttcatatgtttcgtttggagaccggaaactttaagccatttttagtgatgttgaaggctgccctttgtgctcaagttcttccgagacgtcaagcgtgtgcgagaacaaggagctatagatgatcgtgacactttcctccatgcagtgcgagatctcctatgttttcactcaaatgtccaaggaagctgtgtttgctgtggaatttcaaggaagctgtgtttggtgtggagaaggagattgagataaccagattggaaggctgtaacacctgcgacggaagtggtgccaagccaggtacaaaggcaacggcatgtaaaacttgtggaggtcagggccaggtagtctcctccacaagaacactgcttggaatattccagcaagtctccacctgcaatacttgtggtggcatcggtgaattctccactccttgcaacacctgtgggggtgatggctgggtgcgaaggacaaagaggatcagcctaaaggttcctgctggagtggattctggaagcatgctgagggtctggtctgagggtaatgctggcaggagaggaggccctcctgggacctttatgtcttcattgatgttctctctgatcctattcttaagcgagatgggacaaacattctctacacatgcaaggtttcttacattgatgcaatccttgggaccaccgtcaaaatccccactgttgacggaacagttgaccttaagataccctcagggactcagccaggcacagctctggtgatgtccaagaaaggtgtcccgcttctcgagaagtcaaatgcccgtggagaccagctggtgtgtgtccaggttgatattctgaagcgtctgagcagcgacgagaagaagctaattgaggagcttgcaaacctgaacaaggctcaaacaaccaatagcaggagatgattgtcacacaaggcttcgtaggacaacgtgcttgtgtggtaggcaattttgatgcaaactgcagtgatgattggatggaaagagttggtagtgataaactcttctacgaactacatacagcaaggggtacactggagcaaaaatgtgtcgttccacatctgtaacctcgtttttaagctattaaagttgagtcagtgaactggacgtttttgcaatagcttagcatatgcactaggcaactttattagcctttttttgttgttatacgacttttgtattcttgaaagccttaggcaaaatatctgatggtggaatcaggtttagacttgacatttctttcacaaatgctgcaccatgcattcatggaatctgtaagctgtaccatggaaatgttaactgtagttttattgtttgtgatgcatttggggtttattggtttgctcttcaaatacgttatgcagacactacgtttttttctcccttcggcagctgttgatttgaagctgcctctcgtagagcaggtgcgttttgctctaggctactgttaatatgaagctgtgtcatgtgtgtccactggacatgacactggataggataagctatattcaattaaatttgtagtataac

SEQ ID NO: 2151 - DNA, 6073 bp, Zea Mays
tttgctctgttatagagtagtaaaaacttcacctttggatcatttacctcactctctacaactacaagtctacaaggtaatgctcatgtaaaaaattctctttgaagggcttaacgaagagttttacagggataggcatgcaaatcctaaagctatatccgcttaaaaaaatctaggaatccgtaaacagtgtacaggtcaaaacaaaagaaagaaaaaaaactgcacacgacgtcaatcactctcactgcctctttccaccctgctgtagactgccctttctaccgttatatacccagcacaggatgtcgcgaccgatcggtttcccgagctgcagaggaattcttgcgtggatgctcgtctcttgcctagttgtttgtttcttgcagaggaattttttcctgaacttgtccccgccgtcttgaaggtttcttgtttgggagcagggcggaggcgctcctttccttcttggccgacgatggtatggactgggcagcggcgcgcgcgagcgatttttgcggcaaaccccctgcgagaaacatcgtccgcagaacacctcactttcactttttgtactcttccgtctctgccctcgcgttattgcctcgtctcgctcgcctggctggctcgtgccttgccttgctcagcgtacgcgaacgcagcgagaaggaggagcaaggaaatagagagagagagaaaaaaaaatcaagtcatccccctttcctctaagctcgttccatggagaactcttctcacaagcggacgcgggaggcggccgacctcgccgccggaggctgtggagaggagggctcgccgcaggccgacgccaagaggctgcggccgcaggacctgctcgacatgctggaggacgacaccgacacggccgcggtcggcgacctaccgtcggtcatgcggagcctgtaggaggagatagctagcttcgacgaggccgcggagacgccggcgccgacatcggggcagcagccagagctgggcttcctactcgaggcctcggacgatgagctggggttgccgccgacgggcgccgcctcctcttcgtcggaggaggctgggcgcgcgggggcaccggagcccgcgctcgacggccagatctggggcttggagggcggaggtgctcctttccttcttggccggcggcggcatggactgggcagcggctttcgggtctccgtcgtggagcgcggtggcgacggaccctggcccgaccatgctgtccttcgcaggcccgtcctcctccgccaccgacgccgaggtgcgactccaggatttcaccgtgggtcgcatggaagcggaggcgacggtcgcgagcatcacgcacggatgggggcaggcgatagcacggcatgcagacgcccaagtccagcaatgctggggcatcacgagcgggcgggggtaccgcggcgtgcgtcacggggacggggcgggcgcacgggcgggcatcgcgatgacgggtgcgggagcaggcgggggcacgcgaatcacgggagtggagccacggtggtggtggacgccctcgttagtgtcttatagagtagtagagatagagattgtaggcgtccacaattcccagtggcgcacggttctgctgtccctccatcctcccgcgctccctccgtgctacatcaacgcccgcaggttctgcctctccctgtcactacgccgcctgcccccgccgcacccctccccgttactaggtgcggcgccgcgccgcgccgcctcctcggcctcgcctccgcgctcgccgacgactcgtcctgctccgacctcctcccgctgttcccagtccccgccggctacgccgcctctgacgccgcggatccccgatgccgagagctgcccgtcgcccgctgccgtcagcagcgtcttcagtaagttccgcgacccggcgccatctcctgtgacccctgacgacgctgcggcggcgcctgacgagcccagggatcttggcttcgacgatgacgacagtttcgacgccgattctattctgtgcggcgtccaccagagcgcggccgagggcatcgatggcatcatgggatcagaatatcatcatcaatcaagcgctgaagcggcatagtgtcgatcctgaatggtggatgtgccctgccatacctgtgaaagacattaccccggcaccaccgccttcagtggcaatggcgaaggaagactaagaagaagtcactggggacaatatacgaggaggggactcctgagcctgccaatggcgacgacgatggagctttggcactgccagagacaggattggggcttagcttgaatactgatggggtgctcaaggcgtggtgtggcagaggctctgcgtttgctgatggcaatgggcctgacttgccattgtcccctgctcatgtggtagtaagtatttccagcttatctaaagatataaaagatcttacatttccagttaaaaattaaagatggctagagctcttggaaccctgagtagtacctgctattagttcatatcgtctggtaagtagaatctatttcacttcagtagaagtacagatcgtctgttgttttatatcagcagtgatcagaaaaatcttggcatgcattgctttgtttcagtcccttcgcatttcttgtcaatggaagatttctcccagaagaaaatctgtgtctgaaatttgctaatatgaaatagtacagtatgcccaccagtacttgactttactggctcaatgggccaggcagaaggaaattccaattggttgttttctttgagttgaatcattataacaaacttagccctcattatgttgtatctgcagtttttgaattcaattgaagtaaaaggaaatatcatagtttggtcctttcgcgaattttttttgtccaattttttgtccttgtaggtttttccgttgcattagaaaacactgtaggctgcttccttgcgttgcctctccgtttgcaggaacaagagaccagtttttatgtcatagacatgaactactttcctggtatgtggctgctttcttgcgttgtctctccgtttgcagggaagggtgctcccagcccccgtcatgccccttggcccctcccaaccctcgtcgtcataacggagggtgctgcgacaagccagcggatgagcgtggcgatcccgctggagcagtccatcacgccggtgctttaggactttatgaatctcaacatatgctatctaccagtgtattactgtggagcctcgtcgtcgactcccacgtccatgagaccacctaggagttgctcgtgtacagctagctctaccaattcgagggatacataagtgggaggcgtccacaattcccagtggcgcacggttctgccgtctctccgccctcccgcgctgcatcaaccgacaaagctaatttaaccaaacaattacaatagcagattttaaaaaatctatatattaagtaggtgtaggtgactcacacggtttgattatttgctggactctgtaccatggtttgtagtttgtactacatccgatgcaagaaagaataaaattatagttctggaattaaagttcagttttgttctcataatgcagagttctggaattaaagttcaataatacagttctcagccaccatgttacatgtgcctccttcaaaaaggattgtgttattagagttcagtattagagtttagtactggtacctggtactccttttttgtgctactgctctgcttcgcccatcaaaaatatagtagcttgtatgactgcacacctgatgtggtagattaaatcactctacacagccacctgttttcttagctaaatgtgtgtgtggtgcgagcagaaggttcttcggattatcctctcatttttagtattcccagttctctatccggatgactacaaaatcacaggttgaactgttttatatatctttcagtttggacagtcatatttcacattcattggaaacagctaacctgaacgctttcaaggcataaccataaccttttaagtctttgtaattttttctcctccaactgcatttgcatttttaaatacatcacgtgtcccatagtctattagctaggtgctaaggcaaatatgaaagtatgactatttttatatgtgattttagcttttcaatgcagcaactacaacttctttgcaactctattttccatctcatgttttcagtactgagggaggtgccgggggagaaaatttttctcagtttggtgctgatttatcaagacgaatgacttattgccacagagctaaggatgacagtagagaaagttggggcagatttccggcttcaatttatgtccttatcagcactacaacagcaacgacgagcacagtagcaaagcagtccgagccttgtggaggagagcctccacaagaagtgcctcgacgggttccctacctccgccgccggtatcgtgtcattgatgggccacttcatcgctatctagcacaaggccatggagacacaccattgctgtggaattttgtttagtggtggtgctagatgcgtctggattttcatatgtttcgtttggagaccggaaactttaagccatttttagtgatgttgaaggctgccctttgtgctcaagttcttccgagacgtcaagcgtgtgcgagaacaaggagctatagatgatcgtgacactttcctccatgcagtgcgagatctcctatgttttcactcaaatgtccaaggaagctgtgtttgctgtggaatttcaaggaagctgtgtttggtgtggagaaggagattgagataaccagattggaaggctgtaacacctgcgacggaagtggtgccaagccaggtacaaaggcaacggcatgtaaaacttgtggaggtcagggccaggtagtctcctccacaagaacactgcttggaatattccagcaagtctccacctgcaatacttgtggtggcatcggtgaattctccactccttgcaacacctgtgggggtgatggctgggtgcgaaggacaaagaggatcagcctaaaggttcctgctggagtggattctggaagcatgctgagggtctggtctgagggtaatgctggcaggagaggaggccctcctgggacctttatgtcttcattgatgttctctctgatcctattcttaagcgagatgggacaaacattctctacacatgcaaggtttcttacattgatgcaatccttgggaccaccgtcaaaatccccactgttgacggaacagttgaccttaagataccctcagggactcagccaggcacagctctggtgatgtccaagaaaggtgtcccgcttctcgagaagtcaaatgcccgtggagaccagctggtgtgtgtccaggttgatattctgaagcgtctgagcagcgacgagaagaagctaattgaggagcttgcaaacctgaacaaggctcaaacaaccaatagcaggagatgattgtcacacaaggcttcgtaggacaacgtgcttgtgtggtaggcaattttgatgcaaactgcagtgatgattggatggaaagagttggtagtgataaactcttctacgaactacatacagcaaggggtacactggagcaaaaatgtgtcgttccacatctgtaacctcgtttttaagctattaaagttgagtcagtgaactggacgtttttgcaatagcttagcatatgcactaggcaactttattagcctttttttgttgttatacgacttttgtattcttgaaagccttaggcaaaatatctgatggtggaatcaggtttagacttgacatttctttcacaaatgctgcaccatgcattcatggaatctgtaagctgtaccatggaaatgttaactgtagttttattgtttgtgatgcatttggggtttattggtttgctcttcaaatacgttatgcagacactacgtttttttctcccttcggcagctgttgatttgaagctgcctctcgtagagcaggtgcgttttgctctaggctactgttaatatgaagctgtgtcatgtgtgtccactggacatgacactggataggataagctatattcaattaaatttgtagtataac

SEQ ID NO: 2152 - DNA, 6368 bp, Zea Mays
tttgctctgttatagagtagtaaaaacttcacctttggatcatttacctcactctctacaactacaagtctacaaggtaatgctcatgtaaaaaattctctttgaagggcttaacgaagagttttacagggataggcatgcaaatcctaaagctatatccgcttaaaaaaatctaggaatccgtaaacagtgtacaggtcaaaacaaaagaaagaaaaaaaactgcacacgacgtcaatcactctcactgcctctttccaccctgctgtagactgccctttctaccgttatatacccagcacaggatgtcgcgaccgatcggtttcccgagctgcagaggaattcttgcgtggatgctcgtctcttgcctagttgtttgtttcttgcagaggaattttttcctgaacttgtccccgccgtcttgaaggtttcttgtttgggagcagggcggaggcgctcctttccttcttggccgacgatggtatggactgggcagcggcgcgcgcgagcgatttttgcggcaaaccccctgcgagaaacatcgtccgcagaacacctcactttcactttttgtactcttccgtctctgccctcgcgttattgcctcgtctcgctcgcctggctggctcgtgccttgccttgctcagcgtacgcgaacgcagcgagaaggaggagcaaggaaatagagagagagagaaaaaaaaatcaagtcatccccctttcctctaagctcgttccatggagaactcttctcacaagcggacgcgggaggcggccgacctcgccgccggaggctgtggagaggagggctcgccgcaggccgacgccaagaggctgcggccgcaggacctgctcgacatgctggaggacgacaccgacacggccgcggtcggcgacctaccgtcggtcatgcggagcctgtaggaggagatagctagcttcgacgaggccgcggagacgccggcgccgacatcggggcagcagccagagctgggcttcctactcgaggcctcggacgatgagctggggttgccgccgacgggcgccgcctcctcttcgtcggaggaggctgggcgcgcgggggcaccggagcccgcgctcgacggccagatctggggcttggagggcggaggtgctcctttccttcttggccggcggcggcatggactgggcagcggctttcgggtctccgtcgtggagcgcggtggcgacggaccctggcccgaccatgctgtccttcgcaggcccgtcctcctccgccaccgacgccgaggtgcgactccaggatttcaccgtgggtcgcatggaagcggaggcgacggtcgcgagcatcacgcacggatgggggcaggcgatagcacggcatgcagacgcccaagtccagcaatgctggggcatcacgagcgggcgggggtaccgcggcgtgcgtcacggggacggggcgggcgcacgggcgggcatcgcgatgacgggtgcgggagcaggcgggggcacgcgaatcacgggagtggagccacggtggtggtggacgccctcgttagtgtcttatagagtagtagagatagagattgtaggcgtccacaattcccagtggcgcacggttctgctgtccctccatcctcccgcgctccctccgtgctacatcaacgcccgcaggttctgcctctccctgtcactacgccgcctgcccccgccgcacccctccccgttactaggtgcggcgccgcgccgcgccgcctcctcggcctcgcctccgcgctcgccgacgactcgtcctgctccgacctcctcccgctgttcccagtccccgccggctacgccgcctctgacgccgcggatccccgatgccgagagctgcccgtcgcccgctgccgtcagcagcgtcttcagtaagttccgcgacccggcgccatctcctgtgacccctgacgacgctgcggcggcgcctgacgagcccagggatcttggcttcgacgatgacgacagtttcgacgccgattctattctgtgcggcgtccaccagagcgcggccgagggcatcgatggcatcatgggatcagaatatcatcatcaatcaagcgctgaagcggcatagtgtcgatcctgaatggtggatgtgccctgccatacctgtgaaagacattaccccggcaccaccgccttcagtggcaatggcgaaggaagactaagaagaagtcactggggacaatatacgaggaggggactcctgagcctgccaatggcgacgacgatggagctttggcactgccagagacaggattggggcttagcttgaatactgatggggtgctcaaggcgtggtgtggcagaggctctgcgtttgctgatggcaatgggcctgacttgccattgtcccctgctcatgtggtagtaagtatttccagcttatctaaagatataaaagatcttacatttccagttaaaaattaaagatggctagagctcttggaaccctgagtagtacctgctattagttcatatcgtctggtaagtagaatctatttcacttcagtagaagtacagatcgtctgttgttttatatcagcagtgatcagaaaaatcttggcatgcattgctttgtttcagtcccttcgcatttcttgtcaatggaagatttctcccagaagaaaatctgtgtctgaaatttgctaatatgaaatagtacagtatgcccaccagtacttgactttactggctcaatgggccaggcagaaggaaattccaattggttgttttctttgagttgaatcattataacaaacttagccctcattatgttgtatctgcagtttttgaattcaattgaagtaaaaggaaatatcatagtttggtcctttcgcgaattttttttgtccaattttttgtccttgtaggtttttccgttgcattagaaaacactgtaggctgcttccttgcgttgcctctccgtttgcaggaacaagagaccagtttttatgtcatagacatgaactactttcctggtatgtggctgctttcttgcgttgtctctccgtttgcagggaagggtgctcccagcccccgtcatgccccttggcccctcccaaccctcgtcgtcataacggagggtgctgcgacaagccagcggatgagcgtggcgatcccgctggagcagtccatcacgccggtgctttaggactttatgaatctcaacatatgctatctaccagtgtattactgtggagcctcgtcgtcgactcccacgtccatgagaccacctaggagttgctcgtgtacagctagctctaccaattcgagggatacataagtgggaggcgtccacaattcccagtggcgcacggttctgccgtctctccgccctcccgcgctgcatcaaccgacaaagctaatttaaccaaacaattacaatagcagattttaaaaaatctatatattaagtaggtgtaggtgactcacacggtttgattatttgctggactctgtaccatggtttgtagtttgtactacatccgatgcaagaaagaataaaattatagttctggaattaaagttcagttttgttctcataatgcagagttctggaattaaagttcaataatacagttctcagccaccatgttacatgtgcctccttcaaaaaggattgtgttattagagttcagtattagagtttagtactggtacctggtactccttttttgtgctactgctctgcttcgcccatcaaaaatatagtagcttgtatgactgcacacctgatgtggtagattaaatcactctacacagccacctgttttcttagctaaatgtgtgtgtggtgcgagcagaaggttcttcggattatcctctcatttttagtattcccagttctctatccggatgactacaaaatcacaggttgaactgttttatatatctttcagtttggacagtcatatttcacattcattggaaacagctaacctgaacgctttcaaggcataaccataaccttttaagtctttgtaattttttctcctccaactgcatttgcatttttaaatacatcacgtgtcccatagtctattagctaggtgctaaggcaaatatgaaagtatgactatttttatatgtgattttagcttttcaatgcagcaactacaacttctttgcaactctattttccatctcatgttttcagtactgagggaggtgccgggggagaaaatttttctcagtttggtgctgatttatcaaggtacgtacatgcttgtgttcagtttgtttgttgctcagtgcttgcttgagcctaaatacaaaatcaactgtactgcaaaaaatgtattaaaatggcatacttgatgccaatgtgtttagtgtgcttgctgttcaatgtgcctgctgttcagtgctacatgtgttccttgttcagtcatatttcatatagctgtcaatgtgttccatgttctctgcagagggcatgagattcatctcggaggatgcagttccttttatatttttttatttattctctgcatttaggatccaggaaattcattctgctgtaactcagttcatctgatgtaaattagtggcagcagagttcaataatgtctggtctctgaagcacatactcagttttctgtcggctgtgttgcagacgaatgacttattgccacagagctaaggatgacagtactggactgcagagagaaagttggggcagatttccggcttcaatttatgtccttatcagcactacaacagcaacgacgagcacagtagcaaagcagtccgagccttgtggaggagagcctccacaagaagtgcctcgacgggttccctacctccgccgccggtatcgtgtcattgatgggccacttcatcgctatctagcacaaggctgccctttgtgctcaagttcttccgagacgtcaagcgtgtgcgagaacaaggagctatagatgatcgtgacactttcctccatgcagtgcgagatctcctatgttttcactcaaatgtccaaggaagctgtgtttgctgtggaatttcaaggaagctgtgtttggtgtggagaaggagattgagataaccagattggaaggctgtaacacctgcgacggaagtggtgccaagccaggtacaaaggcaacggcatgtaaaacttgtggaggtcagggccaggtagtctcctccacaagaacactgcttggaatattccagcaagtctccacctgcaatacttgtggtggcatcggtgaattctccactccttgcaacacctgtgggggtgatggctgggtgcgaaggacaaagaggatcagcctaaaggttcctgctggagtggattctggaagcatgctgagggtctggtctgagggtaatgctggcaggagaggaggccctcctgggacctttatgtcttcattgatgttctctctgatcctattcttaagcgagatgggacaaacattctctacacatgcaaggtttcttacattgatgcaatccttgggaccaccgtcaaaatccccactgttgacggaacagttgaccttaagataccctcagggactcagccaggcacagctctggtgatgtccaagaaaggtgtcccgcttctcgagaagtcaaatgcccgtggagaccagctggtgtgtgtccaggttgatattctgaagcgtctgagcagcgacgagaagaagctaattgaggagcttgcaaacctgaacaaggctcaaacaaccaatagcaggagatgattgtcacacaaggcttcgtaggacaacgtgcttgtgtggtaggcaattttgatgcaaactgcagtgatgattggatggaaagagttggtagtgataaactcttctacgaactacatacagcaaggggtacactggagcaaaaatgtgtcgttccacatctgtaacctcgtttttaagctattaaagttgagtcagtgaactggacgtttttgcaatagcttagcatatgcactaggcaactttattagcctttttttgttgttatacgacttttgtattcttgaaagccttaggcaaaatatctgatggtggaatcaggtttagacttgacatttctttcacaaatgctgcaccatgcattcatggaatctgtaagctgtaccatggaaatgttaactgtagttttattgtttgtgatgcatttggggtttattggtttgctcttcaaatacgttatgcagacactacgtttttttctcccttcggcagctgttgatttgaagctgcctctcgtagagcaggtgcgttttgctctaggctactgttaatatgaagctgtgtcatgtgtgtccactggacatgacactggataggataagctatattcaattaaatttgtagtataac

SEQ ID NO: 2153 - DNA, 5811 bp, Zea Mays
tttgctctgttatagagtagtaaaaacttcacctttggatcatttacctcactctctacaactacaagtctacaaggtaatgctcatgtaaaaaattctctttgaagggcttaacgaagagttttacagggataggcatgcaaatcctaaagctatatccgcttaaaaaaatctaggaatccgtaaacagtgtacaggtcaaaacaaaagaaagaaaaaaaactgcacacgacgtcaatcactctcactgcctctttccaccctgctgtagactgccctttctaccgttatatacccagcacaggatgtcgcgaccgatcggtttcccgagctgcagaggaattcttgcgtggatgctcgtctcttgcctagttgtttgtttcttgcagaggaattttttcctgaacttgtccccgccgtcttgaaggtttcttgtttgggagcagggcggaggcgctcctttccttcttggccgacgatggtatggactgggcagcggcgcgcgcgagcgatttttgcggcaaaccccctgcgagaaacatcgtccgcagaacacctcactttcactttttgtactcttccgtctctgccctcgcgttattgcctcgtctcgctcgcctggctggctcgtgccttgccttgctcagcgtacgcgaacgcagcgagaaggaggagcaaggaaatagagagagagagaaaaaaaaatcaagtcatccccctttcctctaagctcgttccatggagaactcttctcacaagcggacgcgggaggcggccgacctcgccgccggaggctgtggagaggagggctcgccgcaggccgacgccaagaggctgcggccgcaggacctgctcgacatgctggaggacgacaccgacacggccgcggtcggcgacctaccgtcggtcatgcggagcctgtaggaggagatagctagcttcgacgaggccgcggagacgccggcgccgacatcggggcagcagccagagctgggcttcctactcgaggcctcggacgatgagctggggttgccgccgacgggcgccgcctcctcttcgtcggaggaggctgggcgcgcgggggcaccggagcccgcgctcgacggccagatctggggcttggagggcggaggtgctcctttccttcttggccggcggcggcatggactgggcagcggctttcgggtctccgtcgtggagcgcggtggcgacggaccctggcccgaccatgctgtccttcgcaggcccgtcctcctccgccaccgacgccgaggtgcgactccaggatttcaccgtgggtcgcatggaagcggaggcgacggtcgcgagcatcacgcacggatgggggcaggcgatagcacggcatgcagacgcccaagtccagcaatgctggggcatcacgagcgggcgggggtaccgcggcgtgcgtcacggggacggggcgggcgcacgggcgggcatcgcgatgacgggtgcgggagcaggcgggggcacgcgaatcacgggagtggagccacggtggtggtggacgccctcgttagtgtcttatagagtagtagagatagagattgtaggcgtccacaattcccagtggcgcacggttctgctgtccctccatcctcccgcgctccctccgtgctacatcaacgcccgcaggttctgcctctccctgtcactacgccgcctgcccccgccgcacccctccccgttactaggtgcggcgccgcgccgcgccgcctcctcggcctcgcctccgcgctcgccgacgactcgtcctgctccgacctcctcccgctgttcccagtccccgccggctacgccgcctctgacgccgcggatccccgatgccgagagctgcccgtcgcccgctgccgtcagcagcgtcttcagtaagttccgcgacccggcgccatctcctgtgacccctgacgacgctgcggcggcgcctgacgagcccagggatcttggcttcgacgatgacgacagtttcgacgccgattctattctgtgcggcgtccaccagagcgcggccgagggcatcgatggcatcatgggatcagaatatcatcatcaatcaagcgctgaagcggcatagtgtcgatcctgaatggtggatgtgccctgccatacctgtgaaagacattaccccggcaccaccgccttcagtggcaatggcgaaggaagactaagaagaagtcactggggacaatatacgaggaggggactcctgagcctgccaatggcgacgacgatggagctttggcactgccagagacaggattggggcttagcttgaatactgatggggtgctcaaggcgtggtgtggcagaggctctgcgtttgctgatggcaatgggcctgacttgccattgtcccctgctcatgtggtagtaagtatttccagcttatctaaagatataaaagatcttacatttccagttaaaaattaaagatggctagagctcttggaaccctgagtagtacctgctattagttcatatcgtctggtaagtagaatctatttcacttcagtagaagtacagatcgtctgttgttttatatcagcagtgatcagaaaaatcttggcatgcattgctttgtttcagtcccttcgcatttcttgtcaatggaagatttctcccagaagaaaatctgtgtctgaaatttgctaatatgaaatagtacagtatgcccaccagtacttgactttactggctcaatgggccaggcagaaggaaattccaattggttgttttctttgagttgaatcattataacaaacttagccctcattatgttgtatctgcagtttttgaattcaattgaagtaaaaggaaatatcatagtttggtcctttcgcgaattttttttgtccaattttttgtccttgtaggtttttccgttgcattagaaaacactgtaggctgcttccttgcgttgcctctccgtttgcaggaacaagagaccagtttttatgtcatagacatgaactactttcctggtatgtggctgctttcttgcgttgtctctccgtttgcagggaagggtgctcccagcccccgtcatgccccttggcccctcccaaccctcgtcgtcataacggagggtgctgcgacaagccagcggatgagcgtggcgatcccgctggagcagtccatcacgccggtgctttaggactttatgaatctcaacatatgctatctaccagtgtattactgtggagcctcgtcgtcgactcccacgtccatgagaccacctaggagttgctcgtgtacagctagctctaccaattcgagggatacataagtgggaggcgtccacaattcccagtggcgcacggttctgccgtctctccgccctcccgcgctgcatcaaccgacaaagctaatttaaccaaacaattacaatagcagattttaaaaaatctatatattaagtaggtgtaggtgactcacacggtttgattatttgctggactctgtaccatggtttgtagtttgtactacatccgatgcaagaaagaataaaattatagttctggaattaaagttcagttttgttctcataatgcagagttctggaattaaagttcaataatacagttctcagccaccatgttacatgtgcctccttcaaaaaggattgtgttattagagttcagtattagagtttagtactggtacctggtactccttttttgtgctactgctctgcttcgcccatcaaaaatatagtagcttgtatgactgcacacctgatgtggtagattaaatcactctacacagccacctgttttcttagctaaatgtgtgtgtggtgcgagcagaaggttcttcggattatcctctcatttttagtattcccagttctctatccggatgactacaaaatcacaggttgaactgttttatatatctttcagtttggacagtcatatttcacattcattggaaacagctaacctgaacgctttcaaggcataaccataaccttttaagtctttgtaattttttctcctccaactgcatttgcatttttaaatacatcacgtgtcccatagtctattagctaggtgctaaggcaaatatgaaagtatgactatttttatatgtgattttagcttttcaatgcagcaactacaacttctttgcaactctattttccatctcatgttttcagtactgagggaggtgccgggggagaaaatttttctcagtttggtgctgatttatcaagacgaatgacttattgccacagagctaaggatgacagtgtgagtatttttgctgttcaatgtaactcagttctgttatttttttgactgttgttgatgcatttctgtctagactggactgcagagagaaagttggggcagatttccggcttcaatttatgtccttatcagcactacaacagcaacgacgagcacagtagcaaagcagtccgagccttgtggaggagagcctccacaagaagtgcctcgacgggttccctacctccgccgccggtatcgtgtcattgatgggccacttcatcgctatctagcacaagttcttccgagacgtcaagcgtgtgcgagaacaaggagctatagatgatcgtgacactttcctccatgcagtgcgagatctcctatgttttcactcaaatgtccaaggaagctgtgtttgctgtggaatttcaaggaagctgtgtttggtgtggagaaggagattgagataaccagattggaaggctgtaacacctgcgacggaagtggtgccaagccaggtacaaaggcaacggcatgtaaaacttgtggaggtcagggccaggagaggaggccctcctgggacctttatgtcttcattgatgttctctctgatcctattcttaagcgagatgggacaaacattctctacacatgcaaggtttcttacattgatgcaatccttgggaccaccgtcaaaatccccactgttgacggaacagttgaccttaagataccctcagggactcagccaggcacagctctggtgatgtccaagaaaggtgtcccgcttctcgagaagtcaaatgcccgtggagaccagctggtgtgtgtccaggttgatattctgaagcgtctgagcagcgacgagaagaagctaattgaggagcttgcaaacctgaacaaggctcaaacaaccaatagcaggagatgattgtcacacaaggcttcgtaggacaacgtgcttgtgtggtaggcaattttgatgcaaactgcagtgatgattggatggaaagagttggtagtgataaactcttctacgaactacatacagcaaggggtacactggagcaaaaatgtgtcgttccacatctgtaacctcgtttttaagctattaaagttgagtcagtgaactggacgtttttgcaatagcttagcatatgcactaggcaactttattagcctttttttgttgttatacgacttttgtattcttgaaagccttaggcaaaatatctgatggtggaatcaggtttagacttgacatttctttcacaaatgctgcaccatgcattcatggaatctgtaagctgtaccatggaaatgttaactgtagttttattgtttgtgatgcatttggggtttattggtttgctcttcaaatacgttatgcagacactacgtttttttctcccttcggcagctgttgatttgaagctgcctctcgtagagcaggtgcgttttgctctaggctactgttaatatgaagctgtgtcatgtgtgtccactggacatgacactggataggataagctatattcaattaaatttgtagtataac

SEQ ID NO: 2154 - DNA, 6085 bp, Zea Mays
tttgctctgttatagagtagtaaaaacttcacctttggatcatttacctcactctctacaactacaagtctacaaggtaatgctcatgtaaaaaattctctttgaagggcttaacgaagagttttacagggataggcatgcaaatcctaaagctatatccgcttaaaaaaatctaggaatccgtaaacagtgtacaggtcaaaacaaaagaaagaaaaaaaactgcacacgacgtcaatcactctcactgcctctttccaccctgctgtagactgccctttctaccgttatatacccagcacaggatgtcgcgaccgatcggtttcccgagctgcagaggaattcttgcgtggatgctcgtctcttgcctagttgtttgtttcttgcagaggaattttttcctgaacttgtccccgccgtcttgaaggtttcttgtttgggagcagggcggaggcgctcctttccttcttggccgacgatggtatggactgggcagcggcgcgcgcgagcgatttttgcggcaaaccccctgcgagaaacatcgtccgcagaacacctcactttcactttttgtactcttccgtctctgccctcgcgttattgcctcgtctcgctcgcctggctggctcgtgccttgccttgctcagcgtacgcgaacgcagcgagaaggaggagcaaggaaatagagagagagagaaaaaaaaatcaagtcatccccctttcctctaagctcgttccatggagaactcttctcacaagcggacgcgggaggcggccgacctcgccgccggaggctgtggagaggagggctcgccgcaggccgacgccaagaggctgcggccgcaggacctgctcgacatgctggaggacgacaccgacacggccgcggtcggcgacctaccgtcggtcatgcggagcctgtaggaggagatagctagcttcgacgaggccgcggagacgccggcgccgacatcggggcagcagccagagctgggcttcctactcgaggcctcggacgatgagctggggttgccgccgacgggcgccgcctcctcttcgtcggaggaggctgggcgcgcgggggcaccggagcccgcgctcgacggccagatctggggcttggagggcggaggtgctcctttccttcttggccggcggcggcatggactgggcagcggctttcgggtctccgtcgtggagcgcggtggcgacggaccctggcccgaccatgctgtccttcgcaggcccgtcctcctccgccaccgacgccgaggtgcgactccaggatttcaccgtgggtcgcatggaagcggaggcgacggtcgcgagcatcacgcacggatgggggcaggcgatagcacggcatgcagacgcccaagtccagcaatgctggggcatcacgagcgggcgggggtaccgcggcgtgcgtcacggggacggggcgggcgcacgggcgggcatcgcgatgacgggtgcgggagcaggcgggggcacgcgaatcacgggagtggagccacggtggtggtggacgccctcgttagtgtcttatagagtagtagagatagagattgtaggcgtccacaattcccagtggcgcacggttctgctgtccctccatcctcccgcgctccctccgtgctacatcaacgcccgcaggttctgcctctccctgtcactacgccgcctgcccccgccgcacccctccccgttactaggtgcggcgccgcgccgcgccgcctcctcggcctcgcctccgcgctcgccgacgactcgtcctgctccgacctcctcccgctgttcccagtccccgccggctacgccgcctctgacgccgcggatccccgatgccgagagctgcccgtcgcccgctgccgtcagcagcgtcttcagtaagttccgcgacccggcgccatctcctgtgacccctgacgacgctgcggcggcgcctgacgagcccagggatcttggcttcgacgatgacgacagtttcgacgccgattctattctgtgcggcgtccaccagagcgcggccgagggcatcgatggcatcatgggatcagaatatcatcatcaatcaagcgctgaagcggcatagtgtcgatcctgaatggtggatgtgccctgccatacctgtgaaagacattaccccggcaccaccgccttcagtggcaatggcgaaggaagactaagaagaagtcactggggacaatatacgaggaggggactcctgagcctgccaatggcgacgacgatggagctttggcactgccagagacaggattggggcttagcttgaatactgatggggtgctcaaggcgtggtgtggcagaggctctgcgtttgctgatggcaatgggcctgacttgccattgtcccctgctcatgtggtagtaagtatttccagcttatctaaagatataaaagatcttacatttccagttaaaaattaaagatggctagagctcttggaaccctgagtagtacctgctattagttcatatcgtctggtaagtagaatctatttcacttcagtagaagtacagatcgtctgttgttttatatcagcagtgatcagaaaaatcttggcatgcattgctttgtttcagtcccttcgcatttcttgtcaatggaagatttctcccagaagaaaatctgtgtctgaaatttgctaatatgaaatagtacagtatgcccaccagtacttgactttactggctcaatgggccaggcagaaggaaattccaattggttgttttctttgagttgaatcattataacaaacttagccctcattatgttgtatctgcagtttttgaattcaattgaagtaaaaggaaatatcatagtttggtcctttcgcgaattttttttgtccaattttttgtccttgtaggtttttccgttgcattagaaaacactgtaggctgcttccttgcgttgcctctccgtttgcaggaacaagagaccagtttttatgtcatagacatgaactactttcctggtatgtggctgctttcttgcgttgtctctccgtttgcagggaagggtgctcccagcccccgtcatgccccttggcccctcccaaccctcgtcgtcataacggagggtgctgcgacaagccagcggatgagcgtggcgatcccgctggagcagtccatcacgccggtgctttaggactttatgaatctcaacatatgctatctaccagtgtattactgtggagcctcgtcgtcgactcccacgtccatgagaccacctaggagttgctcgtgtacagctagctctaccaattcgagggatacataagtgggaggcgtccacaattcccagtggcgcacggttctgccgtctctccgccctcccgcgctgcatcaaccgacaaagctaatttaaccaaacaattacaatagcagattttaaaaaatctatatattaagtaggtgtaggtgactcacacggtttgattatttgctggactctgtaccatggtttgtagtttgtactacatccgatgcaagaaagaataaaattatagttctggaattaaagttcagttttgttctcataatgcagagttctggaattaaagttcaataatacagttctcagccaccatgttacatgtgcctccttcaaaaaggattgtgttattagagttcagtattagagtttagtactggtacctggtactccttttttgtgctactgctctgcttcgcccatcaaaaatatagtagcttgtatgactgcacacctgatgtggtagattaaatcactctacacagccacctgttttcttagctaaatgtgtgtgtggtgcgagcagaaggttcttcggattatcctctcatttttagtattcccagttctctatccggatgactacaaaatcacaggttgaactgttttatatatctttcagtttggacagtcatatttcacattcattggaaacagctaacctgaacgctttcaaggcataaccataaccttttaagtctttgtaattttttctcctccaactgcatttgcatttttaaatacatcacgtgtcccatagtctattagctaggtgctaaggcaaatatgaaagtatgactatttttatatgtgattttagcttttcaatgcagcaactacaacttctttgcaactctattttccatctcatgttttcagtactgagggaggtgccgggggagaaaatttttctcagtttggtgctgatttatcaagacgaatgacttattgccacagagctaaggatgacagtactggactgcagagagaaagttggggcagatttccggcttcaatttatgtccttatcagcactacaacagcaacgacgagcacagtagcaaagcagtccgagccttgtggaggagagcctccacaagaagtgcctcgacgggttccctacctccgccgccggtatcgtgtcattgatgggccacttcatcgctatctagcacaaggccatggagacacaccattgctgtggaattttgtttagtggtggtgctagatgcgtctggattttcatatgtttcgtttggagaccggaaactttaagccatttttagtgatgttgaaggctgccctttgtgctcaagttcttccgagacgtcaagcgtgtgcgagaacaaggagctatagatgatcgtgacactttcctccatgcagtgcgagatctcctatgttttcactcaaatgtccaaggaagctgtgtttgctgtggaatttcaaggaagctgtgtttggtgtggagaaggagattgagataaccagattggaaggctgtaacacctgcgacggaagtggtgccaagccaggtacaaaggcaacggcatgtaaaacttgtggaggtcagggccaggtagtctcctccacaagaacactgcttggaatattccagcaagtctccacctgcaatacttgtggtggcatcggtgaattctccactccttgcaacacctgtgggggtgatggctgggtgcgaaggacaaagaggatcagcctaaaggttcctgctggagtggattctggaagcatgctgagggtctggtctgagggtaatgctggcaggagaggaggccctcctgggacctttatgtcttcattgatgttctctctgatcctattcttaagcgagatgggacaaacattctctacacatgcaaggtttcttacattgatgcaatccttgggaccaccgtcaaaatccccactgttgacggaacagttgaccttaagataccctcagggactcagccaggcacagctctggtgatgtccaagaaaggtgtcccgcttctcgagaagtcaaatgcccgtggagaccagctggtgtgtgtccaggttgatattctgaagcgtctgagcagcgacgagaagaagctaattgaggagcttgcaaacctgaacaaggctcaaacaaccaatagcaggagatgattgtcacacaaggcttcgtaggacaacgtgcttgtgtggtaggcaattttgatgcaaactgcagtgatgattggatggaaagagttggtagtgataaactcttctacgaactacatacagcaaggggtacactggagcaaaaatgtgtcgttccacatctgtaacctcgtttttaagctattaaagttgagtcagtgaactggacgtttttgcaatagcttagcatatgcactaggcaactttattagcctttttttgttgttatacgacttttgtattcttgaaagccttaggcaaaatatctgatggtggaatcaggtttagacttgacatttctttcacaaatgctgcaccatgcattcatggaatctgtaagctgtaccatggaaatgttaactgtagttttattgtttgtgatgcatttggggtttattggtttgctcttcaaatacgttatgcagacactacgtttttttctcccttcggcagctgttgatttgaagctgcctctcgtagagcaggtgcgttttgctctaggctactgttaatatgaagctgtgtcatgtgtgtccactggacatgacactggataggataagctatattcaattaaatttgtagtataac

SEQ ID NO: 2155 - DNA, 5681 bp, Zea Mays
tttgctctgttatagagtagtaaaaacttcacctttggatcatttacctcactctctacaactacaagtctacaaggtaatgctcatgtaaaaaattctctttgaagggcttaacgaagagttttacagggataggcatgcaaatcctaaagctatatccgcttaaaaaaatctaggaatccgtaaacagtgtacaggtcaaaacaaaagaaagaaaaaaaactgcacacgacgtcaatcactctcactgcctctttccaccctgctgtagactgccctttctaccgttatatacccagcacaggatgtcgcgaccgatcggtttcccgagctgcagaggaattcttgcgtggatgctcgtctcttgcctagttgtttgtttcttgcagaggaattttttcctgaacttgtccccgccgtcttgaaggtttcttgtttgggagcagggcggaggcgctcctttccttcttggccgacgatggtatggactgggcagcggcgcgcgcgagcgatttttgcggcaaaccccctgcgagaaacatcgtccgcagaacacctcactttcactttttgtactcttccgtctctgccctcgcgttattgcctcgtctcgctcgcctggctggctcgtgccttgccttgctcagcgtacgcgaacgcagcgagaaggaggagcaaggaaatagagagagagagaaaaaaaaatcaagtcatccccctttcctctaagctcgttccatggagaactcttctcacaagcggacgcgggaggcggccgacctcgccgccggaggctgtggagaggagggctcgccgcaggccgacgccaagaggctgcggccgcaggacctgctcgacatgctggaggacgacaccgacacggccgcggtcggcgacctaccgtcggtcatgcggagcctgtaggaggagatagctagcttcgacgaggccgcggagacgccggcgccgacatcggggcagcagccagagctgggcttcctactcgaggcctcggacgatgagctggggttgccgccgacgggcgccgcctcctcttcgtcggaggaggctgggcgcgcgggggcaccggagcccgcgctcgacggccagatctggggcttggagggcggaggtgctcctttccttcttggccggcggcggcatggactgggcagcggctttcgggtctccgtcgtggagcgcggtggcgacggaccctggcccgaccatgctgtccttcgcaggcccgtcctcctccgccaccgacgccgaggtgcgactccaggatttcaccgtgggtcgcatggaagcggaggcgacggtcgcgagcatcacgcacggatgggggcaggcgatagcacggcatgcagacgcccaagtccagcaatgctggggcatcacgagcgggcgggggtaccgcggcgtgcgtcacggggacggggcgggcgcacgggcgggcatcgcgatgacgggtgcgggagcaggcgggggcacgcgaatcacgggagtggagccacggtggtggtggacgccctcgttagtgtcttatagagtagtagagatagagattgtaggcgtccacaattcccagtggcgcacggttctgctgtccctccatcctcccgcgctccctccgtgctacatcaacgcccgcaggttctgcctctccctgtcactacgccgcctgcccccgccgcacccctccccgttactaggtgcggcgccgcgccgcgccgcctcctcggcctcgcctccgcgctcgccgacgactcgtcctgctccgacctcctcccgctgttcccagtccccgccggctacgccgcctctgacgccgcggatccccgatgccgagagctgcccgtcgcccgctgccgtcagcagcgtcttcagtaagttccgcgacccggcgccatctcctgtgacccctgacgacgctgcggcggcgcctgacgagcccagggatcttggcttcgacgatgacgacagtttcgacgccgattctattctgtgcggcgtccaccagagcgcggccgagggcatcgatggcatcatgggtaagctctctatggaaaacaacggggcgtccggatcaggctcaagcgttgactccaacatgcccgaatccaagatgcacccctacctcaggaaccttatggtgctcgggctcagcttctggcaggatcagaatatcatcatcaatcaagcgctgaagcggcatagtgtcgatcctgaatggtggatgtgccctgccatacctgtgaaagacattaccccggcaccaccgccttcagtggcaatggcgaaggaagactaagaagaagtcactggggacaatatacgaggaggggactcctgagcctgccaatggcgacgacgatggagctttggcactgccagagacaggattggggcttagcttgaatactgatggggtgctcaaggcgtggtgtggcagaggctctgcgtttgctgatggcaatgggcctgacttgccattgtcccctgctcatgtggtagtaagtatttccagcttatctaaagatataaaagatcttacatttccagttaaaaattaaagatggctagagctcttggaaccctgagtagtacctgctattagttcatatcgtctggtaagtagaatctatttcacttcagtagaagtacagatcgtctgttgttttatatcagcagtgatcagaaaaatcttggcatgcattgctttgtttcagtcccttcgcatttcttgtcaatggaagatttctcccagaagaaaatctgtgtctgaaatttgctaatatgaaatagtacagtatgcccaccagtacttgactttactggctcaatgggccaggcagaaggaaattccaattggttgttttctttgagttgaatcattataacaaacttagccctcattatgttgtatctgcagtttttgaattcaattgaagtaaaaggaaatatcatagtttggtcctttcgcgaattttttttgtccaattttttgtccttgtaggtttttccgttgcattagaaaacactgtaggctgcttccttgcgttgcctctccgtttgcaggaacaagagaccagtttttatgtcatagacatgaactactttcctggtatgtggctgctttcttgcgttgtctctccgtttgcagggaagggtgctcccagcccccgtcatgccccttggcccctcccaaccctcgtcgtcataacggagggtgctgcgacaagccagcggatgagcgtggcgatcccgctggagcagtccatcacgccggtgctttaggactttatgaatctcaacatatgctatctaccagtgtattactgtggagcctcgtcgtcgactcccacgtccatgagaccacctaggagttgctcgtgtacagctagctctaccaattcgagggatacataagtgggagtactgagggaggtgccgggggagaaaatttttctcagtttggtgctgatttatcaaggtacgtacatgcttgtgttcagtttgtttgttgctcagtgcttgcttgagcctaaatacaaaatcaactgtactgcaaaaaatgtattaaaatggcatacttgatgccaatgtgtttagtgtgcttgctgttcaatgtgcctgctgttcagtgctacatgtgttccttgttcagtcatatttcatatagctgtcaatgtgttccatgttctctgcagagggcatgagattcatctcggaggatgcagttccttttatatttttttatttattctctgcatttaggatccaggaaattcattctgctgtaactcagttcatctgatgtaaattagtggcagcagagttcaataatgtctggtctctgaagcacatactcagttttctgtcggctgtgttgcagacgaatgacttattgccacagagctaaggatgacagtgtgagtatttttgctgttcaatgtaactcagttctgttatttttttgactgttgttgatgcatttctgtctagactggactgcagagagaaagttggggcagatttccggcttcaatttatgtccttatcagcactacaacagcaacgacgagcacagtagcaaagcagtccgagccttgtggaggagagcctccacaagaagtgcctcgacgggttccctacctccgccgccggtatcgtgtcattgatgggccacttcatcgctatctagcacaagttcttccgagacgtcaagcgtgtgcgagaacaaggagctatagatgatcgtgacactttcctccatgcagtgcgagatctcctatgttttcactcaaatgtccaaggaagctgtgtttgctgtggaatttcaaggaagctgtgtttggtgtggagaaggagattgagataaccagattggaaggctgtaacacctgcgacggaagtggtgccaagccaggtacaaaggcaacggcatgtaaaacttgtggaggtcagggccaggtagtctcctccacaagaacactgcttggaatattccagcaagtctccacctgcaatacttgtggtggcatcggtgaattctccactccttgcaacacctgtgggggtgatggctgggtgcgaaggacaaagaggatcagcctaaaggttcctgctggagtggattctggaagcatgctgagggtctggtctgagggtaatgctggcaggagaggaggccctcctgggacctttatgtcttcattgatgttctctctgatcctattcttaagcgagatgggacaaacattctctacacatgcaaggtttcttacattgatgcaatccttgggaccaccgtcaaaatccccactgttgacggaacagttgaccttaagataccctcagggactcagccaggcacagctctggtgatgtccaagaaaggtgtcccgcttctcgagaagtcaaatgcccgtggagaccagctggtgtgtgtccaggttgatattctgaagcgtctgagcagcgacgagaagaagctaattgaggagcttgcaaacctgaacaaggctcaaacaaccaatagcaggagatgattgtcacacaaggcttcgtaggacaacgtgcttgtgtggtaggcaattttgatgcaaactgcagtgatgattggatggaaagagttggtagtgataaactcttctacgaactacatacagcaaggggtacactggagcaaaaatgtgtcgttccacatctgtaacctcgtttttaagctattaaagttgagtcagtgaactggacgtttttgcaatagcttagcatatgcactaggcaactttattagcctttttttgttgttatacgacttttgtattcttgaaagccttaggcaaaatatctgatggtggaatcaggtttagacttgacatttctttcacaaatgctgcaccatgcattcatggaatctgtaagctgtaccatggaaatgttaactgtagttttattgtttgtgatgcatttggggtttattggtttgctcttcaaatacgttatgcagacactacgtttttttctcccttcggcagctgttgatttgaagctgcctctcgtagagcaggtgcgttttgctctaggctactgttaatatgaagctgtgtcatgtgtgtccactggacatgacactggataggataagctatattcaattaaatttgtagtataac

SEQ ID NO: 2156 - DNA, 1262 bp, Zea Mays
acccccattgcccatttgcccccaaggccccaagcccccaacacggcaacaccgcaccacgaccacggactaccgtctcctctcctttcctctcctgcaactgcaagcgaccacccctccacccccatccacccacccgcccgccgacgcttggatcccctcccttgtttgccgtgtccccgcccaaaccccgtagccgccgccacagcaatcgctgccgccgccgctggaggccgggccgtgggggctgaaatgaaggaggtggtgctccacgtgtatgacgtgaccaacagtgactccgagaagacgaacaacaccatcctccagatcaaccgcatcttcaaggaccgcatcggcctcggcggcatcttccacagcgccgtccaggtctatggcgaggacgagtggtcgttcgggttctgcgagtccggcagcggcgtgtttagttgccccataggcaagaaccccatgtacacctaccgggagcgcatcgtcctcggggagaccgagtgcggcatcgccgccgttaaccggatcctgcgggagctcagccgcgagtggcctggccactcgtacgatctcctctccaggaattgtaaccatttctgcgacgtgctctgcgagaggctcggcgtccccaagctcccaggttgggtgaatcgctttgccaatgccggtgatactgctgtggttgttgctgagaacacagcagttaaggcaggctaaaacagaaatcgtgaatgccagtagagtagcatacagatttatggcaggcctgacttccaaaaatcaagcctcacctgagtctccgggtaacaatcaaaacagaggcagccctagtttccagggagcttggttcaagaacatcgtctcagctggtgcaaagccttcatcgagtggatcgacacgcacacattttcaggacgctgatgatggaacccctttgcaacatcaaagttcaacagagcaatcaacacagttgtagttgcttcccagcatatcaaccaacaattgaattgaatctgtcaatctgttgtgtaacattagctaatatctgttcgaaacctgttgttaaattgtatcagtagtgtaacagttgctgagatttgttcaaaaactgctattttgcatttgtccgtgaatcagttttttgcagcattgttgaagttgaacgctctgatgtcatgcgtagctgctaatctgttttcaaggttctgtttagcacattctcatggactgttttttttaaccaaacattgttt

SEQ ID NO: 2157 - DNA, 2771 bp, Zea Mays
cagctagctatctaaccgatcgagcgacgaccgacgggcgagcgagcgaggagaggatcgctcatcggtcgctgcttcactagctcgtcggcgggggggatcgcccgcctctcgctctctcctctcgtctcgtctttctagctgcgactgtgtactatactagtccgcatccgcacactagccagtagttgtccaattctccaagtggttcagaggagctagcagtacctcacgcggagtatatgagcgagtgttggcactggcgctgtctatccgcctatcatccctccccagcccgaaaagctatggccctgagctctcctccctcgccctggcgcaaagtgtaacgtacgtcaagccatccatccatccatcggcagttcggcacccggccagccggcgggcgcgctgggctgcctgcggctacacgtacgtcgtaatcccgctctcccgcctcgcccgccccggtcgtcccgggctcccggccacaacaactacacatagacacatggcgcatgatgagccaggtttcgcgtacgcggactacttcgcggcggcggccggcgccgtggcgacgttcgtgccggaggtggacgtcggcggcggcggggaggagggtcttcacctctacggcctgcagccgcaccaccagcagcccggggtggagatgtacggggccaggggccacatgccgccggccgcgatgatggcggcgcacggcggcaaggccgcgctcggtctcgacgtcgcttctcccgtcgtcggcgggcacttcggggacgaccacctccggcaggctctccaggcgccgctgtcgctgtcgctccacgacgacgggaccgccgacgccgcgccgctggcgctgcaccaccaccaccaccatctcggcggcgtaccgcaggcgcagcagcaccagccgccgggggcgtggccacagccgcagcagcagggcgcgtggcacctgcgcggctccaggttcctgcgcccgacgcagcagctgctgcaggagttctgcaccctgcccgtggacaccgtcaccagcacgcccgcgaagccagcgagcgtggaggacggcgtcggctcctcgtcctcggcggcggccccgtcgcagcagataatccaggccatggatgcggccgagctgcagaggctcaaagccaagctctacgccatgctccaagaggtggagagaaggtaccggaggtaccgggagcagatgagggccgtggcggggtccttcgaggcggtggccggggagcgggcggcggcggcgtacacgaggctggcgcagcggacgatatccaggcacttccggagcgtgagggacggagtggcggcgcagatgcaggcggtgcgccgggcgctcggcgagaaggacgcggacgacggcggcgtcgtcccggcggcggccgggatgatggccaacaagggggagaccacgcccaggctgcgggtcatcgaccagtgcctgcggcagcaccgggcgtaccagaccggcgtcgtcctcgagagccagccgtggagaccgcagcgcggcctgccggagcgcgccgtctccatcctccgggcgtggatgttcgagcacttcttgcacccgtatccaagcgacgtggacaagcacatcctggcgcgccagaccggcctgtcacgcagccaagtctccaactggttcatcaacgcgagggttaggctgtggaagccgatggtggaggagatgtactcggaggagatgaaggaccccaaggagggcgcctgcagtaacgcgaacagcagcgtgaacactggcgccggctacgcctccgaggagctagggcagccgctggggcacgggggcgcctgtggtggcgtggacgagcagaagccgacgcgggcgcagctggtccacgacgccgggtcgctagcatcagccgtcagcatcggcagcagcagggaccagcagcagatcagcagcatcaacttccgcatgatggaccacctcgacttcgacgcgtacagcggcgaccccgccgcggccggcgggccagcagctgggttcggtggtgctggtgcttccggcggcgtgtcgctcacgctcgggctgcagcagcacgccgacggcgacccccacggcggcgtcaacatcgcgttcgccgcggctccgtcggccgcgcacgagttcctgttcatggcaggcggcggcgagcatcggatggtcgcggctggcgccgtgcacccgtcgtcgtcccacggccacggtcagttcgccgccagcatgcaaggcgacagcgccggtgtggcctcctcgcactaccaccggggcctcggcgccgccactgggttccagctcctccatgacctggccggctgatcgcattagcatggcaagggacggaccctgatgactaggccgatcgagcgctttaattggctttggaggttcacgcgcggccggttgacggggatgtgccaacggcagcagctagccggatggcattggcatgagcgcatggcgctcgcgcagcttgcgcgcttcggatttttgtagggtttagattcctctcgcttcaattcttggcacggtgtctctgtctacatgtgtatctgtatcgcttcggagaatgccattatctgccatggacatggacgtctcttgctccgcgcgaacactagcatctaagaatttttataaaatttactccctaaatcatcatataaaaagtcatatgagtaaaaattattttctatatatttatatccttcaacagtttttttaatattttgtatgtatattc

SEQ ID NO: 2158 - DNA, 2991 bp, Zea Mays
ctcgtctttctagctgcgactgtgtactatactagtccgcatccgcacactagccagtagttgtccaattctccaagtggttcagaggagctagcagtacctcacgcggagtatatgagcgagtgttggcactggcgctgtctatccgcctatcatccctccccagcccgaaaagctatggccctgagctctcctccctcgccctggcgcaaagtgtagtgtaacgtacgtcaagccatccatccatccatcggcagttcggcacccggccagccggcgggcgcgctgggctgcctgcggctacacgtacgtcgtaatcccgctctcccgcctcgcccgccccggtcgtcccgggctcccggccacaacaactacacatagacacatggcgcatgatgagccaggtttcgcgtacgcggactacttcgcggcggcggccggcgccgtggcgacgttcgtgccggaggtggacgtcggcggcggcggggaggagggtcttcacctctacggcctgcagccgcaccaccagcagcccggggtggagatgtacggggccaggggccacatgccgccggccgcgatgatggcggcgcacggcggcaaggccgcgctcggtctcgacgtcgcttctcccgtcgtcggcgggcacttcggggacgaccacctccggcaggctctccaggcgccgctgtcgctgtcgctccacgacgacgggaccgccgacgccgcgccgctggcgctgcaccaccaccaccaccatctcggcggcgtaccgcaggcgcagcagcaccagccgccgggggcgtggccacagccgcagcagcagggcgcgtggcacctgcgcggctccaggttcctgcgcccgacgcagcagctgctgcaggagttctgcaccctgcccgtggacaccgtcaccagcacgcccgcgaagccagcgagcgtggaggacggcgtcggctcctcgtcctcggcggcggccccgtcgcagcagataatccaggccatggatgcggccgagctgcagaggctcaaagccaagctctacgccatgctccaagaggtggagagaaggtaccggaggtaccgggagcagatgagggccgtggcggggtccttcgaggcggtggccggggagcgggcggcggcggcgtacacgaggctggcgcagcggacgatatccaggcacttccggagcgtgagggacggagtggcggcgcagatgcaggcggtgcgccgggcgctcggcgagaaggacgcggacgacggcggcgtcgtcccggcggcggccgggatgatggccaacaagggggagaccacgcccaggctgcgggtcatcgaccagtgcctgcggcagcaccgggcgtaccagaccggcgtcgtcctcgagagccagccgtggagaccgcagcgcggcctgccggagcgcgccgtctccatcctccgggcgtggatgttcgagcacttcttgcacccgtatccaagcgacgtggacaagcacatcctggcgcgccagaccggcctgtcacgcagccaagtacgcatacgcttgcttccttcttctatctaattttgccatcaactctccaacaaagtccgtacatagcaactagctagatgccgctcacccacaatcattttgcctagcttatttgcatagctaagcatcatatctgcatttgcgatgctgtcgtacgatggcacacgcatcggccggcgcgcgctgtgggtgccccgtcgatcgggtaccacgtcggagtcgtgcgcgcgcgcgtctgcatgcccttctctatcgagctagaagaagggaaagagtcttatcgtcaaccgctttctctatctctcttgcgcgcccaccgcgtgcgtgcgcgcactggcaggtctccaactggttcatcaacgcgagggttaggctgtggaagccgatggtggaggagatgtactcggaggagatgaaggaccccaaggagggcgcctgcagtaacgcgaacagcagcgtgaacactggcgccggctacgcctccgaggagctagggcagccgctggggcacgggggcgcctgtggtggcgtggacgagcagaagccgacgcgggcgcagctggtccacgacgccgggtcgctagcatcagccgtcagcatcggcagcagcagggaccagcagcagatcagcagcatcaacttccgcatgatggaccacctcgacttcgacgcgtacagcggcgaccccgccgcggccggcgggccagcagctgggttcggtggtgctggtgcttccggcggcgtgtcgctcacgctcgggctgcagcagcacgccgacggcgacccccacggcggcgtcaacatcgcgttcgccgcggctccgtcggccgcgcacgagttcctgttcatggcaggcggcggcgagcatcggatggtcgcggctggcgccgtgcacccgtcgtcgtcccacggccacggtcagttcgccgccagcatgcaaggcgacagcgccggtgtggcctcctcgcactaccaccggggcctcggcgccgccactgggttccagctcctccatgacctggccggctgatcgcattagcatggcaagggacggaccctgatgactaggccgatcgagcgctttaattggctttggaggttcacgcgcggccggttgacggggatgtgccaacggcagcagctagccggatggcattggcatgagcgcatggcgctcgcgcagcttgcgcgcttcggatttttgtagggtttagattcctctcgcttcaattcttggcacggtgtctctgtctacatgtgtatctgtatcgcttcggagaatgccattatctgccatggacatggacgtctcttgctccgcgcgaacactagcatctaagaatttttataaaatttactccctaaatcatcatataaaaagtcatatgagtaaaaattattttctatatatttatatccttcaacagtttttttaatattttgtatgtatattc

SEQ ID NO: 2159 - DNA, 1786 bp, Zea Mays
cgactgtgtactatactagtccgcatccgcacactagccagtagttgtccaattctccaagtggttcagaggagctagcagtacctcacgcggagtatatgagcgagtgttggcactggcgctgtctatccgcctatcatccctccccagcccgaaaagctatggccctgagctctcctccctcgccctggcgcaaaggtggagagaaggtaccggaggtaccgggagcagatgagggccgtggcggggtccttcgaggcggtggccggggagcgggcggcggcggcgtacacgaggctggcgcagcggacgatatccaggcacttccggagcgtgagggacggagtggcggcgcagatgcaggcggtgcgccgggcgctcggcgagaaggacgcggacgacggcggcgtcgtcccggcggcggccgggatgatggccaacaagggggagaccacgcccaggctgcgggtcatcgaccagtgcctgcggcagcaccgggcgtaccagaccggcgtcgtcctcgagagccagccgtggagaccgcagcgcggcctgccggagcgcgccgtctccatcctccgggcgtggatgttcgagcacttcttgcacccgtatccaagcgacgtggacaagcacatcctggcgcgccagaccggcctgtcacgcagccaagtctccaactggttcatcaacgcgagggttaggctgtggaagccgatggtggaggagatgtactcggaggagatgaaggaccccaaggagggcgcctgcagtaacgcgaacagcagcgtgaacactggcgccggctacgcctccgaggagctagggcagccgctggggcacgggggcgcctgtggtggcgtggacgagcagaagccgacgcgggcgcagctggtccacgacgccgggtcgctagcatcagccgtcagcatcggcagcagcagggaccagcagcagatcagcagcatcaacttccgcatgatggaccacctcgacttcgacgcgtacagcggcgaccccgccgcggccggcgggccagcagctgggttcggtggtgctggtgcttccggcggcgtgtcgctcacgctcgggctgcagcagcacgccgacggcgacccccacggcggcgtcaacatcgcgttcgccgcggctccgtcggccgcgcacgagttcctgttcatggcaggcggcggcgagcatcggatggtcgcggctggcgccgtgcacccgtcgtcgtcccacggccacggtcagttcgccgccagcatgcaaggcgacagcgccggtgtggcctcctcgcactaccaccggggcctcggcgccgccactgggttccagctcctccatgacctggccggctgatcgcattagcatggcaagggacggaccctgatgactaggccgatcgagcgctttaattggctttggaggttcacgcgcggccggttgacggggatgtgccaacggcagcagctagccggatggcattggcatgagcgcatggcgctcgcgcagcttgcgcgcttcggatttttgtagggtttagattcctctcgcttcaattcttggcacggtgtctctgtctacatgtgtatctgtatcgcttcggagaatgccattatctgccatggacatggacgtctcttgctccgcgcgaacactagcatctaagaatttttataaaatttactccctaaatcatcatataaaaagtcatatgagtaaaaattattttctatatatttatatccttcaacagtttttttaatattttgtatgtatattc

SEQ ID NO: 2160 - DNA, 2632 bp, Zea Mays
cgactgtgtactatactagtccgcatccgcacactagccagtagttgtccaattctccaagtggttcagaggagctagcagtacctcacgcggagtatatgagcgagtgttggcactggcgctgtctatccgcctatcatccctccccagcccgaaaagctatggccctgagctctcctccctcgccctggcgcaaagtgtagtgtaacgtacgtcaagccatccatccatccatcggcagttcggcacccggccagccggcgggcgcgctgggctgcctgcggctacacgtacgtcgtaatcccgctctcccgcctcgcccgccccggtcgtcccgggctcccggccacaacaactacacatagacacatggcgcatgatgagccaggtttcgcgtacgcggactacttcgcggcggcggccggcgccgtggcgacgttcgtgccggaggtggacgtcggcggcggcggggaggagggtcttcacctctacggcctgcagccgcaccaccagcagcccggggtggagatgtacggggccaggggccacatgccgccggccgcgatgatggcggcgcacggcggcaaggccgcgctcggtctcgacgtcgcttctcccgtcgtcggcgggcacttcggggacgaccacctccggcaggctctccaggcgccgctgtcgctgtcgctccacgacgacgggaccgccgacgccgcgccgctggcgctgcaccaccaccaccaccatctcggcggcgtaccgcaggcgcagcagcaccagccgccgggggcgtggccacagccgcagcagcagggcgcgtggcacctgcgcggctccaggttcctgcgcccgacgcagcagctgctgcaggagttctgcaccctgcccgtggacaccgtcaccagcacgcccgcgaagccagcgagcgtggaggacggcgtcggctcctcgtcctcggcggcggccccgtcgcagcagataatccaggccatggatgcggccgagctgcagaggctcaaagccaagctctacgccatgctccaagaggtggagagaaggtaccggaggtaccgggagcagatgagggccgtggcggggtccttcgaggcggtggccggggagcgggcggcggcggcgtacacgaggctggcgcagcggacgatatccaggcacttccggagcgtgagggacggagtggcggcgcagatgcaggcggtgcgccgggcgctcggcgagaaggacgcggacgacggcggcgtcgtcccggcggcggccgggatgatggccaacaagggggagaccacgcccaggctgcgggtcatcgaccagtgcctgcggcagcaccgggcgtaccagaccggcgtcgtcctcgagagccagccgtggagaccgcagcgcggcctgccggagcgcgccgtctccatcctccgggcgtggatgttcgagcacttcttgcacccgtatccaagcgacgtggacaagcacatcctggcgcgccagaccggcctgtcacgcagccaagtctccaactggttcatcaacgcgagggttaggctgtggaagccgatggtggaggagatgtactcggaggagatgaaggaccccaaggagggcgcctgcagtaacgcgaacagcagcgtgaacactggcgccggctacgcctccgaggagctagggcagccgctggggcacgggggcgcctgtggtggcgtggacgagcagaagccgacgcgggcgcagctggtccacgacgccgggtcgctagcatcagccgtcagcatcggcagcagcagggaccagcagcagatcagcagcatcaacttccgcatgatggaccacctcgacttcgacgcgtacagcggcgaccccgccgcggccggcgggccagcagctgggttcggtggtgctggtgcttccggcggcgtgtcgctcacgctcgggctgcagcagcacgccgacggcgacccccacggcggcgtcaacatcgcgttcgccgcggctccgtcggccgcgcacgagttcctgttcatggcaggcggcggcgagcatcggatggtcgcggctggcgccgtgcacccgtcgtcgtcccacggccacggtcagttcgccgccagcatgcaaggcgacagcgccggtgtggcctcctcgcactaccaccggggcctcggcgccgccactgggttccagctcctccatgacctggccggctgatcgcattagcatggcaagggacggaccctgatgactaggccgatcgagcgctttaattggctttggaggttcacgcgcggccggttgacggggatgtgccaacggcagcagctagccggatggcattggcatgagcgcatggcgctcgcgcagcttgcgcgcttcggatttttgtagggtttagattcctctcgcttcaattcttggcacggtgtctctgtctacatgtgtatctgtatcgcttcggagaatgccattatctgccatggacatggacgtctcttgctccgcgcgaacactagcatctaagaatttttataaaatttactccctaaatcatcatataaaaagtcatatgagtaaaaattattttctatatatttatatccttcaacagtttttttaatattttgtatgtatattc

SEQ ID NO: 2161 - DNA, 2529 bp, Zea Mays
ctagccagtagttgtccaattctccaagtggttcagaggagctagcagtacctcacgcggagtatatgagcgagtgttggcactggcgctgtctatccgcctatcatccctccccagcccgaaaagctatggccctgagctctcctccctcgccctggcgcaaagtgtagtgtaacgtacgtcaagccatccatccatccatcggcagttcggcacccggccagccggcgggcgcgctgggctgcctgcggctacacgtacgtcgtaatcccgctctcccgcctcgcccgccccggtcgtcccgggctcccggccacaacaactacacatagacacatggcgcatgatgagccaggtttcgcgtacgcggactacttcgcggcggcggccggcgccgtggcgacgttcgtgccggaggtggacgtcggcggcggcggggaggagggtcttcacctctacggcctgcagccgcaccaccagcagcccggggtggagatgtacggggccaggggccacatgccgccggccgcgatgatggcggcgcacggcggcaaggccgcgctcggtctcgacgtcgcttctcccgtcgtcggcgggcacttcggggacgaccacctccggcaggctctccaggcgccgctgtcgctgtcgctccacgacgacgggaccgccgacgccgcgccgctggcgctgcaccaccaccaccaccatctcggcggcgtaccgcaggcgcagcagcaccagccgccgggggcgtggccacagccgcagcagcagggcgcgtggcacctgcgcggctccaggttcctgcgcccgacgcagcagctgctgcaggagttctgcaccctgcccgtggacaccgtcaccagcacgcccgcgaagccagcgagcgtggaggacggcgtcggctcctcgtcctcggcggcggccccgtcgcagcagataatccaggccatggatgcggccgagctgcagaggctcaaagccaagctctacgccatgctccaagaggtatccaagcgacgtggacaagcacatcctggcgcgccagaccggcctgtcacgcagccaagtacgcatacgcttgcttccttcttctatctaattttgccatcaactctccaacaaagtccgtacatagcaactagctagatgccgctcacccacaatcattttgcctagcttatttgcatagctaagcatcatatctgcatttgcgatgctgtcgtacgatggcacacgcatcggccggcgcgcgctgtgggtgccccgtcgatcgggtaccacgtcggagtcgtgcgcgcgcgcgtctgcatgcccttctctatcgagctagaagaagggaaagagtcttatcgtcaaccgctttctctatctctcttgcgcgcccaccgcgtgcgtgcgcgcactggcaggtctccaactggttcatcaacgcgagggttaggctgtggaagccgatggtggaggagatgtactcggaggagatgaaggaccccaaggagggcgcctgcagtaacgcgaacagcagcgtgaacactggcgccggctacgcctccgaggagctagggcagccgctggggcacgggggcgcctgtggtggcgtggacgagcagaagccgacgcgggcgcagctggtccacgacgccgggtcgctagcatcagccgtcagcatcggcagcagcagggaccagcagcagatcagcagcatcaacttccgcatgatggaccacctcgacttcgacgcgtacagcggcgaccccgccgcggccggcgggccagcagctgggttcggtggtgctggtgcttccggcggcgtgtcgctcacgctcgggctgcagcagcacgccgacggcgacccccacggcggcgtcaacatcgcgttcgccgcggctccgtcggccgcgcacgagttcctgttcatggcaggcggcggcgagcatcggatggtcgcggctggcgccgtgcacccgtcgtcgtcccacggccacggtcagttcgccgccagcatgcaaggcgacagcgccggtgtggcctcctcgcactaccaccggggcctcggcgccgccactgggttccagctcctccatgacctggccggctgatcgcattagcatggcaagggacggaccctgatgactaggccgatcgagcgctttaattggctttggaggttcacgcgcggccggttgacggggatgtgccaacggcagcagctagccggatggcattggcatgagcgcatggcgctcgcgcagcttgcgcgcttcggatttttgtagggtttagattcctctcgcttcaattcttggcacggtgtctctgtctacatgtgtatctgtatcgcttcggagaatgccattatctgccatggacatggacgtctcttgctccgcgcgaacactagcatctaagaatttttataaaatttactccctaaatcatcatataaaaagtcatatgagtaaaaattattttctatatatttatatccttcaacagtttttttaatattttgtatgtatattc

SEQ ID NO: 2162 - DNA, 261 bp, Zea Mays
gtctcgtttttccagaagggacacatgtaaactgcagctgcgattgtacctatacacgcacgcaaaaaaaaaaaaaaaaaactgcaggaggccgaccgggcgtccaacacggctcgtcctgcgtctgcgtcgcagctgcaggaggccggggcaataaaatgctgataatgagctagcatacgaccgtttggtacttacagtatgttcacttgtggcagtgacagtagtttacacgagtaacaaatgtatcttagcgtacaa

SEQ ID NO: 2163 - DNA, 941 bp, Zea Mays
gccctttgggtgtttgatggcctccttttaacctcacctgcatagagaaagttagctagttcagtaaagcaaaaggatctcataacttttcttgtcagcaagacattacaattcttttatatatatatggtccgtttatctggatgcaataataattagatagttttattaaggtggttgcagatgcagtagattatatatctagtctggcaggatgaggatgcaactaggaggctgtcttaacgcaacaaaatgcctggattattcctgagaataatcatgccacccactttgctcaacgtcatgggcctcgcctagctgcactgcaaccgcgcaacgggtacgcgcgaagaaagtctctgatttttttttataaaacaaaaaaaaaggtttttcgcatctaggagtaggagctgtattgcgttgcgcagacgtgaagcttccggcagaggaattcgcagcacggaaggtatggcgcggcgcgggatcatgcatgcatgtaagatttggttgcgtcggtactcacggcgccttcaacgtcgatcctgtacacgagcattcggcggcgctcgcggcagctggtccggtacgccacggcgaggtgcgcggcggcgagcgccagggagaggaggagcatggcctccgggccgccggcagcggctacggcgcgagcgccacccgcggcgcggcgcggcagcacggccgcggccttggcgagcacgtagcacacggaccccgccgcgcacgccaccaccacccctaggtacgcgccgcctccgccgcacgccacgtacgcgcctgccatagatatagtgccgcgagcccgcgacacgacacgaggagcgggtcagttattacagccgagctacgaggggagcagggagggacccgagagccggcggcgggatactgacagaggatgagcagcgcgcgcgccgcgg

SEQ ID NO: 2164 - DNA, 700 bp, Zea Mays
tgaggtctatgtgtgtacgatggctgaaagagactatgctttagaaatgtggagattgcttgatccagattcaagattaattaattctgttcaacttcatgataggatggtgtgcgtaaaatctggtttaaagaagtccttgctaaatgtcttccatgatggttcttgtcatcctggtatggcattagtaattgatgatcgtctgaaagtttgggatgagaaggatcaattacgagttcatgtggttcctgcatttactccatattatgctccacaggcagaggcaaattgttctatcccggttctttgtgtagccagaaacgttgcatgcaatgttaggggtggtttcttcaatgttcatttgtttgcattttgctgtcaacctaatacttctgctacgagactccctcatcagcttctaatctcaacgaacagccactgccatggacttgtacatctcgacacatcttgtctgaaatcgtctagaccaaacaccatagttctatctgggcttagtggtagtggcaaaaccactatttactaccagaaagacaaagtaaaacctgtgcatgttattgatgttcctggtcatgctaggctcaaacccaaacttgatgaagtcctgcctaaagttgctgcggttgtctttgttgttgatgctcaagatttcttgtctagcatgcaagctgctgcagagtaa

SEQ ID NO: 2165 - DNA, 1295 bp, Zea Mays
gggacctgcccaggaggagacgggagctcgaatcaatcctccacccgtttccagcccctcgtcccggagccccgatccgcctcccgtctcctcctgggcaggtcccccttttccgcgtgtgcgttggccggccggttcccgatgagggggttgctggcggtggaggccgcgggcgcggcgtcggtcccggcctcggtactccacggcgccgtggactggtggcgcgacgtcaacgagtcgccgctgtggcaggaccgcatatttcacgcgctcgccgtgctctacggcatcgtctcggccgtcgcgctggtccaattaatcagaatcgagtgtagggtgccagagtatggatggacaacgcagaaggtgttccattttctaaacttccttgtgaacggcgtgcggtctgtcgtgtttgtgctgcggcgaaatgtgcaacttgtagagcctgagataatacaacatgtgcttctggatatgcccgggcttgcattcttcacgacatatgcacttttagtgctcttctgggctgagatttattatcaggcacgtgcaatgtcgactgatgggcttagaccaactttctattggatcaacggtgtggtctatgcaattcagataattctatggttggttttatggtggaaaccagttcgagttatggtcattttgccaaagatgttctttgcaggtgtatcactatttgctgcccttggatttgttctgtatggaggaaggttatttctgatgttgcagcgttttcctgtagattcgaaaggaaggagaaagaaattgcaggaggttggctatgtgactaccatctgtttttcttgtttcttgatcagatgtgtcatgctgtgcctcaattcatttgataaagaagcagatcttgatgtcctgaaccatccaatcctgaacttcctctattacctgctggttgagatagtgccttcggctctggtgctcttcattctacggaaactgcctccaaaacgtgggatcacacaatatcacccaatccattagagagcaggccttggtggacaggcaaatgttttctggtggattgtcttatatagcgtggtaaatacagaaggcagagtgaaaagtaccacctttgctctcgagcttgcccagcttttcatacgagggaaggctttagaatctcaggtttagaaaatgcgatctctttctctcagatttagaaaatgtaaaatgtaatttatataactttaatattctcagtgcatatcatttgttcacatctcagtaatcgtttgcatgtttcatttggt

SEQ ID NO: 2166 - DNA, 1269 bp, Zea Mays
aaatcctaaccttctctccttccttttgatcttcccctctacgcgatcgaaaccgaagctcgaatcaatcctccacccgtttccagcccctcgtcccggagccccgatccgcctcccgtctcctcctgggcaggtcccccttttccgcgtgtgcgttggccggccggttcccgatgagggggttgctggcggtggaggccgcgggcgcggcgtcggtcccggcctcggtactccacggcgccgtggactggtggcgcgacgtcaacgagtcgccgctgtggcaggaccgcatatttcacgcgctcgccgtgctctacggcatcgtctcggccgtcgcgctggtccaattaatcagaatcgagtgtagggtgccagagtatggatggacaacgcagaaggtgttccattttctaaacttccttgtgaacggcgtgcggtctgtcgtgtttgtgctgcggcgaaatgtgcaacttgtagagcctgagataatacaacatgtgcttctggatatgcccgggcttgcattcttcacgacatatgcacttttagtgctcttctgggctgagatttattatcaggcacgtgcaatgtcgactgatgggcttagaccaactttctattggatcaacggtgtggtctatgcaattcagttgacatcaatgtatttcagataattctatggttggttttatggtggaaaccagttcgagttatggtcattttgccaaagatgttctttgcagattcgaaaggaaggagaaagaaattgcaggaggttggctatgtgactaccatctgtttttcttgtttcttgatcagatgtgtcatgctgtgcctcaattcatttgataaagaagcagatcttgatgtcctgaaccatccaatcctgaacttcctctattacctgctggttgagatagtgccttcggctctggtgctcttcattctacggaaactgcctccaaaacgtgggatcacacaatatcacccaatccattagagagcaggccttggtggacaggcaaatgttttctggtggattgtcttatatagcgtggtaaatacagaaggcagagtgaaaagtaccacctttgctctcgagcttgcccagcttttcatacgagggaaggctttagaatctcaggtttagaaaatgcgatctctttctctcagatttagaaaatgtaaaatgtaatttatataactttaatattctcagtgcatatcatttgttcacatctcagtaatcgtttgcatgtttcatttggt

SEQ ID NO: 2167 - DNA, 1313 bp, Zea Mays
aaatcctaaccttctctccttccttttgatcttcccctctacgcgatcgaaaccgaagctcgaatcaatcctccacccgtttccagcccctcgtcccggagccccgatccgcctcccgtctcctcctgggcaggtcccccttttccgcgtgtgcgttggccggccggttcccgatgagggggttgctggcggtggaggccgcgggcgcggcgtcggtcccggcctcggtactccacggcgccgtggactggtggcgcgacgtcaacgagtcgccgctgtggcaggaccgcatatttcacgcgctcgccgtgctctacggcatcgtctcggccgtcgcgctggtccaattaatcagaatcgagtgtagggtgccagagtatggatggacaacgcagaagtgcggtctgtcgtgtttgtgctgcggcgaaatgtgcaacttgtagagcctgagataatacaacatgtgcttctggatatgcccgggcttgcattcttcacgacatatgcacttttagtgctcttctgggctgagatttattatcaggcacgtgcaatgtcgactgatgggcttagaccaactttctattggatcaacggtgtggtctatgcaattcagttgacatcaatgtatttcagataattctatggttggttttatggtggaaaccagttcgagttatggtcattttgccaaagatgttctttgcaggtgtatcactatttgctgcccttggatttgttctgtatggaggaaggttatttctgatgttgcagcgttttcctgtagattcgaaaggaaggagaaagaaattgcaggaggttggctatgtgactaccatctgtttttcttgtttcttgatcagatgtgtcatgctgtgcctcaattcatttgataaagaagcagatcttgatgtcctgaaccatccaatcctgaacttcctctattacctgctggttgagatagtgccttcggctctggtgctcttcattctacggaaactgcctccaaaacgtgggatcacacaatatcacccaatccattagagagcaggccttggtggacaggcaaatgttttctggtggattgtcttatatagcgtggtaaatacagaaggcagagtgaaaagtaccacctttgctctcgagcttgcccagcttttcatacgagggaaggctttagaatctcaggtttagaaaatgcgatctctttctctcagatttagaaaatgtaaaatgtaatttatataactttaatattctcagtgcatatcatttgttcacatctcagtaatcgtttgcatgtttcatttggt

SEQ ID NO: 2168 - DNA, 811 bp, Zea Mays
gaaaacgaaaattattttagtgtttactcatcgtttccgaccgttttcaccctacattaaaccgaccatcaatcagattcttcatccacccaggacgagctcaaaaatgaaaccaaacaactcagcctgcactacttgaaccttgccagcttaccctagctccaaaaagcagccaggcaggattggaccaccccaaccaatcaggccctacatgcttattatgcacaggtttctatacagagcagaaaaagaaaggtaacatatcaaaattcagaagtgtctactgtctagctatcttgttctacggtttcaggtttattttctgtgctgtcctggtgtactgacaatggttctgtagcgcacgagtctgctcttcccatccctcgctgctcagggacaggttgttcatgtgaagcggttccaggactgccatcctgaccctgataaggtgcatctgatggctctactttacacaagccggcttccatccccctatgctcgggaacaaggagttcaaggaatgcttcagaactgccatccggaacctgacatggtatatctggtggtcctgcttcacgcaagtctatccccaccccaccctgctcaggaacaggcagttcacaggaaccagctccagaattgccatcctctgtggtacaaagaggtttatctgcactttgttttagtgttacttctgaggactcatcctgtattggtaaatctgacgattcagcttcacatacacctctcttcactgctccctgtctagaagcatgctgttcaggggagggagctccagaaccaccatgac

SEQ ID NO: 2169 - DNA, 559 bp, Zea Mays
taaaagcatcaaagaaacatctgcgcctttttgaatcacggactaaatcagcccatattgaattgctagccagtaaagtggttccatttccaaggatccaaaggcagtacctattatgagaaatatagcaattactgaactaaaaatgcagtggaacagtgttttaactgtgacttcactatactagggagtctagggcaacatacttggctcttgtcaacgccacattgattctcccagaatcagagagaaagcctactttcccatctttattggacctaactgttgaaatcaaaataatgtcctcctcaccaccttgaaatccatcaatagattttactgtaacagatagaaagtcatgcttctcaaactttcgtccaagtctatcttgcaatgcaatcacttgagctgtataaggagatattataccaacacttgttctctgcctcttctcagtgcactctacaattgttttagacaaaagaaaaggacaccaattagctttatcaaaaactctggagaacagttaatctagccaataaaatatttctttcaggat

SEQ ID NO: 2170 - DNA, 2006 bp, Zea Mays
ctgtacgccgcccctgttcagatttttttcagcgcccttatctcctacgcgcgtgctcatcgatccatttcagctgccgcgcgtccctgcggtcttccagctccagcgtcggctgctcctccctggccacccgcgccccttgcttctcccttctcacgctccccgtcgagctccctggtcgccgcgcagtcgagctccctcagctcgctcctcctgtgccgcgcgccagcccctggttcggctctactcctccctgcttgccgttcctatccccctgccatggagtccgtcgtcagtccgagctcgcccatcctctgctcggtttcaacttggtcgtgcctgcagcttctcccatagtgagctccctccactgccctaggttcccatgattatcctcatgcccgaccacggtacaacagcaacagccatgaaaccccttcgtgtcgcgccctcgatatgctcgatgaaataccgcagcgagctccgctccggatctgcgcagccccggccttgttgtcgacctcagtacgataagtgatcacgtgatgtgaaggactagagctcggtcgaccacaagatggtgttaagtattggtttcttcgcaaggtgatgctaatgaacaaacttaaggatggacagactgaaccagtgccaacacacaaggctggtcgccaagtggtcatcgtctaacaacactaacctagtgttatcccaggcaagccccagtgcatttgccacctccttgctgttttaaaaacattttatcacttatatgctgcattaggtggtaggagttgaatgggtaaacctttgctgcataacttccttgaattattgattatcatccttgatacctgatttgaaaatctagatatgcttagcctgcttatagacaaggaacaaaatattttgatgtatgaatcatgtttttacaaagaaaaaggggctggaatgatgaaggtatcaaaggtcttgatgacttcatcatttcggtagggtacctctaataggttccagattttcagaattattttaatatgagaccagacgttgagcaggaaaggtcgcccgtttgtgtcgattaaggaccgtaccgaaagtaggcttgctgatctaggaccctttaactggccacatgcctcatcatgggtaagcttagcctcggtcggaccaataccagaaaggccggcctgcaatgggagtggagagatggcgagagtatcgtgtatccacctggcaagaggctggatggtggggtactgagctctcggttagcggggacctgttctggtcttaagaaacccgtgggcgagttgacatatgcaagggttaagtgctacatatgtcgtgtggttggagatcctcagctgagtattaatcgattcggatcgctgttacttctcggatatgaagactagatcactgccctgcatcataattaacaagtgaaactaaagatgttaaaatgaagctagtgtagaacaattgaatgctctagattaggcaaatctagattcaggaaaagtacttaatttgtgaagtaaaagttggcataaggatccactactagtaagcttttctgcaaaaacgagtctttgaaatttgatgagctttaccttgattcccaacaaaccagcatatccttgagagtcttttctttagtcgggtaagtcttgctgagtaattgcgtactcagggctttattccctattgtttttcaggttataagtttgttctgttgtggatagtgtggatggtgctaagtgccggtgggctcggcctttttatataagtatatcacatctttagcttctttattgaggattgtcaattaagctagcatgtattttaaaaactataaatattttattcattttaaattataattcttttgaatcactctcttttgtaatcactccgataattgtataatgtaaacttattgtaacatgtaatcattttgcaatagagaatttatttccactgcaaatgatggtgtgtgattt

SEQ ID NO: 2171 - DNA, 1967 bp, Zea Mays
atccatttcagctgccgcgcgtccctgcggtcttccagctccagcgtcggctgctcctccctggccacccgcgccccttgcttctcccttctcacgctccccgtcgagctccctggtcgccgcgcagtcgagctccctcagctcgctcctcctgtgccgcgcgccagcccctggttcggctctactcctccctgcttgccgttcctatccccctgccatggagtccgtcgtcagtccgagctcgcccatcctctgctcggtttcaacttggtcgtgcctgcagcttctcccatagtgagctccctccactgccctaggttcccatggtgagctccctccactgccctagattatcctcatgcccgaccacggtacaacagcaacagccatgaaaccccttcgtgtcgcgccctcgatatgctcgatgaaataccgcagcgagctccgctccggatctgcgcagccccggccttgttgtcgacctcagtacgataagtgatcacgtgatgtgaaggactagagctcggtcgaccacaagatggtgttaagtattggtttcttcgcaaggtgatgctaatgaacaaacttaaggatggacagactgaaccagtgccaacacacaaggctggtcgccaagtggtcatcgtctaacaacactaacctagtgttatcccaggcaagccccagtgcatttgccacctccttgctgttttaaaaacattttatcacttatatgctgcattaggtggtaggagttgaatgggtaaacctttgctgcataacttccttgaattattgattatcatccttgatacctgatttgaaaatctagatatgcttagcctgcttatagacaaggaacaaaatattttgatgtatgaatcatgtttttacaaagaaaaaggggctggaatgatgaaggtatcaaaggtcttgatgacttcatcatttcggtagggtacctctaataggttccagattttcagaattattttaatatgagaccagacgttgagcaggaaaggtcgcccgtttgtgtcgattaaggaccgtaccgaaagtaggcttgctgatctaggaccctttaactggccacatgcctcatcatgggtaagcttagcctcggtcggaccaataccagaaaggccggcctgcaatgggagtggagagatggcgagagtatcgtgtatccacctggcaagaggctggatggtggggtactgagctctcggttagcggggacctgttctggtcttaagaaacccgtgggcgagttgacatatgcaagggttaagtgctacatatgtcgtgtggttggagatcctcagctgagtattaatcgattcggatcgctgttacttctcggatatgaagactagatcactgccctgcatcataattaacaagtgaaactaaagatgttaaaatgaagctagtgtagaacaattgaatgctctagattaggcaaatctagattcaggaaaagtacttaatttgtgaagtaaaagttggcataaggatccactactagtaagcttttctgcaaaaacgagtctttgaaatttgatgagctttaccttgattcccaacaaaccagcatatccttgagagtcttttctttagtcgggtaagtcttgctgagtaattgcgtactcagggctttattccctattgtttttcaggttataagtttgttctgttgtggatagtgtggatggtgctaagtgccggtgggctcggcctttttatataagtatatcacatctttagcttctttattgaggattgtcaattaagctagcatgtattttaaaaactataaatattttattcattttaaattataattcttttgaatcactctcttttgtaatcactccgataattgtataatgtaaacttattgtaacatgtaatcattttgcaatagagaatttatttccactgcaaatgatggtgtgtgattt

SEQ ID NO: 2172 - DNA, 3292 bp, Zea Mays
ctcggccgcacgcgagccaacgcgtggccgcacaccacggacccgaaattatacatcaaatcaaccaaattgcagcgttgcgtccggtcttcctttcccaactcggtcgacgcgttcgccacggctgcgcagtcctcctcctcgcctccgatcccctcccttcgacgatgcgagcacacccgctcatcctcttcgtacctgcaccgccacctcatcctcttcctcgccgcgccgacacccaccgcgctctctccctcccgcggcgacgcccttcgccaacgagaaccgcacgccgtcgtctcccacgggcactgtcgcacgctgggccacgctgcagtcggtggcgccgccacaccttcttcctccatgtgccgtcgccgccctattcttcttcgagatgcagccgctagcgctgccctcctcccagctccccttcatggccgcgtgcagggactatgtgccagtgttagtttttggtaccagtctacaggtctttcatttctacattcaaaggtgagaatcaatcatgttcggctccctttaaaaaagtaatgtttcccaatccttcatagtaaaactaaacacacattgtaaagacatttgtcgtacgagatcttttatagaggtgtgttttaacccaaaggcaggctgtggagatcaattccagatattgccttcttgttgtgtctcagttgattttttttagcattgaacgtaacttacagtttgacataacaagcggtgaatgtaacactacagtttaactcaacaagccattggctgtagctcacaatcagcttggctgaactgccaaaaaaaatacaagcagtccattacagttcaacttaacaagagcagttctgttggtaaagccgatgcaaataagtaccaattgttagttaggaagggaaaagtgtcagcagtcaatggctgattaaaaaactaaatgtctttgaatttgttgggccgtgtgcctagtgcctggcctattaactggcttgttcgctgcggctttaatccgactgcgactgcggcttctacagtattttgtctctaggaattgcagctgcaatagtattttgcagctgcaacagtgctcccgcatgggcagccgaacaagctaaacatgtacatatatacttattataccagtgaggtgtgtgtagagtagtgtactctgtactcttccagaaaactttacatggtaccggaaccgggaccagcggcgacggtgtagtggtgaggaggcagaggagtgccttcggcctcgacggaagaaggccgccgatggagaagaagaccagctgggagcgtggcgcggcgtcgcggtcgtgcacgaggaggaggagcctgcacttgccggagggagaagaagcatgtagcacggtgcggtgctgcagtcgtgcgtgagtaggttcttattattgttttctatcctgctggatatgtagtcatgacagttaaattatgtacaactatgattacaaacgggaatacaagctaggagttgagaccacaatccttatgaaaagttacactgtaagtatgtcgtcctgcttgcatttcttccatgttccttttctcactgtaagcttagtttttgtgatcagcttccagatagaagagttattaaagtagacactaaacgattccaacctcctgaatctctttttactcctgtaacacttccatttatatttatacataatggtattgtcaacagtacacatagtttccatcagtttgttaatagtgcacctttagattgaatgagcttcttgcagagcaccaaggattaggcattgaaatgtgtggataaaaatattagaggaccacacatcattattatgcaacattgtctatgcacatgaacataattgtatcggtagtaagccgccagcatgtttgaaagttaaaaatgtgaattaagaacgaattatcgtatcctgctatacttatgcaacctaccaagaattagggcattgtagaaaccatataaagtattgagatcaatttgaatttgtctgcctcatgattttttgatacctgacctttatgaaggtagaggacaacattaaggatgatcatagactaccaacattcttcttcagattaaatgttaaattcagtaatttaatttgtttcagtaatacaagattagaccatccctgcacatctgcctatctgcctggcaaaatattatcgtcgcttccaagattgagaatatggctgcgtttggaaagccttagattctagcattggtgatcggttgtgtgtacgtgtctcccgtctgtgaaaaatttatgatcccgaggatgagtataagcttttccatgctcatatggtcctcatcgacgaggaggctggcagtgctcatgctcaaatataccctccactcactgacgttttcaaacctctgataaaggagggcaatgtctacaatgtctcctacattcagatcaagaaagctaataggatgtacaagcatgttgacaacgatatcatgatcggtttcacaaaatggatcctatgctgcctcaacaaacccgcggtttgaacacgtgacagatgacggcttagcttctgtggatggacatcttggtcgcttttgtagatggaatgtttggttggcttttgtagacagaattaggctgcacttgtgattgtgtaacgcttatgagcatggttgtgtggactgtgtcggccaaagtatacctcccaatgccttgtatatatcacatgcttagctgtctatccccaactaggtcgcctgataatagacttcgatcatgtcatgctattctataacaattttcgctgtaacttgcctaatcgtcatactatggtacacgcttaaatttggtgctgcaactttattgtggattataaaagagagaaaaatacagcataaagttataatgtcaaattgccacagctcactgttaagacttatttgatctagtgaaacctagttatctattagtaaaaattaattactgacaagtatacaggtgcatcatgaaaaccaaagattaagtgtgatcaggtagagctagagcaaatttgagggggtgtacttgtcttgcgggtgcatagctttttagtatgaaggtgcagatgaggtgaaaaattgatcataatcactgtttttcatttttgctgtgggtgcgctcgcgccacagttttatacatagtagctccgcccctgaatgagataaataattaaatcttagtttttctgaagagtatagtgcacattactatgccactaactaaaccctacattttgaac

SEQ ID NO: 2173 - DNA, 2978 bp, Zea Mays
atcaaatcaaccaaattgcagcgttgcgtccggtcttcctttcccaactcggtcgacgcgttcgccacggctgcgcagtcctcctcctcgcctccgatcccctcccttcgacgatgcgagcacacccgctcatcctcttcgtacctgcaccgccacctcatcctcttcctcgccgcgccgacacccaccgcgctctctccctcccgcggcgacgcccttcgccaacgagaaccgcacgccgtcgtctcccacgggcactgtcgcacgctgggccacgctgcagtcggtggcgccgccacaccttcttcctccatgtgccgtcgccgccctattcttcttcgagatgcagccgctagcgctgccctcctcccagctccccttcatggccgcgtgcagggactatgtgccagtgttagtttttggtaccagtctacaggtctttcatttctacattcaaagagtagtgtactctgtactcttccagaaaactttacatggtaccggaaccgggaccagcggcgacggtgtagtggtgaggaggcagaggagtgccttcggcctcgacggaagaaggccgccgatggagaagaagaccagctgggagcgtggcgcggcgtcgcggtcgtgcacgaggaggaggagcctgcacttgccggagggagaagaagcatgtagcacggtgcggtgctgcagtcgtgcgtgagtaggttcttattattgttttctatcctgctggatatgtagtcatgacagttaaattatgtacaactatgattacaaacgggaatacaagctaggagttgagaccacaatccttatgaaaagttacactgtaagtatgtcgtcctgcttgcatttcttccatgttccttttctcactgtaagcttagtttttgtgatcagcttccagatagaagagttattaaagtagacactaaacgattccaacctcctgaatctctttttactcctgtaacacttccatttatatttatacataatggtattgtcaacagtacacatagtttccatcagtttgttaatagtgcacctttagattgaatgagcttcttgcagagcaccaaggattaggcattgaaatgtgtggataaaaatattagaggaccacacatcattattatgcaacattgtctatgcacatgaacataattgtatcggtagtaagccgccagcatgtttgaaagttaaaaatgtgaattaagaacgaattatcgtatcctgctatacttatgcaacctaccaagaattagggcattgtagaaaccatataaagtattgagatcaatttgaatttgtctgcctcatgattttttgatacctgacctttatgaaggtagaggacaacattaaggatgatcatagactaccaacattcttcttcagattaaatgttaaattcagtaatttaatttgtttcagtaatacaagattagaccatccctgcacatctgcctatctgcctggcaaaatattatcgtcgcttccaagattgagaatatggctgcgtttggaaagccttagattctagcattgggtaacatgtctattatcccacattatctaagtttaactagatactcatattttatgaaaaaaactgcactgaaaaatcacgaggtgctagatgttgcgctagcagcagcatcatagcacatcttgtctattccagttacaaatgtgcatattgtagaatatttttgtaacatactgctgctcccttccattcgttttggttttggcaattttctatgcacgtgtcgctcatccatggtacctcttttgtactaagatcattgtgacatttaacatgtttacatcatctcttactcgacacatactcactggactaatgttcttgtccctccttttgctttccttagcagatggcggaggttctaataagtaaccttatgattggaaattgcagtgatcggttgtgtgtacgtgtctcccgtctgtgaaaaatttatgatcccgaggatgagtataagcttttccatgctcatatggtcctcatcgacgaggaggctggcagtgctcatgctcaaatataccctccactcactgacgttttcaaacctctgataaaggagggcaatgtctacaatgtctcctacattcagatcaagaaagctaataggatgtacaagcatgttgacaacgatatcatgatcggtttcacaaaatggatcctatgctgcctcaacaaacccgcggtttgaacacgtgacagatgacggcttagcttctgtggatggacatcttggtcgcttttgtagatggaatgtttggttggcttttgtagacagaattaggctgcacttgtgattgtgtaacgcttatgagcatggttgtgtggactgtgtcggccaaagtatacctcccaatgccttgtatatatcacatgcttagctgtctatccccaactaggtcgcctgataatagacttcgatcatgtcatgctattctataacaattttcgctgtaacttgcctaatcgtcatactatggtacacgcttaaatttggtgctgcaactttattgtggattataaaagagagaaaaatacagcataaagttataatgtcaaattgccacagctcactgttaagacttatttgatctagtgaaacctagttatctattagtaaaaattaattactgacaagtatacaggtgcatcatgaaaaccaaagattaagtgtgatcaggtagagctagagcaaatttgagggggtgtacttgtcttgcgggtgcatagctttttagtatgaaggtgcagatgaggtgaaaaattgatcataatcactgtttttcatttttgctgtgggtgcgctcgcgccacagttttatacatagtagctccgcccctgaatgagataaataattaaatcttagtttttctgaagagtatagtgcacattactatgccactaactaaaccctacattttgaac

SEQ ID NO: 2174 - DNA, 2504 bp, Zea Mays
caaattgcagcgttgcgtccggtcttcctttcccaactcggtcgacgcgttcgccacggctgcgcagtcctcctcctcgcctccgatcccctcccttcgacgatgcgagcacacccgctcatcctcttcgtacctgcaccgccacctcatcctcttcctcgccgcgccgacacccaccgcgctctctccctcccgcggcgacgcccttcgccaacgagaaccgcacgccgtcgtctcccacgggcactgtcgcacgctgggccacgctgcagtcggtggcgccgccacaccttcttcctccatgtgccgtcgccgccctattcttcttcgagatgcagccgctagcgctgccctcctcccagctccccttcatggccgcgtgcagggactatgtgccagtgttagtttttggtaccagtctacaggtctttcatttctacattcaaagagtagtgtactctgtactcttccagaaaactttacatggtaccggaaccgggaccagcggcgacggtgtagtggtgaggaggcagaggagtgccttcggcctcgacggaagaaggccgccgatggagaagaagaccagctgggagcgtggcgcggcgtcgcggtcgtgcacgaggaggaggagcctgcacttgccggagggagaagaagcatgtagcacggtgcggtgctgcagtcgtgcgtgagtaggttcttattattgttttctatcctgctggatatgtagtcatgacagttaaattatgtacaactatgattacaaacgggaatacaagctaggagttgagaccacaatccttatgaaaagttacactaggacaacattaaggatgatcatagactaccaacattcttcttcagattaaatgttaaattcagtaatttaatttgtttcagtaatacaagattagaccatccctgcacatctgcctatctgcctggcaaaatattatcgtcgcttccaagattgagaatatggctgcgtttggaaagccttagattctagcattgggtaacatgtctattatcccacattatctaagtttaactagatactcatattttatgaaaaaaactgcactgaaaaatcacgaggtgctagatgttgcgctagcagcagcatcatagcacatcttgtctattccagttacaaatgtgcatattgtagaatatttttgtaacatactgctgctcccttccattcgttttggttttggcaattttctatgcacgtgtcgctcatccatggtacctcttttgtactaagatcattgtgacatttaacatgtttacatcatctcttactcgacacatactcactggactaatgttcttgtccctccttttgctttccttagcagatggcggaggttctaataagtaaccttatgattggaaattgcagtgatcggttgtgtgtacgtgtctcccgtctgtgaaaaatttatgatcccgaggatgagtataagcttttccatgctcatatggtcctcatcgacgaggaggtacgcgacctgcttactacatgaagcatgctgcataccagatcaaagaaattttaatatggggctggcagtgctcatgctcaaatataccctccactcactgacgttttcaaacctctgataaaggagggcaatgtctacaatgtctcctacattcagatcaagaaagctaataggatgtacaagcatgttgacaacgatatcatgatcggtttcacaaaatggatcctatgctgcctcaacaaacccgcggtttgaacacgtgacagatgacggcttagcttctgtggatggacatcttggtcgcttttgtagatggaatgtttggttggcttttgtagacagaattaggctgcacttgtgattgtgtaacgcttatgagcatggttgtgtggactgtgtcggccaaagtatacctcccaatgccttgtatatatcacatgcttagctgtctatccccaactaggtcgcctgataatagacttcgatcatgtcatgctattctataacaattttcgctgtaacttgcctaatcgtcatactatggtacacgcttaaatttggtgctgcaactttattgtggattataaaagagagaaaaatacagcataaagttataatgtcaaattgccacagctcactgttaagacttatttgatctagtgaaacctagttatctattagtaaaaattaattactgacaagtatacaggtgcatcatgaaaaccaaagattaagtgtgatcaggtagagctagagcaaatttgagggggtgtacttgtcttgcgggtgcatagctttttagtatgaaggtgcagatgaggtgaaaaattgatcataatcactgtttttcatttttgctgtgggtgcgctcgcgccacagttttatacatagtagctccgcccctgaatgagataaataattaaatcttagtttttctgaagagtatagtgcacattactatgccactaactaaaccctacattttgaac

SEQ ID NO: 2175 - DNA, 2406 bp, Zea Mays
ccggtcttcctttcccaactcggtcgacgcgttcgccacggctgcgcagtcctcctcctcgcctccgatcccctcccttcgacgatgcgagcacacccgctcatcctcttcgtacctgcaccgccacctcatcctcttcctcgccgcgccgacacccaccgcgctctctccctcccgcggcgacgcccttcgccaacgagaaccgcacgccgtcgtctcccacgggcactgtcgcacgctgggccacgctgcagtcggtggcgccgccacaccttcttcctccatgtgccgtcgccgccctattcttcttcgagatgcagccgctagcgctgccctcctcccagctccccttcatggccgcgtgcagggactatgtgccagtgttagtttttggtaccagtctacaggtctttcatttctacattcaaagcggcgacggtgtagtggtgaggaggcagaggagtgccttcggcctcgacggaagaaggccgccgatggagaagaagaccagctgggagcgtggcgcggcgtcgcggtcgtgcacgaggaggaggagcctgcacttgccggagggagaagaagcatgtagcacggtgcggtgctgcagtcgtgcgtgagtaggttcttattattgttttctatcctgctggatatgtagtcatgacagttaaattatgtacaactatgattacaaacgggaatacaagctaggagttgagaccacaatccttatgaaaagttacactgtgagccttcttcacatattgagcaacaataatcatcttcgtggtcatggtggtgatgaccatgatgcgcctagaaatgcatgtgtgaaatattcaatatatgtcaccatttctattttcagtaatacaagattagaccatccctgcacatctgcctatctgcctggcaaaatattatcgtcgcttccaagattgagaatatggctgcgtttggaaagccttagattctagcattgggtaacatgtctattatcccacattatctaagtttaactagatactcatattttatgaaaaaaactgcactgaaaaatcacgaggtgctagatgttgcgctagcagcagcatcatagcacatcttgtctattccagttacaaatgtgcatattgtagaatatttttgtaacatactgctgctcccttccattcgttttggttttggcaattttctatgcacgtgtcgctcatccatggtacctcttttgtactaagatcattgtgacatttaacatgtttacatcatctcttactcgacacatactcactggactaatgttcttgtccctccttttgctttccttagcagatggcggaggttctaataagtaaccttatgattggaaattgcagtgatcggttgtgtgtacgtgtctcccgtctgtgaaaaatttatgatcccgaggatgagtataagcttttccatgctcatatggtcctcatcgacgaggaggctggcagtgctcatgctcaaatataccctccactcactgacgttttcaaacctctgataaaggagggcaatgtctacaatgtctcctacattcagatcaagaaagctaataggatgtacaagcatgttgacaacgatatcatgatcggtttcacaaaatggatcctatgctgcctcaacaaacccgcggtttgaacacgtgacagatgacggcttagcttctgtggatggacatcttggtcgcttttgtagatggaatgtttggttggcttttgtagacagaattaggctgcacttgtgattgtgtaacgcttatgagcatggttgtgtggactgtgtcggccaaagtatacctcccaatgccttgtatatatcacatgcttagctgtctatccccaactaggtcgcctgataatagacttcgatcatgtcatgctattctataacaattttcgctgtaacttgcctaatcgtcatactatggtacacgcttaaatttggtgctgcaactttattgtggattataaaagagagaaaaatacagcataaagttataatgtcaaattgccacagctcactgttaagacttatttgatctagtgaaacctagttatctattagtaaaaattaattactgacaagtatacaggtgcatcatgaaaaccaaagattaagtgtgatcaggtagagctagagcaaatttgagggggtgtacttgtcttgcgggtgcatagctttttagtatgaaggtgcagatgaggtgaaaaattgatcataatcactgtttttcatttttgctgtgggtgcgctcgcgccacagttttatacatagtagctccgcccctgaatgagataaataattaaatcttagtttttctgaagagtatagtgcacattactatgccactaactaaaccctacattttgaac

SEQ ID NO: 2176 - DNA, 2647 bp, Zea Mays
gtcttcctttcccaactcggtcgacgcgttcgccacggctgcgcagtcctcctcctcgcctccgatcccctcccttcgacgatgcgagcacacccgctcatcctcttcgtacctgcaccgccacctcatcctcttcctcgccgcgccgacacccaccgcgctctctccctcccgcggcgacgcccttcgccaacgagaaccgcacgccgtcgtctcccacgggcactgtcgcacgctgggccacgctgcagtcggtggcgccgccacaccttcttcctccatgtgccgtcgccgccctattcttcttcgagatgcagccgctagcgctgccctcctcccagctccccttcatggccgcgtgcaggtggaccgctccccaccccgtcgccttcctcctcgtactgcccccaagaacgccctaggttactttttcttagatttgccttttggtttcaagtatgtttctctgatgccctagctgtctggtggattaaatttaattattgagctgcaactttcaccaattggtttggagaaagacaatagaggcttgggttcttttagttaagaaaaattgcgtccgtgttcagttataacataagattgtttattgttctctgtaatctcacatttctttttctatatatgaatagggactatgtgccagtgttagtttttggtaccagtctacaggtctttcatttctacattcaaagagtagtgtactctgtactcttccagaaaactttacatggtaccggaaccgggaccagcggcgacggtgtagtggtgaggaggcagaggagtgccttcggcctcgacggaagaaggccgccgatggagaagaagaccagctgggagcgtggcgcggcgtcgcggtcgtgcacgaggaggaggagcctgcacttgccggagggagaagaagcatgtagcacggtgcggtgctgcagtcgtgcgtgagtagaggacaacattaaggatgatcatagactaccaacattcttcttcagattaaatgttaaattcagtaatttaatttgtttcagtaatacaagattagaccatccctgcacatctgcctatctgcctggcaaaatattatcgtcgcttccaagattgagaatatggctgcgtttggaaagccttagattctagcattgggtaacatgtctattatcccacattatctaagtttaactagatactcatattttatgaaaaaaactgcactgaaaaatcacgaggtgctagatgttgcgctagcagcagcatcatagcacatcttgtctattccagttacaaatgtgcatattgtagaatatttttgtaacatactgctgctcccttccattcgttttggttttggcaattttctatgcacgtgtcgctcatccatggtacctcttttgtactaagatcattgtgacatttaacatgtttacatcatctcttactcgacacatactcactggactaatgttcttgtccctccttttgctttccttagcagatggcggaggttctaataagtaaccttatgattggaaattgcagtgatcggttgtgtgtacgtgtctcccgtctgtgaaaaatttatgatcccgaggatgagtataagcttttccatgctcatatggtcctcatcgacgaggaggtacgcgacctgcttactacatgaagcatgctgcataccagatcaaagaaattttaatatggggctggcagtgctcatgctcaaatataccctccactcactgacgttttcaaacctctgataaaggagggcaatgtctacaatgtctcctacattcagatcaagaaagctaataggatgtacaagcatgttgacaacgatatcatgatcggtttcacaaaatggatcctatgctgcctcaacaaacccgcggtttgaacacgtgacagatgacggcttagcttctgtggatggacatcttggtcgcttttgtagatggaatgtttggttggcttttgtagacagaattaggctgcacttgtgattgtgtaacgcttatgagcatggttgtgtggactgtgtcggccaaagtatacctcccaatgccttgtatatatcacatgcttagctgtctatccccaactaggtcgcctgataatagacttcgatcatgtcatgctattctataacaattttcgctgtaacttgcctaatcgtcatactatggtacacgcttaaatttggtgctgcaactttattgtggattataaaagagagaaaaatacagcataaagttataatgtcaaattgccacagctcactgttaagacttatttgatctagtgaaacctagttatctattagtaaaaattaattactgacaagtatacaggtgcatcatgaaaaccaaagattaagtgtgatcaggtagagctagagcaaatttgagggggtgtacttgtcttgcgggtgcatagctttttagtatgaaggtgcagatgaggtgaaaaattgatcataatcactgtttttcatttttgctgtgggtgcgctcgcgccacagttttatacatagtagctccgcccctgaatgagataaataattaaatcttagtttttctgaagagtatagtgcacattactatgccactaactaaaccctacattttgaac

SEQ ID NO: 2177 - DNA, 2877 bp, Zea Mays
cttcctttcccaactcggtcgacgcgttcgccacggctgcgcagtcctcctcctcgcctccgatcccctcccttcgacgatgcgagcacacccgctcatcctcttcgtacctgcaccgccacctcatcctcttcctcgccgcgccgacacccaccgcgctctctccctcccgcggcgacgcccttcgccaacgagaaccgcacgccgtcgtctcccacgggcactgtcgcacgctgggccacgctgcagtcggtggcgccgccacaccttcttcctccatgtgccgtcgccgccctattcttcttcgagatgcagccgctagcgctgccctcctcccagctccccttcatggccgcgtgcaggtggaccgctccccaccccgtcgccttcctcctcgtactgcccccaagaacgccctaggttactttttcttagatttgccttttggtttcaagtatgtttctctgatgccctagctgtctggtggattaaatttaattattgagctgcaactttcaccaattggtttggagaaagacaatagaggcttgggttcttttagttaagaaaaattgcgtccgtgttcagttataacataagattgtttattgttctctgtaatctcacatttctttttctatatatgaatagggactatgtgccagtgttagtttttggtaccagtctacaggtctttcatttctacattcaaaggtgagaatcaatcatgttcggctccctttaaaaaagtaatgtttcccaatccttcatagtaaaactaaacacacattgtaaagacatttgtcgtacgagatcttttatagaggtgtgttttaacccaaaggcaggctgtggagatcaattccagatattgccttcttgttgtgtctcagttgattttttttagcattgaacgtaacttacagtttgacataacaagcggtgaatgtaacactacagtttaactcaacaagccattggctgtagctcacaatcagcttggctgaactgccaaaaaaaatacaagcagtccattacagttcaacttaacaagagcagttctgttggtaaagccgatgcaaataagtaccaattgttagttaggaagggaaaagtgtcagcagtcaatggctgattaaaaaactaaatgtctttgaatttgttgggccgtgtgcctagtgcctggcctattaactggcttgttcgctgcggctttaatccgactgcgactgcggcttctacagtattttgtctctaggaattgcagctgcaatagtattttgcagctgcaacagtgctcccgcatgggcagccgaacaagctaaacatgtacatatatacttattataccagtgaggtgtgtgtagagtagtgtactctgtactcttccagaaaactttacatggtaccggaaccgggaccagcggcgacggtgtagtggtgaggaggcagaggagtgccttcggcctcgacggaagaaggccgccgatggagaagaagaccagctgggagcgtggcgcggcgtcgcggtcgtgcacgaggaggaggagcctgcacttgccggagggagaagaagcatgtagcacggtgcggtgctgcagtcgtgcgtgagagttgagaccacaatccttatgaaaagttacactgtagaggacaacattaaggatgatcatagactaccaacattcttcttcagattaaatgttaaattcagtaatttaatttgtttcagtaatacaagattagaccatccctgcacatctgcctatctgcctggcaaaatattatcgtcgcttccaagattgagaatatggctgcgtttggaaagccttagattctagcattggtgatcggttgtgtgtacgtgtctcccgtctgtgaaaaatttatgatcccgaggatgagtataagcttttccatgctcatatggtcctcatcgacgaggaggctggcagtgctcatgctcaaatataccctccactcactgacgttttcaaacctctgataaaggagggcaatgtctacaatgtctcctacattcagatcaagaaagctaataggatgtacaagcatgttgacaacgatatcatgatcggtttcacaaaatggatcctatgctgcctcaacaaacccgcggtttgaacacgtgacagatgacggcttagcttctgtggatggacatcttggtcgcttttgtagatggaatgtttggttggcttttgtagacagaattaggctgcacttgtgattgtgtaacgcttatgagcatggttgtgtggactgtgtcggccaaagtatacctcccaatgccttgtatatatcacatgcttagctgtctatccccaactaggtcgcctgataatagacttcgatcatgtcatgctattctataacaattttcgctgtaacttgcctaatcgtcatactatggtacacgcttaaatttggtgctgcaactttattgtggattataaaagagagaaaaatacagcataaagttataatgtcaaattgccacagctcactgttaagacttatttgatctagtgaaacctagttatctattagtaaaaattaattactgacaagtatacaggtgcatcatgaaaaccaaagattaagtgtgatcaggtagagctagagcaaatttgagggggtgtacttgtcttgcgggtgcatagctttttagtatgaaggtgcagatgaggtgaaaaattgatcataatcactgtttttcatttttgctgtgggtgcgctcgcgccacagttttatacatagtagctccgcccctgaatgagataaataattaaatcttagtttttctgaagagtatagtgcacattactatgccactaactaaaccctacattttgaac

SEQ ID NO: 2178 - DNA, 3378 bp, Zea Mays
cttcctttcccaactcggtcgacgcgttcgccacggctgcgcagtcctcctcctcgcctccgatcccctcccttcgacgatgcgagcacacccgctcatcctcttcgtacctgcaccgccacctcatcctcttcctcgccgcgccgacacccaccgcgctctctccctcccgcggcgacgcccttcgccaacgagaaccgcacgccgtcgtctcccacgggcactgtcgcacgctgggccacgctgcagtcggtggcgccgccacaccttcttcctccatgtgccgtcgccgccctattcttcttcgagatgcagccgctagcgctgccctcctcccagctccccttcatggccgcgtgcaggtggaccgctccccaccccgtcgccttcctcctcgtactgcccccaagaacgccctaggttactttttcttagatttgccttttggtttcaagtatgtttctctgatgccctagctgtctggtggattaaatttaattattgagctgcaactttcaccaattggtttggagaaagacaatagaggcttgggttcttttagttaagaaaaattgcgtccgtgttcagttataacataagattgtttattgttctctgtaatctcacatttctttttctatatatgaatagggactatgtgccagtgttagtttttggtaccagtctacaggtctttcatttctacattcaaaggtgagaatcaatcatgttcggctccctttaaaaaagtaatgtttcccaatccttcatagtaaaactaaacacacattgtaaagacatttgtcgtacgagatcttttatagaggtgtgttttaacccaaaggcaggctgtggagatcaattccagatattgccttcttgttgtgtctcagttgattttttttagcattgaacgtaacttacagtttgacataacaagcggtgaatgtaacactacagtttaactcaacaagccattggctgtagctcacaatcagcttggctgaactgccaaaaaaaatacaagcagtccattacagttcaacttaacaagagcagttctgttggtaaagccgatgcaaataagtaccaattgttagttaggaagggaaaagtgtcagcagtcaatggctgattaaaaaactaaatgtctttgaatttgttgggccgtgtgcctagtgcctggcctattaactggcttgttcgctgcggctttaatccgactgcgactgcggcttctacagtattttgtctctaggaattgcagctgcaatagtattttgcagctgcaacagtgctcccgcatgggcagccgaacaagctaaacatgtacatatatacttattataccagtgaggtgtgtgtagagtagtgtactctgtactcttccagaaaactttacatggtaccggaaccgggaccagcggcgacggtgtagtggtgaggaggcagaggagtgccttcggcctcgacggaagaaggccgccgatggagaagaagaccagctgggagcgtggcgcggcgtcgcggtcgtgcacgaggaggaggagcctgcacttgccggagggagaagaagcatgtagcacggtgcggtgctgcagtcgtgcgtgagtaggttcttattattgttttctatcctgctggatatgtagtcatgacagttaaattatgtacaactatgattacaaacgggaatacaagctaggagttgagaccacaatccttatgaaaagttacactgtaagtatgtcgtcctgcttgcatttcttccatgttccttttctcactgtaagcttagtttttgtgatcagcttccagatagaagagttattaaagtagacactaaacgattccaacctcctgaatctctttttactcctgtaacacttccatttatatttatacataatggtattgtcaacagtacacatagtttccatcagtttgttaatagtgcacctttagattgaatgagcttcttgcagagcaccaaggattaggcattgaaatgtgtggataaaaatattagaggaccacacatcattattatgcaacattgtctatgcacatgaacataattgtatcggtagtaagccgccagcatgtttgaaagttaaaaatgtgaattaagaacgaattatcgtatcctgctatacttatgcaacctaccaagaattagggcattgtagaaaccatataaagtattgagatcaatttgaatttgtctgcctcatgattttttgatacctgacctttatgaaggtagaggacaacattaaggatgatcatagactaccaacattcttcttcagattaaatgttaaattcagtaatttaatttgtttcagtgatcggttgtgtgtacgtgtctcccgtctgtgaaaaatttatgatcccgaggatgagtataagcttttccatgctcatatggtcctcatcgacgaggaggctggcagtgctcatgctcaaatataccctccactcactgacgttttcaaacctctgataaaggagggcaatgtctacaatgtctcctacattcagatcaagaaagctaataggatgtacaagcatgttgacaacgatatcatgatcggtttcacaaaatggatcctatgctgcctcaacaaacccgcggtttgaacacgtgacagatgacggcttagcttctgtggatggacatcttggtcgcttttgtagatggaatgtttggttggcttttgtagacagaattaggctgcacttgtgattgtgtaacgcttatgagcatggttgtgtggactgtgtcggccaaagtatacctcccaatgccttgtatatatcacatgcttagctgtctatccccaactaggtcgcctgataatagacttcgatcatgtcatgctattctataacaattttcgctgtaacttgcctaatcgtcatactatggtacacgcttaaatttggtgctgcaactttattgtggattataaaagagagaaaaatacagcataaagttataatgtcaaattgccacagctcactgttaagacttatttgatctagtgaaacctagttatctattagtaaaaattaattactgacaagtatacaggtgcatcatgaaaaccaaagattaagtgtgatcaggtagagctagagcaaatttgagggggtgtacttgtcttgcgggtgcatagctttttagtatgaaggtgcagatgaggtgaaaaattgatcataatcactgtttttcatttttgctgtgggtgcgctcgcgccacagttttatacatagtagctccgcccctgaatgagataaataattaaatcttagtttttctgaagagtatagtgcacattactatgccactaactaaaccctacattttgaac

SEQ ID NO: 2179 - DNA, 3196 bp, Zea Mays
cttcctttcccaactcggtcgacgcgttcgccacggctgcgcagtcctcctcctcgcctccgatcccctcccttcgacgatgcgagcacacccgctcatcctcttcgtacctgcaccgccacctcatcctcttcctcgccgcgccgacacccaccgcgctctctccctcccgcggcgacgcccttcgccaacgagaaccgcacgccgtcgtctcccacgggcactgtcgcacgctgggccacgctgcagtcggtggcgccgccacaccttcttcctccatgtgccgtcgccgccctattcttcttcgagatgcagccgctagcgctgccctcctcccagctccccttcatggccgcgtgcagggactatgtgccagtgttagtttttggtaccagtctacaggtctttcatttctacattcaaaggtgagaatcaatcatgttcggctccctttaaaaaagtaatgtttcccaatccttcatagtaaaactaaacacacattgtaaagacatttgtcgtacgagatcttttatagaggtgtgttttaacccaaaggcaggctgtggagatcaattccagatattgccttcttgttgtgtctcagttgattttttttagcattgaacgtaacttacagtttgacataacaagcggtgaatgtaacactacagtttaactcaacaagccattggctgtagctcacaatcagcttggctgaactgccaaaaaaaatacaagcagtccattacagttcaacttaacaagagcagttctgttggtaaagccgatgcaaataagtaccaattgttagttaggaagggaaaagtgtcagcagtcaatggctgattaaaaaactaaatgtctttgaatttgttgggccgtgtgcctagtgcctggcctattaactggcttgttcgctgcggctttaatccgactgcgactgcggcttctacagtattttgtctctaggaattgcagctgcaatagtattttgcagctgcaacagtgctcccgcatgggcagccgaacaagctaaacatgtacatatatacttattataccagtgaggtgtgtgtagagtagtgtactctgtactcttccagaaaactttacatggtaccggaaccgggaccagcggcgacggtgtagtggtgaggaggcagaggagtgccttcggcctcgacggaagaaggccgccgatggagaagaagaccagctgggagcgtggcgcggcgtcgcggtcgtgcacgaggaggaggagcctgcacttgccggagggagaagaagcatgtagcacggtgcggtgctgcagtcgtgcgtgagtaggttcttattattgttttctatcctgctggatatgtagtcatgacagttaaattatgtacaactatgattacaaacgggaatacaagctaggagttgagaccacaatccttatgaaaagttacactgtaagtatgtcgtcctgcttgcatttcttccatgttccttttctcactgtaagcttagtttttgtgatcagcttccagatagaagagttattaaagtagacactaaacgattccaacctcctgaatctctttttactcctgtaacacttccatttatatttatacataatggtattgtcaacagtacacatagtttccatcagtttgttaatagtgcacctttagattgaatgagcttcttgcagagcaccaaggattaggcattgaaatgtgtggataaaaatattagaggaccacacatcattattatgcaacattgtctatgcacatgaacataattgtatcggtagtaagccgccagcatgtttgaaagttaaaaatgtgaattaagaacgaattatcgtatcctgctatacttatgcaacctaccaagaattagggcattgtagaaaccatataaagtattgagatcaatttgaatttgtctgcctcatgattttttgatacctgacctttatgaaggtagaggacaacattaaggatgatcatagactaccaacattcttcttcagattaaatgttaaattcagtaatttaatttgtttcagatggcggaggttctaataagtaaccttatgattggaaattgcagtgatcggttgtgtgtacgtgtctcccgtctgtgaaaaatttatgatcccgaggatgagtataagcttttccatgctcatatggtcctcatcgacgaggaggtacgcgacctgcttactacatgaagcatgctgcataccagatcaaagaaattttaatatggggctggcagtgctcatgctcaaatataccctccactcactgacgttttcaaacctctgataaaggagggcaatgtctacaatgtctcctacattcagatcaagaaagctaataggatgtacaagcatgttgacaacgatatcatgatcggtttcacaaaatggatcctatgctgcctcaacaaacccgcggtttgaacacgtgacagatgacggcttagcttctgtggatggacatcttggtcgcttttgtagatggaatgtttggttggcttttgtagacagaattaggctgcacttgtgattgtgtaacgcttatgagcatggttgtgtggactgtgtcggccaaagtatacctcccaatgccttgtatatatcacatgcttagctgtctatccccaactaggtcgcctgataatagacttcgatcatgtcatgctattctataacaattttcgctgtaacttgcctaatcgtcatactatggtacacgcttaaatttggtgctgcaactttattgtggattataaaagagagaaaaatacagcataaagttataatgtcaaattgccacagctcactgttaagacttatttgatctagtgaaacctagttatctattagtaaaaattaattactgacaagtatacaggtgcatcatgaaaaccaaagattaagtgtgatcaggtagagctagagcaaatttgagggggtgtacttgtcttgcgggtgcatagctttttagtatgaaggtgcagatgaggtgaaaaattgatcataatcactgtttttcatttttgctgtgggtgcgctcgcgccacagttttatacatagtagctccgcccctgaatgagataaataattaaatcttagtttttctgaagagtatagtgcacattactatgccactaactaaaccctacattttgaac

SEQ ID NO: 2180 - DNA, 3719 bp, Zea Mays
cttcctttcccaactcggtcgacgcgttcgccacggctgcgcagtcctcctcctcgcctccgatcccctcccttcgacgatgcgagcacacccgctcatcctcttcgtacctgcaccgccacctcatcctcttcctcgccgcgccgacacccaccgcgctctctccctcccgcggcgacgcccttcgccaacgagaaccgcacgccgtcgtctcccacgggcactgtcgcacgctgggccacgctgcagtcggtggcgccgccacaccttcttcctccatgtgccgtcgccgccctattcttcttcgagatgcagccgctagcgctgccctcctcccagctccccttcatggccgcgtgcagggactatgtgccagtgttagtttttggtaccagtctacaggtctttcatttctacattcaaaggtgagaatcaatcatgttcggctccctttaaaaaagtaatgtttcccaatccttcatagtaaaactaaacacacattgtaaagacatttgtcgtacgagatcttttatagaggtgtgttttaacccaaaggcaggctgtggagatcaattccagatattgccttcttgttgtgtctcagttgattttttttagcattgaacgtaacttacagtttgacataacaagcggtgaatgtaacactacagtttaactcaacaagccattggctgtagctcacaatcagcttggctgaactgccaaaaaaaatacaagcagtccattacagttcaacttaacaagagcagttctgttggtaaagccgatgcaaataagtaccaattgttagttaggaagggaaaagtgtcagcagtcaatggctgattaaaaaactaaatgtctttgaatttgttgggccgtgtgcctagtgcctggcctattaactggcttgttcgctgcggctttaatccgactgcgactgcggcttctacagtattttgtctctaggaattgcagctgcaatagtattttgcagctgcaacagtgctcccgcatgggcagccgaacaagctaaacatgtacatatatacttattataccagtgaggtgtgtgtagagtagtgtactctgtactcttccagaaaactttacatggtaccggaaccgggaccagcggcgacggtgtagtggtgaggaggcagaggagtgccttcggcctcgacggaagaaggccgccgatggagaagaagaccagctgggagcgtggcgcggcgtcgcggtcgtgcacgaggaggaggagcctgcacttgccggagggagaagaagcatgtagcacggtgcggtgctgcagtcgtgcgtgagtaggttcttattattgttttctatcctgctggatatgtagtcatgacagttaaattatgtacaactatgattacaaacgggaatacaagctaggagttgagaccacaatccttatgaaaagttacactgtaagtatgtcgtcctgcttgcatttcttccatgttccttttctcactgtaagcttagtttttgtgatcagcttccagatagaagagttattaaagtagacactaaacgattccaacctcctgaatctctttttactcctgtaacacttccatttatatttatacataatggtattgtcaacagtacacatagtttccatcagtttgttaatagtgcacctttagattgaatgagcttcttgcagagcaccaaggattaggcattgaaatgtgtggataaaaatattagaggaccacacatcattattatgcaacattgtctatgcacatgaacataattgtatcggtagtaagccgccagcatgtttgaaagttaaaaatgtgaattaagaacgaattatcgtatcctgctatacttatgcaacctaccaagaattagggcattgtagaaaccatataaagtattgagatcaatttgaatttgtctgcctcatgattttttgatacctgacctttatgaaggtagaggacaacattaaggatgatcatagactaccaacattcttcttcagattaaatgttaaattcagtaatttaatttgtttcaggtgagccttcttcacatattgagcaacaataatcatcttcgtggtcatggtggtgatgaccatgatgcgcctagaaatgcatgtgtgaaatattcaatatatgtcaccatttctattttcagtaatacaagattagaccatccctgcacatctgcctatctgcctggcaaaatattatcgtcgcttccaagattgagaatatggctgcgtttggaaagccttagattctagcattgggtaacatgtctattatcccacattatctaagtttaactagatactcatattttatgaaaaaaactgcactgaaaaatcacgaggtgctagatgttgcgctagcagcagcatcatagcacatcttgtctattccagttacaaatgtgcatattgtagaatatttttgtaacatactgctgctcccttccattcgttttggttttggcaattttctatgcacgtgtcgctcatccatggtacctcttttgtactaagatcattgtgacatttaacatgtttacatcatctcttactcgacacatactcactggactaatgttcttgtccctccttttgctttccttagcagatggcggaggttctaataagtaaccttatgattggaaattgcagtgatcggttgtgtgtacgtgtctcccgtctgtgaaaaatttatgatcccgaggatgagtataagcttttccatgctcatatggtcctcatcgacgaggaggctggcagtgctcatgctcaaatataccctccactcactgacgttttcaaacctctgataaaggagggcaatgtctacaatgtctcctacattcagatcaagaaagctaataggatgtacaagcatgttgacaacgatatcatgatcggtttcacaaaatggatcctatgctgcctcaacaaacccgcggtttgaacacgtgacagatgacggcttagcttctgtggatggacatcttggtcgcttttgtagatggaatgtttggttggcttttgtagacagaattaggctgcacttgtgattgtgtaacgcttatgagcatggttgtgtggactgtgtcggccaaagtatacctcccaatgccttgtatatatcacatgcttagctgtctatccccaactaggtcgcctgataatagacttcgatcatgtcatgctattctataacaattttcgctgtaacttgcctaatcgtcatactatggtacacgcttaaatttggtgctgcaactttattgtggattataaaagagagaaaaatacagcataaagttataatgtcaaattgccacagctcactgttaagacttatttgatctagtgaaacctagttatctattagtaaaaattaattactgacaagtatacaggtgcatcatgaaaaccaaagattaagtgtgatcaggtagagctagagcaaatttgagggggtgtacttgtcttgcgggtgcatagctttttagtatgaaggtgcagatgaggtgaaaaattgatcataatcactgtttttcatttttgctgtgggtgcgctcgcgccacagttttatacatagtagctccgcccctgaatgagataaataattaaatcttagtttttctgaagagtatagtgcacattactatgccactaactaaaccctacattttgaac

SEQ ID NO: 2181 - DNA, 3262 bp, Zea Mays
cttcctttcccaactcggtcgacgcgttcgccacggctgcgcagtcctcctcctcgcctccgatcccctcccttcgacgatgcgagcacacccgctcatcctcttcgtacctgcaccgccacctcatcctcttcctcgccgcgccgacacccaccgcgctctctccctcccgcggcgacgcccttcgccaacgagaaccgcacgccgtcgtctcccacgggcactgtcgcacgctgggccacgctgcagtcggtggcgccgccacaccttcttcctccatgtgccgtcgccgccctattcttcttcgagatgcagccgctagcgctgccctcctcccagctccccttcatggccgcgtgcaggtggaccgctccccaccccgtcgccttcctcctcgtactgcccccaagaacgccctagggactatgtgccagtgttagtttttggtaccagtctacaggtctttcatttctacattcaaaggtgagaatcaatcatgttcggctccctttaaaaaagtaatgtttcccaatccttcatagtaaaactaaacacacattgtaaagacatttgtcgtacgagatcttttatagaggtgtgttttaacccaaaggcaggctgtggagatcaattccagatattgccttcttgttgtgtctcagttgattttttttagcattgaacgtaacttacagtttgacataacaagcggtgaatgtaacactacagtttaactcaacaagccattggctgtagctcacaatcagcttggctgaactgccaaaaaaaatacaagcagtccattacagttcaacttaacaagagcagttctgttggtaaagccgatgcaaataagtaccaattgttagttaggaagggaaaagtgtcagcagtcaatggctgattaaaaaactaaatgtctttgaatttgttgggccgtgtgcctagtgcctggcctattaactggcttgttcgctgcggctttaatccgactgcgactgcggcttctacagtattttgtctctaggaattgcagctgcaatagtattttgcagctgcaacagtgctcccgcatgggcagccgaacaagctaaacatgtacatatatacttattataccagtgaggtgtgtgtagagtagtgtactctgtactcttccagaaaactttacatggtaccggaaccgggaccagcggcgacggtgtagtggtgaggaggcagaggagtgccttcggcctcgacggaagaaggccgccgatggagaagaagaccagctgggagcgtggcgcggcgtcgcggtcgtgcacgaggaggaggagcctgcacttgccggagggagaagaagcatgtagcacggtgcggtgctgcagtcgtgcgtgagtaggttcttattattgttttctatcctgctggatatgtagtcatgacagttaaattatgtacaactatgattacaaacgggaatacaagctaggagttgagaccacaatccttatgaaaagttacactgtaagtatgtcgtcctgcttgcatttcttccatgttccttttctcactgtaagcttagtttttgtgatcagcttccagatagaagagttattaaagtagacactaaacgattccaacctcctgaatctctttttactcctgtaacacttccatttatatttatacataatggtattgtcaacagtacacatagtttccatcagtttgttaatagtgcacctttagattgaatgagcttcttgcagagcaccaaggattaggcattgaaatgtgtggataaaaatattagaggaccacacatcattattatgcaacattgtctatgcacatgaacataattgtatcggtagtaagccgccagcatgtttgaaagttaaaaatgtgaattaagaacgaattatcgtatcctgctatacttatgcaacctaccaagaattagggcattgtagaaaccatataaagtattgagatcaatttgaatttgtctgcctcatgattttttgatacctgacctttatgaaggtagaggacaacattaaggatgatcatagactaccaacattcttcttcagattaaatgttaaattcagtaatttaatttgtttcagtaatacaagattagaccatccctgcacatctgcctatctgcctggcaaaatattatcgtcgcttccaagattgagaatatggctgcgtttggaaagccttagattctagcattggtgatcggttgtgtgtacgtgtctcccgtctgtgaaaaatttatgatcccgaggatgagtataagcttttccatgctcatatggtcctcatcgacgaggaggctggcagtgctcatgctcaaatataccctccactcactgacgttttcaaacctctgataaaggagggcaatgtctacaatgtctcctacattcagatcaagaaagctaataggatgtacaagcatgttgacaacgatatcatgatcggtttcacaaaatggatcctatgctgcctcaacaaacccgcggtttgaacacgtgacagatgacggcttagcttctgtggatggacatcttggtcgcttttgtagatggaatgtttggttggcttttgtagacagaattaggctgcacttgtgattgtgtaacgcttatgagcatggttgtgtggactgtgtcggccaaagtatacctcccaatgccttgtatatatcacatgcttagctgtctatccccaactaggtcgcctgataatagacttcgatcatgtcatgctattctataacaattttcgctgtaacttgcctaatcgtcatactatggtacacgcttaaatttggtgctgcaactttattgtggattataaaagagagaaaaatacagcataaagttataatgtcaaattgccacagctcactgttaagacttatttgatctagtgaaacctagttatctattagtaaaaattaattactgacaagtatacaggtgcatcatgaaaaccaaagattaagtgtgatcaggtagagctagagcaaatttgagggggtgtacttgtcttgcgggtgcatagctttttagtatgaaggtgcagatgaggtgaaaaattgatcataatcactgtttttcatttttgctgtgggtgcgctcgcgccacagttttatacatagtagctccgcccctgaatgagataaataattaaatcttagtttttctgaagagtatagtgcacattactatgccactaactaaaccctacattttgaac

SEQ ID NO: 2182 - DNA, 3493 bp, Zea Mays
cttcctttcccaactcggtcgacgcgttcgccacggctgcgcagtcctcctcctcgcctccgatcccctcccttcgacgatgcgagcacacccgctcatcctcttcgtacctgcaccgccacctcatcctcttcctcgccgcgccgacacccaccgcgctctctccctcccgcggcgacgcccttcgccaacgagaaccgcacgccgtcgtctcccacgggcactgtcgcacgctgggccacgctgcagtcggtggcgccgccacaccttcttcctccatgtgccgtcgccgccctattcttcttcgagatgcagccgctagcgctgccctcctcccagctccccttcatggccgcgtgcaggtggaccgctccccaccccgtcgccttcctcctcgtactgcccccaagaacgccctaggttactttttcttagatttgccttttggtttcaagtatgtttctctgatgccctagctgtctggtggattaaatttaattattgagctgcaactttcaccaattggtttggagaaagacaatagaggcttgggttcttttagttaagaaaaattgcgtccgtgttcagttataacataagattgtttattgttctctgtaatctcacatttctttttctatatatgaatagggactatgtgccagtgttagtttttggtaccagtctacaggtctttcatttctacattcaaaggtgagaatcaatcatgttcggctccctttaaaaaagtaatgtttcccaatccttcatagtaaaactaaacacacattgtaaagacatttgtcgtacgagatcttttatagaggtgtgttttaacccaaaggcaggctgtggagatcaattccagatattgccttcttgttgtgtctcagttgattttttttagcattgaacgtaacttacagtttgacataacaagcggtgaatgtaacactacagtttaactcaacaagccattggctgtagctcacaatcagcttggctgaactgccaaaaaaaatacaagcagtccattacagttcaacttaacaagagcagttctgttggtaaagccgatgcaaataagtaccaattgttagttaggaagggaaaagtgtcagcagtcaatggctgattaaaaaactaaatgtctttgaatttgttgggccgtgtgcctagtgcctggcctattaactggcttgttcgctgcggctttaatccgactgcgactgcggcttctacagtattttgtctctaggaattgcagctgcaatagtattttgcagctgcaacagtgctcccgcatgggcagccgaacaagctaaacatgtacatatatacttattataccagtgaggtgtgtgtagagtagtgtactctgtactcttccagaaaactttacatggtaccggaaccgggaccagcggcgacggtgtagtggtgaggaggcagaggagtgccttcggcctcgacggaagaaggccgccgatggagaagaagaccagctgggagcgtggcgcggcgtcgcggtcgtgcacgaggaggaggagcctgcacttgccggagggagaagaagcatgtagcacggtgcggtgctgcagtcgtgcgtgagtaggttcttattattgttttctatcctgctggatatgtagtcatgacagttaaattatgtacaactatgattacaaacgggaatacaagctaggagttgagaccacaatccttatgaaaagttacactgtaagtatgtcgtcctgcttgcatttcttccatgttccttttctcactgtaagcttagtttttgtgatcagcttccagatagaagagttattaaagtagacactaaacgattccaacctcctgaatctctttttactcctgtaacacttccatttatatttatacataatggtattgtcaacagtacacatagtttccatcagtttgttaatagtgcacctttagattgaatgagcttcttgcagagcaccaaggattaggcattgaaatgtgtggataaaaatattagaggaccacacatcattattatgcaacattgtctatgcacatgaacataattgtatcggtagtaagccgccagcatgtttgaaagttaaaaatgtgaattaagaacgaattatcgtatcctgctatacttatgcaacctaccaagaattagggcattgtagaaaccatataaagtattgagatcaatttgaatttgtctgcctcatgattttttgatacctgacctttatgaaggtagaggacaacattaaggatgatcatagactaccaacattcttcttcagattaaatgttaaattcagtaatttaatttgtttcagtaatacaagattagaccatccctgcacatctgcctatctgcctggcaaaatattatcgtcgcttccaagattgagaatatggctgcgtttggaaagccttagattctagcattggtgatcggttgtgtgtacgtgtctcccgtctgtgaaaaatttatgatcccgaggatgagtataagcttttccatgctcatatggtcctcatcgacgaggaggctggcagtgctcatgctcaaatataccctccactcactgacgttttcaaacctctgataaaggagggcaatgtctacaatgtctcctacattcagatcaagaaagctaataggatgtacaagcatgttgacaacgatatcatgatcggtttcacaaaatggatcctatgctgcctcaacaaacccgcggtttgaacacgtgacagatgacggcttagcttctgtggatggacatcttggtcgcttttgtagatggaatgtttggttggcttttgtagacagaattaggctgcacttgtgattgtgtaacgcttatgagcatggttgtgtggactgtgtcggccaaagtatacctcccaatgccttgtatatatcacatgcttagctgtctatccccaactaggtcgcctgataatagacttcgatcatgtcatgctattctataacaattttcgctgtaacttgcctaatcgtcatactatggtacacgcttaaatttggtgctgcaactttattgtggattataaaagagagaaaaatacagcataaagttataatgtcaaattgccacagctcactgttaagacttatttgatctagtgaaacctagttatctattagtaaaaattaattactgacaagtatacaggtgcatcatgaaaaccaaagattaagtgtgatcaggtagagctagagcaaatttgagggggtgtacttgtcttgcgggtgcatagctttttagtatgaaggtgcagatgaggtgaaaaattgatcataatcactgtttttcatttttgctgtgggtgcgctcgcgccacagttttatacatagtagctccgcccctgaatgagataaataattaaatcttagtttttctgaagagtatagtgcacattactatgccactaactaaaccctacattttgaac

SEQ ID NO: 2183 - DNA, 2576 bp, Zea Mays
cttcctttcccaactcggtcgacgcgttcgccacggctgcgcagtcctcctcctcgcctccgatcccctcccttcgacgatgcgagcacacccgctcatcctcttcgtacctgcaccgccacctcatcctcttcctcgccgcgccgacacccaccgcgctctctccctcccgcggcgacgcccttcgccaacgagaaccgcacgccgtcgtctcccacgggcactgtcgcacgctgggccacgctgcagtcggtggcgccgccacaccttcttcctccatgtggaccgctccccaccccgtcgccttcctcctcgtactgcccccaagaacgccctagggactatgtgccagtgttagtttttggtaccagtctacaggtctttcatttctacattcaaaggtgagaatcaatcatgttcggctccctttaaaaaagtaatgtttcccaatccttcatagtaaaactaaacacacattgtaaagacatttgtcgtacgagatcttttatagaggtgtgttttaacccaaaggcaggctgtggagatcaattccagatattgccttcttgttgtgtctcagttgattttttttagcattgaacgtaacttacagtttgacataacaagcggtgaatgtaacactacagtttaactcaacaagccattggctgtagctcacaatcagcttggctgaactgccaaaaaaaatacaagcagtccattacagttcaacttaacaagagcagttctgttggtaaagccgatgcaaataagtaccaattgttagttaggaagggaaaagtgtcagcagtcaatggctgattaaaaaactaaatgtctttgaatttgttgggccgtgtgcctagtgcctggcctattaactggcttgttcgctgcggctttaatccgactgcgactgcggcttctacagtattttgtctctaggaattgcagctgcaatagtattttgcagctgcaacagtgctcccgcatgggcagccgaacaagctaaacatgtacatatatacttattataccagtgaggtgtgtgtagagtagtgtactctgtactcttccagaaaactttacatggtaccggaaccgggaccagcggcgacggtgtagtggtgaggaggcagaggagtgccttcggcctcgacggaagaaggccgccgatggagaagaagaccagctgggagcgtggcgcggcgtcgcggtcgtgcacgaggaggaggagcctgcacttgccggagggagaagaagcatgtagcacggtgcggtgctgcagtcgtgcgtgagtagaggacaacattaaggatgatcatagactaccaacattcttcttcagattaaatgttaaattcagtaatttaatttgtttcagtaatacaagattagaccatccctgcacatctgcctatctgcctggcaaaatattatcgtcgcttccaagattgagaatatggctgcgtttggaaagccttagattctagcattggcagatggcggaggttctaataagtaaccttatgattggaaattgcagtgatcggttgtgtgtacgtgtctcccgtctgtgaaaaatttatgatcccgaggatgagtataagcttttccatgctcatatggtcctcatcgacgaggaggctggcagtgctcatgctcaaatataccctccactcactgacgttttcaaacctctgataaaggagggcaatgtctacaatgtctcctacattcagatcaagaaagctaataggatgtacaagcatgttgacaacgatatcatgatcggtttcacaaaatggatcctatgctgcctcaacaaacccgcggtttgaacacgtgacagatgacggcttagcttctgtggatggacatcttggtcgcttttgtagatggaatgtttggttggcttttgtagacagaattaggctgcacttgtgattgtgtaacgcttatgagcatggttgtgtggactgtgtcggccaaagtatacctcccaatgccttgtatatatcacatgcttagctgtctatccccaactaggtcgcctgataatagacttcgatcatgtcatgctattctataacaattttcgctgtaacttgcctaatcgtcatactatggtacacgcttaaatttggtgctgcaactttattgtggattataaaagagagaaaaatacagcataaagttataatgtcaaattgccacagctcactgttaagacttatttgatctagtgaaacctagttatctattagtaaaaattaattactgacaagtatacaggtgcatcatgaaaaccaaagattaagtgtgatcaggtagagctagagcaaatttgagggggtgtacttgtcttgcgggtgcatagctttttagtatgaaggtgcagatgaggtgaaaaattgatcataatcactgtttttcatttttgctgtgggtgcgctcgcgccacagttttatacatagtagctccgcccctgaatgagataaataattaaatcttagtttttctgaagagtatagtgcacattactatgccactaactaaaccctacattttgaac

SEQ ID NO: 2184 - DNA, 1900 bp, Zea Mays
cttcctttcccaactcggtcgacgcgttcgccacggctgcgcagtcctcctcctcgcctccgatcccctcccttcgacgatgcgagcacacccgctcatcctcttcgtacctgcaccgccacctcatcctcttcctcgccgcgccgacacccaccgcgctctctccctcccgcggcgacgcccttcgccaacgagaaccgcacgccgtcgtctcccacgggcactgtcgcacgctgggccacgctgcagtcggtggcgccgccacaccttcttcctccatgtgccgtcgccgccctattcttcttcgagatgcagccgctagcgctgccctcctcccagctccccttcatggccgcgtgcagggactatgtgccagtgttagtttttggtaccagtctacaggtctttcatttctacattcaaagagtagtgtactctgtactcttccagaaaactttacatggtaccggaaccgggaccagcggcgacggtgtagtggtgaggaggcagaggagtgccttcggcctcgacggaagaaggccgccgatggagaagaagaccagctgggagcgtggcgcggcgtcgcggtcgtgcacgaggaggaggagcctgcacttgccggagggagaagaagcatgtagcacggtgcggtgctgcagtcgtgcgtgagtagaggacaacattaaggatgatcatagactaccaacattcttcttcagattaaatgttaaattcagtaatttaatttgtttcagtaatacaagattagaccatccctgcacatctgcctatctgcctggcaaaatattatcgtcgcttccaagattgagaatatggctgcgtttggaaagccttagattctagcattggtgatcggttgtgtgtacgtgtctcccgtctgtgaaaaatttatgatcccgaggatgagtataagcttttccatgctcatatggtcctcatcgacgaggaggctggcagtgctcatgctcaaatataccctccactcactgacgttttcaaacctctgataaaggagggcaatgtctacaatgtctcctacattcagatcaagaaagctaataggatgtacaagcatgttgacaacgatatcatgatcggtttcacaaaatggatcctatgctgcctcaacaaacccgcggtttgaacacgtgacagatgacggcttagcttctgtggatggacatcttggtcgcttttgtagatggaatgtttggttggcttttgtagacagaattaggctgcacttgtgattgtgtaacgcttatgagcatggttgtgtggactgtgtcggccaaagtatacctcccaatgccttgtatatatcacatgcttagctgtctatccccaactaggtcgcctgataatagacttcgatcatgtcatgctattctataacaattttcgctgtaacttgcctaatcgtcatactatggtacacgcttaaatttggtgctgcaactttattgtggattataaaagagagaaaaatacagcataaagttataatgtcaaattgccacagctcactgttaagacttatttgatctagtgaaacctagttatctattagtaaaaattaattactgacaagtatacaggtgcatcatgaaaaccaaagattaagtgtgatcaggtagagctagagcaaatttgagggggtgtacttgtcttgcgggtgcatagctttttagtatgaaggtgcagatgaggtgaaaaattgatcataatcactgtttttcatttttgctgtgggtgcgctcgcgccacagttttatacatagtagctccgcccctgaatgagataaataattaaatcttagtttttctgaagagtatagtgcacattactatgccactaactaaaccctacattttgaac

SEQ ID NO: 2185 - DNA, 2242 bp, Zea Mays
cttcctttcccaactcggtcgacgcgttcgccacggctgcgcagtcctcctcctcgcctccgatcccctcccttcgacgatgcgagcacacccgctcatcctcttcgtacctgcaccgccacctcatcctcttcctcgccgcgccgacacccaccgcgctctctccctcccgcggcgacgcccttcgccaacgagaaccgcacgccgtcgtctcccacgggcactgtcgcacgctgggccacgctgcagtcggtggcgccgccacaccttcttcctccatgtgccgtcgccgccctattcttcttcgagatgcagccgctagcgctgccctcctcccagctccccttcatggccgcgtgcagggactatgtgccagtgttagtttttggtaccagtctacaggtctttcatttctacattcaaagagtagtgtactctgtactcttccagaaaactttacatggtaccggaaccgggaccagcggcgacggtgtagtggtgaggaggcagaggagtgccttcggcctcgacggaagaaggccgccgatggagaagaagaccagctgggagcgtggcgcggcgtcgcggtcgtgcacgaggaggaggagcctgcacttgccggagggagaagaagcatgtagcacggtgcggtgctgcagtcgtgcctaggagttgagaccacaatccttatgaaaagttacacttaatacaagattagaccatccctgcacatctgcctatctgcctggcaaaatattatcgtcgcttccaagattgagaatatggctgcgtttggaaagccttagattctagcattgggtaacatgtctattatcccacattatctaagtttaactagatactcatattttatgaaaaaaactgcactgaaaaatcacgaggtgctagatgttgcgctagcagcagcatcatagcacatcttgtctattccagttacaaatgtgcatattgtagaatatttttgtaacatactgctgctcccttccattcgttttggttttggcaattttctatgcacgtgtcgctcatccatggtacctcttttgtactaagatcattgtgacatttaacatgtttacatcatctcttactcgacacatactcactggactaatgttcttgtccctccttttgctttccttagcagatggcggaggttctaataagtaaccttatgattggaaattgcagtgatcggttgtgtgtacgtgtctcccgtctgtgaaaaatttatgatcccgaggatgagtataagcttttccatgctcatatggtcctcatcgacgaggaggctggcagtgctcatgctcaaatataccctccactcactgacgttttcaaacctctgataaaggagggcaatgtctacaatgtctcctacattcagatcaagaaagctaataggatgtacaagcatgttgacaacgatatcatgatcggtttcacaaaatggatcctatgctgcctcaacaaacccgcggtttgaacacgtgacagatgacggcttagcttctgtggatggacatcttggtcgcttttgtagatggaatgtttggttggcttttgtagacagaattaggctgcacttgtgattgtgtaacgcttatgagcatggttgtgtggactgtgtcggccaaagtatacctcccaatgccttgtatatatcacatgcttagctgtctatccccaactaggtcgcctgataatagacttcgatcatgtcatgctattctataacaattttcgctgtaacttgcctaatcgtcatactatggtacacgcttaaatttggtgctgcaactttattgtggattataaaagagagaaaaatacagcataaagttataatgtcaaattgccacagctcactgttaagacttatttgatctagtgaaacctagttatctattagtaaaaattaattactgacaagtatacaggtgcatcatgaaaaccaaagattaagtgtgatcaggtagagctagagcaaatttgagggggtgtacttgtcttgcgggtgcatagctttttagtatgaaggtgcagatgaggtgaaaaattgatcataatcactgtttttcatttttgctgtgggtgcgctcgcgccacagttttatacatagtagctccgcccctgaatgagataaataattaaatcttagtttttctgaagagtatagtgcacattactatgccactaactaaaccctacattttgaac

SEQ ID NO: 2186 - DNA, 3537 bp, Zea Mays
cttcctttcccaactcggtcgacgcgttcgccacggctgcgcagtcctcctcctcgcctccgatcccctcccttcgacgatgcgagcacacccgctcatcctcttcgtacctgcaccgccacctcatcctcttcctcgccgcgccgacacccaccgcgctctctccctcccgcggcgacgcccttcgccaacgagaaccgcacgccgtcgtctcccacgggcactgtcgcacgctgggccacgctgcagtcggtggcgccgccacaccttcttcctccatgtgccgtcgccgccctattcttcttcgagatgcagccgctagcgctgccctcctcccagctccccttcatggccgcgtgcaggtggaccgctccccaccccgtcgccttcctcctcgtactgcccccaagaacgccctaggttactttttcttagatttgccttttggtttcaagtatgtttctctgatgccctagctgtctggtggattaaatttaattattgagctgcaactttcaccaattggtttggagaaagacaatagaggcttgggttcttttagttaagaaaaattgcgtccgtgttcagttataacataagattgtttattgttctctgtaatctcacatttctttttctatatatgaatagggactatgtgccagtgttagtttttggtaccagtctacaggtctttcatttctacattcaaaggtgagaatcaatcatgttcggctccctttaaaaaagtaatgtttcccaatccttcatagtaaaactaaacacacattgtaaagacatttgtcgtacgagatcttttatagaggtgtgttttaacccaaaggcaggctgtggagatcaattccagatattgccttcttgttgtgtctcagttgattttttttagcattgaacgtaacttacagtttgacataacaagcggtgaatgtaacactacagtttaactcaacaagccattggctgtagctcacaatcagcttggctgaactgccaaaaaaaatacaagcagtccattacagttcaacttaacaagagcagttctgttggtaaagccgatgcaaataagtaccaattgttagttaggaagggaaaagtgtcagcagtcaatggctgattaaaaaactaaatgtctttgaatttgttgggccgtgtgcctagtgcctggcctattaactggcttgttcgctgcggctttaatccgactgcgactgcggcttctacagtattttgtctctaggaattgcagctgcaatagtattttgcagctgcaacagtgctcccgcatgggcagccgaacaagctaaacatgtacatatatacttattataccagtgaggtgtgtgtagagtagtgtactctgtactcttccagaaaactttacatggtaccggaaccgggaccagcggcgacggtgtagtggtgaggaggcagaggagtgccttcggcctcgacggaagaaggccgccgatggagaagaagaccagctgggagcgtggcgcggcgtcgcggtcgtgcacgaggaggaggagcctgcacttgccggagggagaagaagcatgtagcacggtgcggtgctgcagtcgtgcgtgagtaggttcttattattgttttctatcctgctggatatgtagtcatgacagttaaattatgtacaactatgattacaaacgggaatacaagctaggagttgagaccacaatccttatgaaaagttacactgtaagtatgtcgtcctgcttgcatttcttccatgttccttttctcactgtaagcttagtttttgtgatcagcttccagatagaagagttattaaagtagacactaaacgattccaacctcctgaatctctttttactcctgtaacacttccatttatatttatacataatggtattgtcaacagtacacatagtttccatcagtttgttaatagtgcacctttagattgaatgagcttcttgcagagcaccaaggattaggcattgaaatgtgtggataaaaatattagaggaccacacatcattattatgcaacattgtctatgcacatgaacataattgtatcggtagtaagccgccagcatgtttgaaagttaaaaatgtgaattaagaacgaattatcgtatcctgctatacttatgcaacctaccaagaattagggcattgtagaaaccatataaagtattgagatcaatttgaatttgtctgcctcatgattttttgatacctgacctttatgaaggtagaggacaacattaaggatgatcatagactaccaacattcttcttcagattaaatgttaaattcagtaatttaatttgtttcagtaatacaagattagaccatccctgcacatctgcctatctgcctggcaaaatattatcgtcgcttccaagattgagaatatggctgcgtttggaaagccttagattctagcattggatggcggaggttctaataagtaaccttatgattggaaattgcagtgatcggttgtgtgtacgtgtctcccgtctgtgaaaaatttatgatcccgaggatgagtataagcttttccatgctcatatggtcctcatcgacgaggaggctggcagtgctcatgctcaaatataccctccactcactgacgttttcaaacctctgataaaggagggcaatgtctacaatgtctcctacattcagatcaagaaagctaataggatgtacaagcatgttgacaacgatatcatgatcggtttcacaaaatggatcctatgctgcctcaacaaacccgcggtttgaacacgtgacagatgacggcttagcttctgtggatggacatcttggtcgcttttgtagatggaatgtttggttggcttttgtagacagaattaggctgcacttgtgattgtgtaacgcttatgagcatggttgtgtggactgtgtcggccaaagtatacctcccaatgccttgtatatatcacatgcttagctgtctatccccaactaggtcgcctgataatagacttcgatcatgtcatgctattctataacaattttcgctgtaacttgcctaatcgtcatactatggtacacgcttaaatttggtgctgcaactttattgtggattataaaagagagaaaaatacagcataaagttataatgtcaaattgccacagctcactgttaagacttatttgatctagtgaaacctagttatctattagtaaaaattaattactgacaagtatacaggtgcatcatgaaaaccaaagattaagtgtgatcaggtagagctagagcaaatttgagggggtgtacttgtcttgcgggtgcatagctttttagtatgaaggtgcagatgaggtgaaaaattgatcataatcactgtttttcatttttgctgtgggtgcgctcgcgccacagttttatacatagtagctccgcccctgaatgagataaataattaaatcttagtttttctgaagagtatagtgcacattactatgccactaactaaaccctacattttgaac

SEQ ID NO: 2187 - DNA, 3111 bp, Zea Mays
cttcctttcccaactcggtcgacgcgttcgccacggctgcgcagtcctcctcctcgcctccgatcccctcccttcgacgatgcgagcacacccgctcatcctcttcgtacctgcaccgccacctcatcctcttcctcgccgcgccgacacccaccgcgctctctccctcccgcggcgacgcccttcgccaacgagaaccgcacgccgtcgtctcccacgggcactgtcgcacgctgggccacgctgcagtcggtggcgccgccacaccttcttcctccatgtgccgtcgccgccctattcttcttcgagatgcagccgctagcgctgccctcctcccagctccccttcatggccgcgtgcagggactatgtgccagtgttagtttttggtaccagtctacaggtctttcatttctacattcaaaggtgagaatcaatcatgttcggctccctttaaaaaagtaatgtttcccaatccttcatagtaaaactaaacacacattgtaaagacatttgtcgtacgagatcttttatagaggtgtgttttaacccaaaggcaggctgtggagatcaattccagatattgccttcttgttgtgtctcagttgattttttttagcattgaacgtaacttacagtttgacataacaagcggtgaatgtaacactacagtttaactcaacaagccattggctgtagctcacaatcagcttggctgaactgccaaaaaaaatacaagcagtccattacagttcaacttaacaagagcagttctgttggtaaagccgatgcaaataagtaccaattgttagttaggaagggaaaagtgtcagcagtcaatggctgattaaaaaactaaatgtctttgaatttgttgggccgtgtgcctagtgcctggcctattaactggcttgttcgctgcggctttaatccgactgcgactgcggcttctacagtattttgtctctaggaattgcagctgcaatagtattttgcagctgcaacagtgctcccgcatgggcagccgaacaagctaaacatgtacatatatacttattataccagtgaggtgtgtgtagagtagtgtactctgtactcttccagaaaactttacatggtaccggaaccgggaccagcggcgacggtgtagtggtgaggaggcagaggagtgccttcggcctcgacggaagaaggccgccgatggagaagaagaccagctgggagcgtggcgcggcgtcgcggtcgtgcacgaggaggaggagcctgcacttgccggagggagaagaagcatgtagcacggtgcggtgctgcagtcgtgcgtgagtaggttcttattattgttttctatcctgctggatatgtagtcatgacagttaaattatgtacaactatgattacaaacgggaatacaagctaggagttgagaccacaatccttatgaaaagttacactgtgagccttcttcacatattgagcaacaataatcatcttcgtggtcatggtggtgatgaccatgatgcgcctagaaatgcatgtgtgaaatattcaatatatgtcaccatttctattttcagtaatacaagattagaccatccctgcacatctgcctatctgcctggcaaaatattatcgtcgcttccaagattgagaatatggctgcgtttggaaagccttagattctagcattgggtaacatgtctattatcccacattatctaagtttaactagatactcatattttatgaaaaaaactgcactgaaaaatcacgaggtgctagatgttgcgctagcagcagcatcatagcacatcttgtctattccagttacaaatgtgcatattgtagaatatttttgtaacatactgctgctcccttccattcgttttggttttggcaattttctatgcacgtgtcgctcatccatggtacctcttttgtactaagatcattgtgacatttaacatgtttacatcatctcttactcgacacatactcactggactaatgttcttgtccctccttttgctttccttagcagatggcggaggttctaataagtaaccttatgattggaaattgcagtgatcggttgtgtgtacgtgtctcccgtctgtgaaaaatttatgatcccgaggatgagtataagcttttccatgctcatatggtcctcatcgacgaggaggctggcagtgctcatgctcaaatataccctccactcactgacgttttcaaacctctgataaaggagggcaatgtctacaatgtctcctacattcagatcaagaaagctaataggatgtacaagcatgttgacaacgatatcatgatcggtttcacaaaatggatcctatgctgcctcaacaaacccgcggtttgaacacgtgacagatgacggcttagcttctgtggatggacatcttggtcgcttttgtagatggaatgtttggttggcttttgtagacagaattaggctgcacttgtgattgtgtaacgcttatgagcatggttgtgtggactgtgtcggccaaagtatacctcccaatgccttgtatatatcacatgcttagctgtctatccccaactaggtcgcctgataatagacttcgatcatgtcatgctattctataacaattttcgctgtaacttgcctaatcgtcatactatggtacacgcttaaatttggtgctgcaactttattgtggattataaaagagagaaaaatacagcataaagttataatgtcaaattgccacagctcactgttaagacttatttgatctagtgaaacctagttatctattagtaaaaattaattactgacaagtatacaggtgcatcatgaaaaccaaagattaagtgtgatcaggtagagctagagcaaatttgagggggtgtacttgtcttgcgggtgcatagctttttagtatgaaggtgcagatgaggtgaaaaattgatcataatcactgtttttcatttttgctgtgggtgcgctcgcgccacagttttatacatagtagctccgcccctgaatgagataaataattaaatcttagtttttctgaagagtatagtgcacattactatgccactaactaaaccctacattttgaac

SEQ ID NO: 2188 - DNA, 1932 bp, Zea Mays
cttcctttcccaactcggtcgacgcgttcgccacggctgcgcagtcctcctcctcgcctccgatcccctcccttcgacgatgcgagcacacccgctcatcctcttcgtacctgcaccgccacctcatcctcttcctcgccgcgccgacacccaccgcgctctctccctcccgcggcgacgcccttcgccaacgagaaccgcacgccgtcgtctcccacgggcactgtcgcacgctgggccacgctgcagtcggtggcgccgccacaccttcttcctccatgtgccgtcgccgccctattcttcttcgagatgcagccgctagcgctgccctcctcccagctccccttcatggccgcgtgcagggactatgtgccagtgttagtttttggtaccagtctacaggtctttcatttctacattcaaagagtagtgtactctgtactcttccagaaaactttacatggtaccggaaccgggaccagcggcgacggtgtagtggtgaggaggcagaggagtgccttcggcctcgacggaagaaggccgccgatggagaagaagaccagctgggagcgtggcgcggcgtcgcggtcgtgcacgaggaggaggagcctgcacttgccggagggagaagaagcatgtagcacggtgcggtgctgcagtcgtgcgtgagccttcttcacatattgagcaacaataatcatcttcgtggtcatggtggtgatgaccatgatgcgcctagaaatgcatgtgtgaaatattcaatatatgtcaccatttctattttcagtaatacaagattagaccatccctgcacatctgcctatctgcctggcaaaatattatcgtcgcttccaagattgagaatatggctgcgtttggaaagccttagattctagcattggtgatcggttgtgtgtacgtgtctcccgtctgtgaaaaatttatgatcccgaggatgagtataagcttttccatgctcatatggtcctcatcgacgaggaggctggcagtgctcatgctcaaatataccctccactcactgacgttttcaaacctctgataaaggagggcaatgtctacaatgtctcctacattcagatcaagaaagctaataggatgtacaagcatgttgacaacgatatcatgatcggtttcacaaaatggatcctatgctgcctcaacaaacccgcggtttgaacacgtgacagatgacggcttagcttctgtggatggacatcttggtcgcttttgtagatggaatgtttggttggcttttgtagacagaattaggctgcacttgtgattgtgtaacgcttatgagcatggttgtgtggactgtgtcggccaaagtatacctcccaatgccttgtatatatcacatgcttagctgtctatccccaactaggtcgcctgataatagacttcgatcatgtcatgctattctataacaattttcgctgtaacttgcctaatcgtcatactatggtacacgcttaaatttggtgctgcaactttattgtggattataaaagagagaaaaatacagcataaagttataatgtcaaattgccacagctcactgttaagacttatttgatctagtgaaacctagttatctattagtaaaaattaattactgacaagtatacaggtgcatcatgaaaaccaaagattaagtgtgatcaggtagagctagagcaaatttgagggggtgtacttgtcttgcgggtgcatagctttttagtatgaaggtgcagatgaggtgaaaaattgatcataatcactgtttttcatttttgctgtgggtgcgctcgcgccacagttttatacatagtagctccgcccctgaatgagataaataattaaatcttagtttttctgaagagtatagtgcacattactatgccactaactaaaccctacattttgaac

SEQ ID NO: 2189 - DNA, 3054 bp, Zea Mays
cttcctttcccaactcggtcgacgcgttcgccacggctgcgcagtcctcctcctcgcctccgatcccctcccttcgacgatgcgagcacacccgctcatcctcttcgtacctgcaccgccacctcatcctcttcctcgccgcgccgacacccaccgcgctctctccctcccgcggcgacgcccttcgccaacgagaaccgcacgccgtcgtctcccacgggcactgtcgcacgctgggccacgctgcagtcggtggcgccgccacaccttcttcctccatgtgccgtcgccgccctattcttcttcgagatgcagccgctagcgctgccctcctcccagctccccttcatggccgcgtgcaggtggaccgctccccaccccgtcgccttcctcctcgtactgcccccaagaacgccctaggttactttttcttagatttgccttttggtttcaagtatgtttctctgatgccctagctgtctggtggattaaatttaattattgagctgcaactttcaccaattggtttggagaaagacaatagaggcttgggttcttttagttaagaaaaattgcgtccgtgttcagttataacataagattgtttattgttctctgtaatctcacatttctttttctatatatgaatagggactatgtgccagtgttagtttttggtaccagtctacaggtctttcatttctacattcaaaggtgagaatcaatcatgttcggctccctttaaaaaagtaatgtttcccaatccttcatagtaaaactaaacacacattgtaaagacatttgtcgtacgagatcttttatagaggtgtgttttaacccaaaggcaggctgtggagatcaattccagatattgccttcttgttgtgtctcagttgattttttttagcattgaacgtaacttacagtttgacataacaagcggtgaatgtaacactacagtttaactcaacaagccattggctgtagctcacaatcagcttggctgaactgccaaaaaaaatacaagcagtccattacagttcaacttaacaagagcagttctgttggtaaagccgatgcaaataagtaccaattgttagttaggaagggaaaagtgtcagcagtcaatggctgattaaaaaactaaatgtctttgaatttgttgggccgtgtgcctagtgcctggcctattaactggcttgttcgctgcggctttaatccgactgcgactgcggcttctacagtattttgtctctaggaattgcagctgcaatagtattttgcagctgcaacagtgctcccgcatgggcagccgaacaagctaaacatgtacatatatacttattataccagtgaggtgtgtgtagagtagtgtactctgtactcttccagaaaactttacatggtaccggaaccgggaccagcggcgacggtgtagtggtgaggaggcagaggagtgccttcggcctcgacggaagaaggccgccgatggagaagaagaccagctgggagcgtggcgcggcgtcgcggtcgtgcacgaggaggaggagcctgcacttgccggagggagaagaagcatgtagcacggtgcggtgctgcagtcgtgcgtgagtaggttcttattattgttttctatcctgctggatatgtagtcatgacagttaaattatgtacaactatgattacaaacgggaatacaagctaggagttgagaccacaatccttatgaaaagttacactgtgagccttcttcacatattgagcaacaataatcatcttcgtggtcatggtggtgatgaccatgatgcgcctagaaatgcatgtgtgaaatattcaatatatgtcaccatttctattttcagtaatacaagattagaccatccctgcacatctgcctatctgcctggcaaaatattatcgtcgcttccaagattgagaatatggctgcgtttggaaagccttagattctagcattggcagatggcggaggttctaataagtaaccttatgattggaaattgcagtgatcggttgtgtgtacgtgtctcccgtctgtgaaaaatttatgatcccgaggatgagtataagcttttccatgctcatatggtcctcatcgacgaggaggctggcagtgctcatgctcaaatataccctccactcactgacgttttcaaacctctgataaaggagggcaatgtctacaatgtctcctacattcagatcaagaaagctaataggatgtacaagcatgttgacaacgatatcatgatcggtttcacaaaatggatcctatgctgcctcaacaaacccgcggtttgaacacgtgacagatgacggcttagcttctgtggatggacatcttggtcgcttttgtagatggaatgtttggttggcttttgtagacagaattaggctgcacttgtgattgtgtaacgcttatgagcatggttgtgtggactgtgtcggccaaagtatacctcccaatgccttgtatatatcacatgcttagctgtctatccccaactaggtcgcctgataatagacttcgatcatgtcatgctattctataacaattttcgctgtaacttgcctaatcgtcatactatggtacacgcttaaatttggtgctgcaactttattgtggattataaaagagagaaaaatacagcataaagttataatgtcaaattgccacagctcactgttaagacttatttgatctagtgaaacctagttatctattagtaaaaattaattactgacaagtatacaggtgcatcatgaaaaccaaagattaagtgtgatcaggtagagctagagcaaatttgagggggtgtacttgtcttgcgggtgcatagctttttagtatgaaggtgcagatgaggtgaaaaattgatcataatcactgtttttcatttttgctgtgggtgcgctcgcgccacagttttatacatagtagctccgcccctgaatgagataaataattaaatcttagtttttctgaagagtatagtgcacattactatgccactaactaaaccctacattttgaac

SEQ ID NO: 2190 - DNA, 3431 bp, Zea Mays
cttcctttcccaactcggtcgacgcgttcgccacggctgcgcagtcctcctcctcgcctccgatcccctcccttcgacgatgcgagcacacccgctcatcctcttcgtacctgcaccgccacctcatcctcttcctcgccgcgccgacacccaccgcgctctctccctcccgcggcgacgcccttcgccaacgagaaccgcacgccgtcgtctcccacgggcactgtcgcacgctgggccacgctgcagtcggtggcgccgccacaccttcttcctccatgtgccgtcgccgccctattcttcttcgagatgcagccgctagcgctgccctcctcccagctccccttcatggccgcgtgcaggtggaccgctccccaccccgtcgccttcctcctcgtactgcccccaagaacgccctagggactatgtgccagtgttagtttttggtaccagtctacaggtctttcatttctacattcaaaggtgagaatcaatcatgttcggctccctttaaaaaagtaatgtttcccaatccttcatagtaaaactaaacacacattgtaaagacatttgtcgtacgagatcttttatagaggtgtgttttaacccaaaggcaggctgtggagatcaattccagatattgccttcttgttgtgtctcagttgattttttttagcattgaacgtaacttacagtttgacataacaagcggtgaatgtaacactacagtttaactcaacaagccattggctgtagctcacaatcagcttggctgaactgccaaaaaaaatacaagcagtccattacagttcaacttaacaagagcagttctgttggtaaagccgatgcaaataagtaccaattgttagttaggaagggaaaagtgtcagcagtcaatggctgattaaaaaactaaatgtctttgaatttgttgggccgtgtgcctagtgcctggcctattaactggcttgttcgctgcggctttaatccgactgcgactgcggcttctacagtattttgtctctaggaattgcagctgcaatagtattttgcagctgcaacagtgctcccgcatgggcagccgaacaagctaaacatgtacatatatacttattataccagtgaggtgtgtgtagagtagtgtactctgtactcttccagaaaactttacatggtaccggaaccgggaccagcggcgacggtgtagtggtgaggaggcagaggagtgccttcggcctcgacggaagaaggccgccgatggagaagaagaccagctgggagcgtggcgcggcgtcgcggtcgtgcacgaggaggaggagcctgcacttgccggagggagaagaagcatgtagcacggtgcggtgctgcagtcgtgcgtgagtaggttcttattattgttttctatcctgctggatatgtagtcatgacagttaaattatgtacaactatgattacaaacgggaatacaagctaggagttgagaccacaatccttatgaaaagttacactgtaagtatgtcgtcctgcttgcatttcttccatgttccttttctcactgtaagcttagtttttgtgatcagcttccagatagaagagttattaaagtagacactaaacgattccaacctcctgaatctctttttactcctgtaacacttccatttatatttatacataatggtattgtcaacagtacacatagtttccatcagtttgttaatagtgcacctttagattgaatgagcttcttgcagagcaccaaggattaggcattgaaatgtgtggataaaaatattagaggaccacacatcattattatgcaacattgtctatgcacatgaacataattgtatcggtagtaagccgccagcatgtttgaaagttaaaaatgtgaattaagaacgaattatcgtatcctgctatacttatgcaacctaccaagaattagggcattgtagaaaccatataaagtattgagatcaatttgaatttgtctgcctcatgattttttgatacctgacctttatgaaggtagaggacaacattaaggatgatcatagactaccaacattcttcttcagattaaatgttaaattcagtaatttaatttgtttcaggtgagccttcttcacatattgagcaacaataatcatcttcgtggtcatggtggtgatgaccatgatgcgcctagaaatgcatgtgtgaaatattcaatatatgtcaccatttctattttcagtaatacaagattagaccatccctgcacatctgcctatctgcctggcaaaatattatcgtcgcttccaagattgagaatatggctgcgtttggaaagccttagattctagcattggcagatggcggaggttctaataagtaaccttatgattggaaattgcagtgatcggttgtgtgtacgtgtctcccgtctgtgaaaaatttatgatcccgaggatgagtataagcttttccatgctcatatggtcctcatcgacgaggaggctggcagtgctcatgctcaaatataccctccactcactgacgttttcaaacctctgataaaggagggcaatgtctacaatgtctcctacattcagatcaagaaagctaataggatgtacaagcatgttgacaacgatatcatgatcggtttcacaaaatggatcctatgctgcctcaacaaacccgcggtttgaacacgtgacagatgacggcttagcttctgtggatggacatcttggtcgcttttgtagatggaatgtttggttggcttttgtagacagaattaggctgcacttgtgattgtgtaacgcttatgagcatggttgtgtggactgtgtcggccaaagtatacctcccaatgccttgtatatatcacatgcttagctgtctatccccaactaggtcgcctgataatagacttcgatcatgtcatgctattctataacaattttcgctgtaacttgcctaatcgtcatactatggtacacgcttaaatttggtgctgcaactttattgtggattataaaagagagaaaaatacagcataaagttataatgtcaaattgccacagctcactgttaagacttatttgatctagtgaaacctagttatctattagtaaaaattaattactgacaagtatacaggtgcatcatgaaaaccaaagattaagtgtgatcaggtagagctagagcaaatttgagggggtgtacttgtcttgcgggtgcatagctttttagtatgaaggtgcagatgaggtgaaaaattgatcataatcactgtttttcatttttgctgtgggtgcgctcgcgccacagttttatacatagtagctccgcccctgaatgagataaataattaaatcttagtttttctgaagagtatagtgcacattactatgccactaactaaaccctacattttgaac

SEQ ID NO: 2191 - DNA, 3422 bp, Zea Mays
cttcctttcccaactcggtcgacgcgttcgccacggctgcgcagtcctcctcctcgcctccgatcccctcccttcgacgatgcgagcacacccgctcatcctcttcgtacctgcaccgccacctcatcctcttcctcgccgcgccgacacccaccgcgctctctccctcccgcggcgacgcccttcgccaacgagaaccgcacgccgtcgtctcccacgggcactgtcgcacgctgggccacgctgcagtcggtggcgccgccacaccttcttcctccatgtgccgtcgccgccctattcttcttcgagatgcagccgctagcgctgccctcctcccagctccccttcatggccgcgtgcaggtggaccgctccccaccccgtcgccttcctcctcgtactgcccccaagaacgccctaggttactttttcttagatttgccttttggtttcaagtatgtttctctgatgccctagctgtctggtggattaaatttaattattgagctgcaactttcaccaattggtttggagaaagacaatagaggcttgggttcttttagttaagaaaaattgcgtccgtgttcagttataacataagattgtttattgttctctgtaatctcacatttctttttctatatatgaatagggactatgtgccagtgttagtttttggtaccagtctacaggtctttcatttctacattcaaaggtgagaatcaatcatgttcggctccctttaaaaaagtaatgtttcccaatccttcatagtaaaactaaacacacattgtaaagacatttgtcgtacgagatcttttatagaggtgtgttttaacccaaaggcaggctgtggagatcaattccagatattgccttcttgttgtgtctcagttgattttttttagcattgaacgtaacttacagtttgacataacaagcggtgaatgtaacactacagtttaactcaacaagccattggctgtagctcacaatcagcttggctgaactgccaaaaaaaatacaagcagtccattacagttcaacttaacaagagcagttctgttggtaaagccgatgcaaataagtaccaattgttagttaggaagggaaaagtgtcagcagtcaatggctgattaaaaaactaaatgtctttgaatttgttgggccgtgtgcctagtgcctggcctattaactggcttgttcgctgcggctttaatccgactgcgactgcggcttctacagtattttgtctctaggaattgcagctgcaatagtattttgcagctgcaacagtgctcccgcatgggcagccgaacaagctaaacatgtacatatatacttattataccagtgaggtgtgtgtagagtagtgtactctgtactcttccagaaaactttacatggtaccggaaccgggaccagcggcgacggtgtagtggtgaggaggcagaggagtgccttcggcctcgacggaagaaggccgccgatggagaagaagaccagctgggagcgtggcgcggcgtcgcggtcgtgcacgaggaggaggagcctgcacttgccggagggagaagaagcatgtagcacggtgcggtgctgcagtcgtgcgtgagtaggttcttattattgttttctatcctgctggatatgtagtcatgacagttaaattatgtacaactatgattacaaacgggaatacaagctaggagttgagaccacaatccttatgaaaagttacactgtaagtatgtcgtcctgcttgcatttcttccatgttccttttctcactgtaagcttagtttttgtgatcagcttccagatagaagagttattaaagtagacactaaacgattccaacctcctgaatctctttttactcctgtaacacttccatttatatttatacataatggtattgtcaacagtacacatagtttccatcagtttgttaatagtgcacctttagattgaatgagcttcttgcagagcaccaaggattaggcattgaaatgtgtggataaaaatattagaggaccacacatcattattatgcaacattgtctatgcacatgaacataattgtatcggtagtaagccgccagcatgtttgaaagttaaaaatgtgaattaagaacgaattatcgtatcctgctatacttatgcaacctaccaagaattagggcattgtagaaaccatataaagtattgagatcaatttgaatttgtctgcctcatgattttttgatacctgacctttatgaaggtagaggacaacattaaggatgatcatagactaccaacattcttcttcagattaaatgttaaattcagtaatttaatttgtttcagatggcggaggttctaataagtaaccttatgattggaaattgcagtgatcggttgtgtgtacgtgtctcccgtctgtgaaaaatttatgatcccgaggatgagtataagcttttccatgctcatatggtcctcatcgacgaggaggctggcagtgctcatgctcaaatataccctccactcactgacgttttcaaacctctgataaaggagggcaatgtctacaatgtctcctacattcagatcaagaaagctaataggatgtacaagcatgttgacaacgatatcatgatcggtttcacaaaatggatcctatgctgcctcaacaaacccgcggtttgaacacgtgacagatgacggcttagcttctgtggatggacatcttggtcgcttttgtagatggaatgtttggttggcttttgtagacagaattaggctgcacttgtgattgtgtaacgcttatgagcatggttgtgtggactgtgtcggccaaagtatacctcccaatgccttgtatatatcacatgcttagctgtctatccccaactaggtcgcctgataatagacttcgatcatgtcatgctattctataacaattttcgctgtaacttgcctaatcgtcatactatggtacacgcttaaatttggtgctgcaactttattgtggattataaaagagagaaaaatacagcataaagttataatgtcaaattgccacagctcactgttaagacttatttgatctagtgaaacctagttatctattagtaaaaattaattactgacaagtatacaggtgcatcatgaaaaccaaagattaagtgtgatcaggtagagctagagcaaatttgagggggtgtacttgtcttgcgggtgcatagctttttagtatgaaggtgcagatgaggtgaaaaattgatcataatcactgtttttcatttttgctgtgggtgcgctcgcgccacagttttatacatagtagctccgcccctgaatgagataaataattaaatcttagtttttctgaagagtatagtgcacattactatgccactaactaaaccctacattttgaac

SEQ ID NO: 2192 - DNA, 2889 bp, Zea Mays
cttcctttcccaactcggtcgacgcgttcgccacggctgcgcagtcctcctcctcgcctccgatcccctcccttcgacgatgcgagcacacccgctcatcctcttcgtacctgcaccgccacctcatcctcttcctcgccgcgccgacacccaccgcgctctctccctcccgcggcgacgcccttcgccaacgagaaccgcacgccgtcgtctcccacgggcactgtcgcacgctgggccacgctgcagtcggtggcgccgccacaccttcttcctccatgtgccgtcgccgccctattcttcttcgagatgcagccgctagcgctgccctcctcccagctccccttcatggccgcgtgcaggtggaccgctccccaccccgtcgccttcctcctcgtactgcccccaagaacgccctaggttactttttcttagatttgccttttggtttcaagtatgtttctctgatgccctagctgtctggtggattaaatttaattattgagctgcaactttcaccaattggtttggagaaagacaatagaggcttgggttcttttagttaagaaaaattgcgtccgtgttcagttataacataagattgtttattgttctctgtaatctcacatttctttttctatatatgaatagggactatgtgccagtgttagtttttggtaccagtctacaggtctttcatttctacattcaaaggtgagaatcaatcatgttcggctccctttaaaaaagtaatgtttcccaatccttcatagtaaaactaaacacacattgtaaagacatttgtcgtacgagatcttttatagaggtgtgttttaacccaaaggcaggctgtggagatcaattccagatattgccttcttgttgtgtctcagttgattttttttagcattgaacgtaacttacagtttgacataacaagcggtgaatgtaacactacagtttaactcaacaagccattggctgtagctcacaatcagcttggctgaactgccaaaaaaaatacaagcagtccattacagttcaacttaacaagagcagttctgttggtaaagccgatgcaaataagtaccaattgttagttaggaagggaaaagtgtcagcagtcaatggctgattaaaaaactaaatgtctttgaatttgttgggccgtgtgcctagtgcctggcctattaactggcttgttcgctgcggctttaatccgactgcgactgcggcttctacagtattttgtctctaggaattgcagctgcaatagtattttgcagctgcaacagtgctcccgcatgggcagccgaacaagctaaacatgtacatatatacttattataccagtgaggtgtgtgtagagtagtgtactctgtactcttccagaaaactttacatggtaccggaaccgggaccagcggcgacggtgtagtggtgaggaggcagaggagtgccttcggcctcgacggaagaaggccgccgatggagaagaagaccagctgggagcgtggcgcggcgtcgcggtcgtgcacgaggaggaggagcctgcacttgccggagggagaagaagcatgtagcacggtgcggtgctgcagtcgtgcgtgagtagaggacaacattaaggatgatcatagactaccaacattcttcttcagattaaatgttaaattcagtaatttaatttgtttcagtaatacaagattagaccatccctgcacatctgcctatctgcctggcaaaatattatcgtcgcttccaagattgagaatatggctgcgtttggaaagccttagattctagcattggcagatggcggaggttctaataagtaaccttatgattggaaattgcagtgatcggttgtgtgtacgtgtctcccgtctgtgaaaaatttatgatcccgaggatgagtataagcttttccatgctcatatggtcctcatcgacgaggaggctggcagtgctcatgctcaaatataccctccactcactgacgttttcaaacctctgataaaggagggcaatgtctacaatgtctcctacattcagatcaagaaagctaataggatgtacaagcatgttgacaacgatatcatgatcggtttcacaaaatggatcctatgctgcctcaacaaacccgcggtttgaacacgtgacagatgacggcttagcttctgtggatggacatcttggtcgcttttgtagatggaatgtttggttggcttttgtagacagaattaggctgcacttgtgattgtgtaacgcttatgagcatggttgtgtggactgtgtcggccaaagtatacctcccaatgccttgtatatatcacatgcttagctgtctatccccaactaggtcgcctgataatagacttcgatcatgtcatgctattctataacaattttcgctgtaacttgcctaatcgtcatactatggtacacgcttaaatttggtgctgcaactttattgtggattataaaagagagaaaaatacagcataaagttataatgtcaaattgccacagctcactgttaagacttatttgatctagtgaaacctagttatctattagtaaaaattaattactgacaagtatacaggtgcatcatgaaaaccaaagattaagtgtgatcaggtagagctagagcaaatttgagggggtgtacttgtcttgcgggtgcatagctttttagtatgaaggtgcagatgaggtgaaaaattgatcataatcactgtttttcatttttgctgtgggtgcgctcgcgccacagttttatacatagtagctccgcccctgaatgagataaataattaaatcttagtttttctgaagagtatagtgcacattactatgccactaactaaaccctacattttgaac

SEQ ID NO: 2193 - DNA, 2740 bp, Zea Mays
cttcctttcccaactcggtcgacgcgttcgccacggctgcgcagtcctcctcctcgcctccgatcccctcccttcgacgatgcgagcacacccgctcatcctcttcgtacctgcaccgccacctcatcctcttcctcgccgcgccgacacccaccgcgctctctccctcccgcggcgacgcccttcgccaacgagaaccgcacgccgtcgtctcccacgggcactgtcgcacgctgggccacgctgcagtcggtggcgccgccacaccttcttcctccatgtgccgtcgccgccctattcttcttcgagatgcagccgctagcgctgccctcctcccagctccccttcatggccgcgtgcaggtggaccgctccccaccccgtcgccttcctcctcgtactgcccccaagaacgccctagggactatgtgccagtgttagtttttggtaccagtctacaggtctttcatttctacattcaaaggtgagaatcaatcatgttcggctccctttaaaaaagtaatgtttcccaatccttcatagtaaaactaaacacacattgtaaagacatttgtcgtacgagatcttttatagaggtgtgttttaacccaaaggcaggctgtggagatcaattccagatattgccttcttgttgtgtctcagttgattttttttagcattgaacgtaacttacagtttgacataacaagcggtgaatgtaacactacagtttaactcaacaagccattggctgtagctcacaatcagcttggctgaactgccaaaaaaaatacaagcagtccattacagttcaacttaacaagagcagttctgttggtaaagccgatgcaaataagtaccaattgttagttaggaagggaaaagtgtcagcagtcaatggctgattaaaaaactaaatgtctttgaatttgttgggccgtgtgcctagtgcctggcctattaactggcttgttcgctgcggctttaatccgactgcgactgcggcttctacagtattttgtctctaggaattgcagctgcaatagtattttgcagctgcaacagtgctcccgcatgggcagccgaacaagctaaacatgtacatatatacttattataccagtgaggtgtgtgtagagtagtgtactctgtactcttccagaaaactttacatggtaccggaaccgggaccagcggcgacggtgtagtggtgaggaggcagaggagtgccttcggcctcgacggaagaaggccgccgatggagaagaagaccagctgggagcgtggcgcggcgtcgcggtcgtgcacgaggaggaggagcctgcacttgccggagggagaagaagcatgtagcacggtgcggtgctgcagtcgtgcgtgagtaggttcttattattgttttctatcctgctggatatgtagtcatgacagttaaattatgtacaactatgattacaaacgggaatacaagctaggagttgagaccacaatccttatgaaaagttacactgtagaggacaacattaaggatgatcatagactaccaacattcttcttcagattaaatgttaaattcagtaatttaatttgtttcagtaatacaagattagaccatccctgcacatctgcctatctgcctggcaaaatattatcgtcgcttccaagattgagaatatggctgcgtttggaaagccttagattctagcattggtgatcggttgtgtgtacgtgtctcccgtctgtgaaaaatttatgatcccgaggatgagtataagcttttccatgctcatatggtcctcatcgacgaggaggctggcagtgctcatgctcaaatataccctccactcactgacgttttcaaacctctgataaaggagggcaatgtctacaatgtctcctacattcagatcaagaaagctaataggatgtacaagcatgttgacaacgatatcatgatcggtttcacaaaatggatcctatgctgcctcaacaaacccgcggtttgaacacgtgacagatgacggcttagcttctgtggatggacatcttggtcgcttttgtagatggaatgtttggttggcttttgtagacagaattaggctgcacttgtgattgtgtaacgcttatgagcatggttgtgtggactgtgtcggccaaagtatacctcccaatgccttgtatatatcacatgcttagctgtctatccccaactaggtcgcctgataatagacttcgatcatgtcatgctattctataacaattttcgctgtaacttgcctaatcgtcatactatggtacacgcttaaatttggtgctgcaactttattgtggattataaaagagagaaaaatacagcataaagttataatgtcaaattgccacagctcactgttaagacttatttgatctagtgaaacctagttatctattagtaaaaattaattactgacaagtatacaggtgcatcatgaaaaccaaagattaagtgtgatcaggtagagctagagcaaatttgagggggtgtacttgtcttgcgggtgcatagctttttagtatgaaggtgcagatgaggtgaaaaattgatcataatcactgtttttcatttttgctgtgggtgcgctcgcgccacagttttatacatagtagctccgcccctgaatgagataaataattaaatcttagtttttctgaagagtatagtgcacattactatgccactaactaaaccctacattttgaac

SEQ ID NO: 2194 - DNA, 2551 bp, Zea Mays
cttcctttcccaactcggtcgacgcgttcgccacggctgcgcagtcctcctcctcgcctccgatcccctcccttcgacgatgcgagcacacccgctcatcctcttcgtacctgcaccgccacctcatcctcttcctcgccgcgccgacacccaccgcgctctctccctcccgcggcgacgcccttcgccaacgagaaccgcacgccgtcgtctcccacgggcactgtcgcacgctgggccacgctgcagtcggtggcgccgccacaccttcttcctccatgtgccgtcgccgccctattcttcttcgagatgcagccgctagcgctgccctcctcccagctccccttcatggccgcgtgcagggactatgtgccagtgttagtttttggtaccagtctacaggtctttcatttctacattcaaagagtagtgtactctgtactcttccagaaaactttacatggtaccggaaccgggaccagcggcgacggtgtagtggtgaggaggcagaggagtgccttcggcctcgacggaagaaggccgccgatggagaagaagaccagctgggagcgtggcgcggcgtcgcggtcgtgcacgaggaggaggagcctgcacttgccggagggagaagaagcatgtagcacggtgcggtgctgcagtcgtgcgtgagtaggttcttattattgttttctatcctgctggatatgtagtcatgacagttaaattatgtacaactatgattacaaacgggaatacaagctaggagttgagaccacaatccttatgaaaagttacactgtaagtatgtcgtcctgcttgcatttcttccatgttccttttctcactgtaagcttagtttttgtgatcagcttccagatagaagagttattaaagtagacactaaacgattccaacctcctgaatctctttttactcctgtaacacttccatttatatttatacataatggtattgtcaacagtacacatagtttccatcagtttgttaatagtgcacctttagattgaatgagcttcttgcagagcaccaaggattaggcattgaaatgtgtggataaaaatattagaggaccacacatcattattatgcaacattgtctatgcacatgaacataattgtatcggtagtaagccgccagcatgtttgaaagttaaaaatgtgaattaagaacgaattatcgtatcctgctatacttatgcaacctaccaagaattagggcattgtagaaaccatataaagtattgagatcaatttgaatttgtctgcctcatgattttttgatacctgacctttatgaaggtagaggacaacattaaggatgatcatagactaccaacattcttcttcagattaaatgttaaattcagtaatttaatttgtttcagtaatacaagattagaccatccctgcacatctgcctatctgcctggcaaaatattatcgtcgcttccaagattgagaatatggctgcgtttggaaagccttagattctagcattggtgatcggttgtgtgtacgtgtctcccgtctgtgaaaaatttatgatcccgaggatgagtataagcttttccatgctcatatggtcctcatcgacgaggaggctggcagtgctcatgctcaaatataccctccactcactgacgttttcaaacctctgataaaggagggcaatgtctacaatgtctcctacattcagatcaagaaagctaataggatgtacaagcatgttgacaacgatatcatgatcggtttcacaaaatggatcctatgctgcctcaacaaacccgcggtttgaacacgtgacagatgacggcttagcttctgtggatggacatcttggtcgcttttgtagatggaatgtttggttggcttttgtagacagaattaggctgcacttgtgattgtgtaacgcttatgagcatggttgtgtggactgtgtcggccaaagtatacctcccaatgccttgtatatatcacatgcttagctgtctatccccaactaggtcgcctgataatagacttcgatcatgtcatgctattctataacaattttcgctgtaacttgcctaatcgtcatactatggtacacgcttaaatttggtgctgcaactttattgtggattataaaagagagaaaaatacagcataaagttataatgtcaaattgccacagctcactgttaagacttatttgatctagtgaaacctagttatctattagtaaaaattaattactgacaagtatacaggtgcatcatgaaaaccaaagattaagtgtgatcaggtagagctagagcaaatttgagggggtgtacttgtcttgcgggtgcatagctttttagtatgaaggtgcagatgaggtgaaaaattgatcataatcactgtttttcatttttgctgtgggtgcgctcgcgccacagttttatacatagtagctccgcccctgaatgagataaataattaaatcttagtttttctgaagagtatagtgcacattactatgccactaactaaaccctacattttgaac

SEQ ID NO: 2195 - DNA, 3133 bp, Zea Mays
cttcctttcccaactcggtcgacgcgttcgccacggctgcgcagtcctcctcctcgcctccgatcccctcccttcgacgatgcgagcacacccgctcatcctcttcgtacctgcaccgccacctcatcctcttcctcgccgcgccgacacccaccgcgctctctccctcccgcggcgacgcccttcgccaacgagaaccgcacgccgtcgtctcccacgggcactgtcgcacgctgggccacgctgcagtcggtggcgccgccacaccttcttcctccatgtgccgtcgccgccctattcttcttcgagatgcagccgctagcgctgccctcctcccagctccccttcatggccgcgtgcagggactatgtgccagtgttagtttttggtaccagtctacaggtctttcatttctacattcaaaggtgagaatcaatcatgttcggctccctttaaaaaagtaatgtttcccaatccttcatagtaaaactaaacacacattgtaaagacatttgtcgtacgagatcttttatagaggtgtgttttaacccaaaggcaggctgtggagatcaattccagatattgccttcttgttgtgtctcagttgattttttttagcattgaacgtaacttacagtttgacataacaagcggtgaatgtaacactacagtttaactcaacaagccattggctgtagctcacaatcagcttggctgaactgccaaaaaaaatacaagcagtccattacagttcaacttaacaagagcagttctgttggtaaagccgatgcaaataagtaccaattgttagttaggaagggaaaagtgtcagcagtcaatggctgattaaaaaactaaatgtctttgaatttgttgggccgtgtgcctagtgcctggcctattaactggcttgttcgctgcggctttaatccgactgcgactgcggcttctacagtattttgtctctaggaattgcagctgcaatagtattttgcagctgcaacagtgctcccgcatgggcagccgaacaagctaaacatgtacatatatacttattataccagtgaggtgtgtgtagagtagtgtactctgtactcttccagaaaactttacatggtaccggaaccgggaccagcggcgacggtgtagtggtgaggaggcagaggagtgccttcggcctcgacggaagaaggccgccgatggagaagaagaccagctgggagcgtggcgcggcgtcgcggtcgtgcacgaggaggaggagcctgcacttgccggagggagaagaagcatgtagcacggtgcggtgctgcagtcgtgcgtgagtaggttcttattattgttttctatcctgctggatatgtagtcatgacagttaaattatgtacaactatgattacaaacgggaatacaagctaggagttgagaccacaatccttatgaaaagttacactgtaagtatgtcgtcctgcttgcatttcttccatgttccttttctcactgtaagcttagtttttgtgatcagcttccagatagaagagttattaaagtagacactaaacgattccaacctcctgaatctctttttactcctgtaacacttccatttatatttatacataatggtattgtcaacagtacacatagtttccatcagtttgttaatagtgcacctttagattgaatgagcttcttgcagagcaccaaggattaggcattgaaatgtgtggataaaaatattagaggaccacacatcattattatgcaacattgtctatgcacatgaacataattgtatcggtagtaagccgccagcatgtttgaaagttaaaaatgtgaattaagaacgaattatcgtatcctgctatacttatgcaacctaccaagaattagggcattgtagaaaccatataaagtattgagatcaatttgaatttgtctgcctcatgattttttgatacctgacctttatgaaggtagaggacaacattaaggatgatcatagactaccaacattcttcttcagattaaatgttaaattcagtaatttaatttgtttcagatggcggaggttctaataagtaaccttatgattggaaattgcagtgatcggttgtgtgtacgtgtctcccgtctgtgaaaaatttatgatcccgaggatgagtataagcttttccatgctcatatggtcctcatcgacgaggaggctggcagtgctcatgctcaaatataccctccactcactgacgttttcaaacctctgataaaggagggcaatgtctacaatgtctcctacattcagatcaagaaagctaataggatgtacaagcatgttgacaacgatatcatgatcggtttcacaaaatggatcctatgctgcctcaacaaacccgcggtttgaacacgtgacagatgacggcttagcttctgtggatggacatcttggtcgcttttgtagatggaatgtttggttggcttttgtagacagaattaggctgcacttgtgattgtgtaacgcttatgagcatggttgtgtggactgtgtcggccaaagtatacctcccaatgccttgtatatatcacatgcttagctgtctatccccaactaggtcgcctgataatagacttcgatcatgtcatgctattctataacaattttcgctgtaacttgcctaatcgtcatactatggtacacgcttaaatttggtgctgcaactttattgtggattataaaagagagaaaaatacagcataaagttataatgtcaaattgccacagctcactgttaagacttatttgatctagtgaaacctagttatctattagtaaaaattaattactgacaagtatacaggtgcatcatgaaaaccaaagattaagtgtgatcaggtagagctagagcaaatttgagggggtgtacttgtcttgcgggtgcatagctttttagtatgaaggtgcagatgaggtgaaaaattgatcataatcactgtttttcatttttgctgtgggtgcgctcgcgccacagttttatacatagtagctccgcccctgaatgagataaataattaaatcttagtttttctgaagagtatagtgcacattactatgccactaactaaaccctacattttgaac

SEQ ID NO: 2196 - DNA, 3075 bp, Zea Mays
cttcctttcccaactcggtcgacgcgttcgccacggctgcgcagtcctcctcctcgcctccgatcccctcccttcgacgatgcgagcacacccgctcatcctcttcgtacctgcaccgccacctcatcctcttcctcgccgcgccgacacccaccgcgctctctccctcccgcggcgacgcccttcgccaacgagaaccgcacgccgtcgtctcccacgggcactgtcgcacgctgggccacgctgcagtcggtggcgccgccacaccttcttcctccatgtgccgtcgccgccctattcttcttcgagatgcagccgctagcgctgccctcctcccagctccccttcatggccgcgtgcagggactatgtgccagtgttagtttttggtaccagtctacaggtctttcatttctacattcaaaggtgagaatcaatcatgttcggctccctttaaaaaagtaatgtttcccaatccttcatagtaaaactaaacacacattgtaaagacatttgtcgtacgagatcttttatagaggtgtgttttaacccaaaggcaggctgtggagatcaattccagatattgccttcttgttgtgtctcagttgattttttttagcattgaacgtaacttacagtttgacataacaagcggtgaatgtaacactacagtttaactcaacaagccattggctgtagctcacaatcagcttggctgaactgccaaaaaaaatacaagcagtccattacagttcaacttaacaagagcagttctgttggtaaagccgatgcaaataagtaccaattgttagttaggaagggaaaagtgtcagcagtcaatggctgattaaaaaactaaatgtctttgaatttgttgggccgtgtgcctagtgcctggcctattaactggcttgttcgctgcggctttaatccgactgcgactgcggcttctacagtattttgtctctaggaattgcagctgcaatagtattttgcagctgcaacagtgctcccgcatgggcagccgaacaagctaaacatgtacatatatacttattataccagtgaggtgtgtgtagagtagtgtactctgtactcttccagaaaactttacatggtaccggaaccgggaccagcggcgacggtgtagtggtgaggaggcagaggagtgccttcggcctcgacggaagaaggccgccgatggagaagaagaccagctgggagcgtggcgcggcgtcgcggtcgtgcacgaggaggaggagcctgcacttgccggagggagaagaagcatgtagcacggtgcggtgctgcagtcgtgcgtgagtaggttcttattattgttttctatcctgctggatatgtagtcatgacagttaaattatgtacaactatgattacaaacgggaatacaagctaggagttgagaccacaatccttatgaaaagttacactgtagaggacaacattaaggatgatcatagactaccaacattcttcttcagattaaatgttaaattcagtaatttaatttgtttcagtaatacaagattagaccatccctgcacatctgcctatctgcctggcaaaatattatcgtcgcttccaagattgagaatatggctgcgtttggaaagccttagattctagcattgggtaacatgtctattatcccacattatctaagtttaactagatactcatattttatgaaaaaaactgcactgaaaaatcacgaggtgctagatgttgcgctagcagcagcatcatagcacatcttgtctattccagttacaaatgtgcatattgtagaatatttttgtaacatactgctgctcccttccattcgttttggttttggcaattttctatgcacgtgtcgctcatccatggtacctcttttgtactaagatcattgtgacatttaacatgtttacatcatctcttactcgacacatactcactggactaatgttcttgtccctccttttgctttccttagcagatggcggaggttctaataagtaaccttatgattggaaattgcagtgatcggttgtgtgtacgtgtctcccgtctgtgaaaaatttatgatcccgaggatgagtataagcttttccatgctcatatggtcctcatcgacgaggaggctggcagtgctcatgctcaaatataccctccactcactgacgttttcaaacctctgataaaggagggcaatgtctacaatgtctcctacattcagatcaagaaagctaataggatgtacaagcatgttgacaacgatatcatgatcggtttcacaaaatggatcctatgctgcctcaacaaacccgcggtttgaacacgtgacagatgacggcttagcttctgtggatggacatcttggtcgcttttgtagatggaatgtttggttggcttttgtagacagaattaggctgcacttgtgattgtgtaacgcttatgagcatggttgtgtggactgtgtcggccaaagtatacctcccaatgccttgtatatatcacatgcttagctgtctatccccaactaggtcgcctgataatagacttcgatcatgtcatgctattctataacaattttcgctgtaacttgcctaatcgtcatactatggtacacgcttaaatttggtgctgcaactttattgtggattataaaagagagaaaaatacagcataaagttataatgtcaaattgccacagctcactgttaagacttatttgatctagtgaaacctagttatctattagtaaaaattaattactgacaagtatacaggtgcatcatgaaaaccaaagattaagtgtgatcaggtagagctagagcaaatttgagggggtgtacttgtcttgcgggtgcatagctttttagtatgaaggtgcagatgaggtgaaaaattgatcataatcactgtttttcatttttgctgtgggtgcgctcgcgccacagttttatacatagtagctccgcccctgaatgagataaataattaaatcttagtttttctgaagagtatagtgcacattactatgccactaactaaaccctacattttgaac

SEQ ID NO: 2197 - DNA, 2268 bp, Zea Mays
cttcctttcccaactcggtcgacgcgttcgccacggctgcgcagtcctcctcctcgcctccgatcccctcccttcgacgatgcgagcacacccgctcatcctcttcgtacctgcaccgccacctcatcctcttcctcgccgcgccgacacccaccgcgctctctccctcccgcggcgacgcccttcgccaacgagaaccgcacgccgtcgtctcccacgggcactgtcgcacgctgggccacgctgcagtcggtggcgccgccacaccttcttcctccatgtgccgtcgccgccctattcttcttcgagatgcagccgctagcgctgccctcctcccagctccccttcatggccgcgtgcagggactatgtgccagtgttagtttttggtaccagtctacaggtctttcatttctacattcaaagcggcgacggtgtagtggtgaggaggcagaggagtgccttcggcctcgacggaagaaggccgccgatggagaagaagaccagctgggagcgtggcgcggcgtcgcggtcgtgcacgaggaggaggagcctgcacttgccggagggagaagaagcatgtagcacggtgcggtgctgcagtcgtgcgtgagccttcttcacatattgagcaacaataatcatcttcgtggtcatggtggtgatgaccatgatgcgcctagaaatgcatgtgtgaaatattcaatatatgtcaccatttctattttcagtaatacaagattagaccatccctgcacatctgcctatctgcctggcaaaatattatcgtcgcttccaagattgagaatatggctgcgtttggaaagccttagattctagcattgggtaacatgtctattatcccacattatctaagtttaactagatactcatattttatgaaaaaaactgcactgaaaaatcacgaggtgctagatgttgcgctagcagcagcatcatagcacatcttgtctattccagttacaaatgtgcatattgtagaatatttttgtaacatactgctgctcccttccattcgttttggttttggcaattttctatgcacgtgtcgctcatccatggtacctcttttgtactaagatcattgtgacatttaacatgtttacatcatctcttactcgacacatactcactggactaatgttcttgtccctccttttgctttccttagcagatggcggaggttctaataagtaaccttatgattggaaattgcagtgatcggttgtgtgtacgtgtctcccgtctgtgaaaaatttatgatcccgaggatgagtataagcttttccatgctcatatggtcctcatcgacgaggaggctggcagtgctcatgctcaaatataccctccactcactgacgttttcaaacctctgataaaggagggcaatgtctacaatgtctcctacattcagatcaagaaagctaataggatgtacaagcatgttgacaacgatatcatgatcggtttcacaaaatggatcctatgctgcctcaacaaacccgcggtttgaacacgtgacagatgacggcttagcttctgtggatggacatcttggtcgcttttgtagatggaatgtttggttggcttttgtagacagaattaggctgcacttgtgattgtgtaacgcttatgagcatggttgtgtggactgtgtcggccaaagtatacctcccaatgccttgtatatatcacatgcttagctgtctatccccaactaggtcgcctgataatagacttcgatcatgtcatgctattctataacaattttcgctgtaacttgcctaatcgtcatactatggtacacgcttaaatttggtgctgcaactttattgtggattataaaagagagaaaaatacagcataaagttataatgtcaaattgccacagctcactgttaagacttatttgatctagtgaaacctagttatctattagtaaaaattaattactgacaagtatacaggtgcatcatgaaaaccaaagattaagtgtgatcaggtagagctagagcaaatttgagggggtgtacttgtcttgcgggtgcatagctttttagtatgaaggtgcagatgaggtgaaaaattgatcataatcactgtttttcatttttgctgtgggtgcgctcgcgccacagttttatacatagtagctccgcccctgaatgagataaataattaaatcttagtttttctgaagagtatagtgcacattactatgccactaactaaaccctacattttgaac

SEQ ID NO: 2198 - DNA, 3267 bp, Zea Mays
cttcctttcccaactcggtcgacgcgttcgccacggctgcgcagtcctcctcctcgcctccgatcccctcccttcgacgatgcgagcacacccgctcatcctcttcgtacctgcaccgccacctcatcctcttcctcgccgcgccgacacccaccgcgctctctccctcccgcggcgacgcccttcgccaacgagaaccgcacgccgtcgtctcccacgggcactgtcgcacgctgggccacgctgcagtcggtggcgccgccacaccttcttcctccatgtgccgtcgccgccctattcttcttcgagatgcagccgctagcgctgccctcctcccagctccccttcatggccgcgtgcagggactatgtgccagtgttagtttttggtaccagtctacaggtctttcatttctacattcaaaggtgagaatcaatcatgttcggctccctttaaaaaagtaatgtttcccaatccttcatagtaaaactaaacacacattgtaaagacatttgtcgtacgagatcttttatagaggtgtgttttaacccaaaggcaggctgtggagatcaattccagatattgccttcttgttgtgtctcagttgattttttttagcattgaacgtaacttacagtttgacataacaagcggtgaatgtaacactacagtttaactcaacaagccattggctgtagctcacaatcagcttggctgaactgccaaaaaaaatacaagcagtccattacagttcaacttaacaagagcagttctgttggtaaagccgatgcaaataagtaccaattgttagttaggaagggaaaagtgtcagcagtcaatggctgattaaaaaactaaatgtctttgaatttgttgggccgtgtgcctagtgcctggcctattaactggcttgttcgctgcggctttaatccgactgcgactgcggcttctacagtattttgtctctaggaattgcagctgcaatagtattttgcagctgcaacagtgctcccgcatgggcagccgaacaagctaaacatgtacatatatacttattataccagtgaggtgtgtgtagagtagtgtactctgtactcttccagaaaactttacatggtaccggaaccgggaccagcggcgacggtgtagtggtgaggaggcagaggagtgccttcggcctcgacggaagaaggccgccgatggagaagaagaccagctgggagcgtggcgcggcgtcgcggtcgtgcacgaggaggaggagcctgcacttgccggagggagaagaagcatgtagcacggtgcggtgctgcagtcgtgcgtgagtaggttcttattattgttttctatcctgctggatatgtagtcatgacagttaaattatgtacaactatgattacaaacgggaatacaagctaggagttgagaccacaatccttatgaaaagttacactgtaagtatgtcgtcctgcttgcatttcttccatgttccttttctcactgtaagcttagtttttgtgatcagcttccagatagaagagttattaaagtagacactaaacgattccaacctcctgaatctctttttactcctgtaacacttccatttatatttatacataatggtattgtcaacagtacacatagtttccatcagtttgttaatagtgcacctttagattgaatgagcttcttgcagagcaccaaggattaggcattgaaatgtgtggataaaaatattagaggaccacacatcattattatgcaacattgtctatgcacatgaacataattgtatcggtagtaagccgccagcatgtttgaaagttaaaaatgtgaattaagaacgaattatcgtatcctgctatacttatgcaacctaccaagaattagggcattgtagaaaccatataaagtattgagatcaatttgaatttgtctgcctcatgattttttgatacctgacctttatgaaggtagaggacaacattaaggatgatcatagactaccaacattcttcttcagattaaatgttaaattcagtaatttaatttgtttcagtaatacaagattagaccatccctgcacatctgcctatctgcctggcaaaatattatcgtcgcttccaagattgagaatatggctgcgtttggaaagccttagattctagcattggtgatcggttgtgtgtacgtgtctcccgtctgtgaaaaatttatgatcccgaggatgagtataagcttttccatgctcatatggtcctcatcgacgaggaggtacgcgacctgcttactacatgaagcatgctgcataccagatcaaagaaattttaatatggggctggcagtgctcatgctcaaatataccctccactcactgacgttttcaaacctctgataaaggagggcaatgtctacaatgtctcctacattcagatcaagaaagctaataggatgtacaagcatgttgacaacgatatcatgatcggtttcacaaaatggatcctatgctgcctcaacaaacccgcggtttgaacacgtgacagatgacggcttagcttctgtggatggacatcttggtcgcttttgtagatggaatgtttggttggcttttgtagacagaattaggctgcacttgtgattgtgtaacgcttatgagcatggttgtgtggactgtgtcggccaaagtatacctcccaatgccttgtatatatcacatgcttagctgtctatccccaactaggtcgcctgataatagacttcgatcatgtcatgctattctataacaattttcgctgtaacttgcctaatcgtcatactatggtacacgcttaaatttggtgctgcaactttattgtggattataaaagagagaaaaatacagcataaagttataatgtcaaattgccacagctcactgttaagacttatttgatctagtgaaacctagttatctattagtaaaaattaattactgacaagtatacaggtgcatcatgaaaaccaaagattaagtgtgatcaggtagagctagagcaaatttgagggggtgtacttgtcttgcgggtgcatagctttttagtatgaaggtgcagatgaggtgaaaaattgatcataatcactgtttttcatttttgctgtgggtgcgctcgcgccacagttttatacatagtagctccgcccctgaatgagataaataattaaatcttagtttttctgaagagtatagtgcacattactatgccactaactaaaccctacattttgaac

SEQ ID NO: 2199 - DNA, 3007 bp, Zea Mays
cttcctttcccaactcggtcgacgcgttcgccacggctgcgcagtcctcctcctcgcctccgatcccctcccttcgacgatgcgagcacacccgctcatcctcttcgtacctgcaccgccacctcatcctcttcctcgccgcgccgacacccaccgcgctctctccctcccgcggcgacgcccttcgccaacgagaaccgcacgccgtcgtctcccacgggcactgtcgcacgctgggccacgctgcagtcggtggcgccgccacaccttcttcctccatgtgccgtcgccgccctattcttcttcgagatgcagccgctagcgctgccctcctcccagctccccttcatggccgcgtgcaggtggaccgctccccaccccgtcgccttcctcctcgtactgcccccaagaacgccctaggttactttttcttagatttgccttttggtttcaagtatgtttctctgatgccctagctgtctggtggattaaatttaattattgagctgcaactttcaccaattggtttggagaaagacaatagaggcttgggttcttttagttaagaaaaattgcgtccgtgttcagttataacataagattgtttattgttctctgtaatctcacatttctttttctatatatgaatagggactatgtgccagtgttagtttttggtaccagtctacaggtctttcatttctacattcaaaggtgagaatcaatcatgttcggctccctttaaaaaagtaatgtttcccaatccttcatagtaaaactaaacacacattgtaaagacatttgtcgtacgagatcttttatagaggtgtgttttaacccaaaggcaggctgtggagatcaattccagatattgccttcttgttgtgtctcagttgattttttttagcattgaacgtaacttacagtttgacataacaagcggtgaatgtaacactacagtttaactcaacaagccattggctgtagctcacaatcagcttggctgaactgccaaaaaaaatacaagcagtccattacagttcaacttaacaagagcagttctgttggtaaagccgatgcaaataagtaccaattgttagttaggaagggaaaagtgtcagcagtcaatggctgattaaaaaactaaatgtctttgaatttgttgggccgtgtgcctagtgcctggcctattaactggcttgttcgctgcggctttaatccgactgcgactgcggcttctacagtattttgtctctaggaattgcagctgcaatagtattttgcagctgcaacagtgctcccgcatgggcagccgaacaagctaaacatgtacatatatacttattataccagtgaggtgtgtgtagagtagtgtactctgtactcttccagaaaactttacatggtaccggaaccgggaccagcggcgacggtgtagtggtgaggaggcagaggagtgccttcggcctcgacggaagaaggccgccgatggagaagaagaccagctgggagcgtggcgcggcgtcgcggtcgtgcacgaggaggaggagcctgcacttgccggagggagaagaagcatgtagcacggtgcggtgctgcagtcgtgcgtgagtaggttcttattattgttttctatcctgctggatatgtagtcatgacagttaaattatgtacaactatgattacaaacgggaatacaagctaggagttgagaccacaatccttatgaaaagttacactgtgagccttcttcacatattgagcaacaataatcatcttcgtggtcatggtggtgatgaccatgatgcgcctagaaatgcatgtgtgaaatattcaatatatgtcaccatttctattttcagtaatacaagattagaccatccctgcacatctgcctatctgcctggcaaaatattatcgtcgcttccaagattgagaatatggctgcgtttggaaagccttagattctagcattggtgatcggttgtgtgtacgtgtctcccgtctgtgaaaaatttatgatcccgaggatgagtataagcttttccatgctcatatggtcctcatcgacgaggaggctggcagtgctcatgctcaaatataccctccactcactgacgttttcaaacctctgataaaggagggcaatgtctacaatgtctcctacattcagatcaagaaagctaataggatgtacaagcatgttgacaacgatatcatgatcggtttcacaaaatggatcctatgctgcctcaacaaacccgcggtttgaacacgtgacagatgacggcttagcttctgtggatggacatcttggtcgcttttgtagatggaatgtttggttggcttttgtagacagaattaggctgcacttgtgattgtgtaacgcttatgagcatggttgtgtggactgtgtcggccaaagtatacctcccaatgccttgtatatatcacatgcttagctgtctatccccaactaggtcgcctgataatagacttcgatcatgtcatgctattctataacaattttcgctgtaacttgcctaatcgtcatactatggtacacgcttaaatttggtgctgcaactttattgtggattataaaagagagaaaaatacagcataaagttataatgtcaaattgccacagctcactgttaagacttatttgatctagtgaaacctagttatctattagtaaaaattaattactgacaagtatacaggtgcatcatgaaaaccaaagattaagtgtgatcaggtagagctagagcaaatttgagggggtgtacttgtcttgcgggtgcatagctttttagtatgaaggtgcagatgaggtgaaaaattgatcataatcactgtttttcatttttgctgtgggtgcgctcgcgccacagttttatacatagtagctccgcccctgaatgagataaataattaaatcttagtttttctgaagagtatagtgcacattactatgccactaactaaaccctacattttgaac

SEQ ID NO: 2200 - DNA, 2342 bp, Zea Mays
cttcctttcccaactcggtcgacgcgttcgccacggctgcgcagtcctcctcctcgcctccgatcccctcccttcgacgatgcgagcacacccgctcatcctcttcgtacctgcaccgccacctcatcctcttcctcgccgcgccgacacccaccgcgctctctccctcccgcggcgacgcccttcgccaacgagaaccgcacgccgtcgtctcccacgggcactgtcgcacgctgggccacgctgcagtcggtggcgccgccacaccttcttcctccatgtgccgtcgccgccctattcttcttcgagatgcagccgctagcgctgccctcctcccagctccccttcatggccgcgtgcagggactatgtgccagtgttagtttttggtaccagtctacaggtctttcatttctacattcaaagagtagtgtactctgtactcttccagaaaactttacatggtaccggaaccgggaccagcggcgacggtgtagtggtgaggaggcagaggagtgccttcggcctcgacggaagaaggccgccgatggagaagaagaccagctgggagcgtggcgcggcgtcgcggtcgtgcacgaggaggaggagcctgcacttgccggagggagaagaagcatgtagcacggtgcggtgctgcagtcgtgcgtgagagttgagaccacaatccttatgaaaagttacactgtaagtatgtcgtcctgcttgcatttcttccatgttccttttctcactgtaagcttagtttttgtgatcagcttccagatagaagagttattaaagtagacactaaacgattccaacctcctgaatctctttttactcctgtaacacttccatttatatttatacataatggtattgtcaacagtacacatagtttccatcagtttgttaatagtgcacctttagattgaatgagcttcttgcagagcaccaaggattaggcattgaaatgtgtggataaaaatattagaggaccacacatcattattatgcaacattgtctatgcacatgaacataattgtatcggtagtaagccgccagcatgtttgaaagttaaaaatgtgaattaagaacgaattatcgtatcctgctatacttatgcaacctaccaagaattagggcattgtagaaaccatataaagtattgagatcaatttgaatttgtctgcctcatgattttttgatacctgacctttatgaaggtagaggacaacattaaggatgatcatagactaccaacattcttcttcagattaaatgttaaattcagtaatttaatttgtttcagtgatcggttgtgtgtacgtgtctcccgtctgtgaaaaatttatgatcccgaggatgagtataagcttttccatgctcatatggtcctcatcgacgaggaggctggcagtgctcatgctcaaatataccctccactcactgacgttttcaaacctctgataaaggagggcaatgtctacaatgtctcctacattcagatcaagaaagctaataggatgtacaagcatgttgacaacgatatcatgatcggtttcacaaaatggatcctatgctgcctcaacaaacccgcggtttgaacacgtgacagatgacggcttagcttctgtggatggacatcttggtcgcttttgtagatggaatgtttggttggcttttgtagacagaattaggctgcacttgtgattgtgtaacgcttatgagcatggttgtgtggactgtgtcggccaaagtatacctcccaatgccttgtatatatcacatgcttagctgtctatccccaactaggtcgcctgataatagacttcgatcatgtcatgctattctataacaattttcgctgtaacttgcctaatcgtcatactatggtacacgcttaaatttggtgctgcaactttattgtggattataaaagagagaaaaatacagcataaagttataatgtcaaattgccacagctcactgttaagacttatttgatctagtgaaacctagttatctattagtaaaaattaattactgacaagtatacaggtgcatcatgaaaaccaaagattaagtgtgatcaggtagagctagagcaaatttgagggggtgtacttgtcttgcgggtgcatagctttttagtatgaaggtgcagatgaggtgaaaaattgatcataatcactgtttttcatttttgctgtgggtgcgctcgcgccacagttttatacatagtagctccgcccctgaatgagataaataattaaatcttagtttttctgaagagtatagtgcacattactatgccactaactaaaccctacattttgaac

SEQ ID NO: 2201 - DNA, 2616 bp, Zea Mays
cttcctttcccaactcggtcgacgcgttcgccacggctgcgcagtcctcctcctcgcctccgatcccctcccttcgacgatgcgagcacacccgctcatcctcttcgtacctgcaccgccacctcatcctcttcctcgccgcgccgacacccaccgcgctctctccctcccgcggcgacgcccttcgccaacgagaaccgcacgccgtcgtctcccacgggcactgtcgcacgctgggccacgctgcagtcggtggcgccgccacaccttcttcctccatgtgccgtcgccgccctattcttcttcgagatgcagccgctagcgctgccctcctcccagctccccttcatggccgcgtgcagggactatgtgccagtgttagtttttggtaccagtctacaggtctttcatttctacattcaaagcggcgacggtgtagtggtgaggaggcagaggagtgccttcggcctcgacggaagaaggccgccgatggagaagaagaccagctgggagcgtggcgcggcgtcgcggtcgtgcacgaggaggaggagcctgcacttgccggagggagaagaagcatgtagcacggtgcggtgctgcagtcgtgcgtgagtaggttcttattattgttttctatcctgctggatatgtagtcatgacagttaaattatgtacaactatgattacaaacgggaatacaagctaggagttgagaccacaatccttatgaaaagttacactgtaagtatgtcgtcctgcttgcatttcttccatgttccttttctcactgtaagcttagtttttgtgatcagcttccagatagaagagttattaaagtagacactaaacgattccaacctcctgaatctctttttactcctgtaacacttccatttatatttatacataatggtattgtcaacagtacacatagtttccatcagtttgttaatagtgcacctttagattgaatgagcttcttgcagagcaccaaggattaggcattgaaatgtgtggataaaaatattagaggaccacacatcattattatgcaacattgtctatgcacatgaacataattgtatcggtagtaagccgccagcatgtttgaaagttaaaaatgtgaattaagaacgaattatcgtatcctgctatacttatgcaacctaccaagaattagggcattgtagaaaccatataaagtattgagatcaatttgaatttgtctgcctcatgattttttgatacctgacctttatgaaggtagaggacaacattaaggatgatcatagactaccaacattcttcttcagattaaatgttaaattcagtaatttaatttgtttcaggtgagccttcttcacatattgagcaacaataatcatcttcgtggtcatggtggtgatgaccatgatgcgcctagaaatgcatgtgtgaaatattcaatatatgtcaccatttctattttcagtaatacaagattagaccatccctgcacatctgcctatctgcctggcaaaatattatcgtcgcttccaagattgagaatatggctgcgtttggaaagccttagattctagcattggtgatcggttgtgtgtacgtgtctcccgtctgtgaaaaatttatgatcccgaggatgagtataagcttttccatgctcatatggtcctcatcgacgaggaggctggcagtgctcatgctcaaatataccctccactcactgacgttttcaaacctctgataaaggagggcaatgtctacaatgtctcctacattcagatcaagaaagctaataggatgtacaagcatgttgacaacgatatcatgatcggtttcacaaaatggatcctatgctgcctcaacaaacccgcggtttgaacacgtgacagatgacggcttagcttctgtggatggacatcttggtcgcttttgtagatggaatgtttggttggcttttgtagacagaattaggctgcacttgtgattgtgtaacgcttatgagcatggttgtgtggactgtgtcggccaaagtatacctcccaatgccttgtatatatcacatgcttagctgtctatccccaactaggtcgcctgataatagacttcgatcatgtcatgctattctataacaattttcgctgtaacttgcctaatcgtcatactatggtacacgcttaaatttggtgctgcaactttattgtggattataaaagagagaaaaatacagcataaagttataatgtcaaattgccacagctcactgttaagacttatttgatctagtgaaacctagttatctattagtaaaaattaattactgacaagtatacaggtgcatcatgaaaaccaaagattaagtgtgatcaggtagagctagagcaaatttgagggggtgtacttgtcttgcgggtgcatagctttttagtatgaaggtgcagatgaggtgaaaaattgatcataatcactgtttttcatttttgctgtgggtgcgctcgcgccacagttttatacatagtagctccgcccctgaatgagataaataattaaatcttagtttttctgaagagtatagtgcacattactatgccactaactaaaccctacattttgaac

SEQ ID NO: 2202 - DNA, 2674 bp, Zea Mays
cttcctttcccaactcggtcgacgcgttcgccacggctgcgcagtcctcctcctcgcctccgatcccctcccttcgacgatgcgagcacacccgctcatcctcttcgtacctgcaccgccacctcatcctcttcctcgccgcgccgacacccaccgcgctctctccctcccgcggcgacgcccttcgccaacgagaaccgcacgccgtcgtctcccacgggcactgtcgcacgctgggccacgctgcagtcggtggcgccgccacaccttcttcctccatgtgccgtcgccgccctattcttcttcgagatgcagccgctagcgctgccctcctcccagctccccttcatggccgcgtgcaggtggaccgctccccaccccgtcgccttcctcctcgtactgcccccaagaacgccctagggactatgtgccagtgttagtttttggtaccagtctacaggtctttcatttctacattcaaagcggcgacggtgtagtggtgaggaggcagaggagtgccttcggcctcgacggaagaaggccgccgatggagaagaagaccagctgggagcgtggcgcggcgtcgcggtcgtgcacgaggaggaggagcctgcacttgccggagggagaagaagcatgtagcacggtgcggtgctgcagtcgtgcgtgagtaggttcttattattgttttctatcctgctggatatgtagtcatgacagttaaattatgtacaactatgattacaaacgggaatacaagctaggagttgagaccacaatccttatgaaaagttacactgtaagtatgtcgtcctgcttgcatttcttccatgttccttttctcactgtaagcttagtttttgtgatcagcttccagatagaagagttattaaagtagacactaaacgattccaacctcctgaatctctttttactcctgtaacacttccatttatatttatacataatggtattgtcaacagtacacatagtttccatcagtttgttaatagtgcacctttagattgaatgagcttcttgcagagcaccaaggattaggcattgaaatgtgtggataaaaatattagaggaccacacatcattattatgcaacattgtctatgcacatgaacataattgtatcggtagtaagccgccagcatgtttgaaagttaaaaatgtgaattaagaacgaattatcgtatcctgctatacttatgcaacctaccaagaattagggcattgtagaaaccatataaagtattgagatcaatttgaatttgtctgcctcatgattttttgatacctgacctttatgaaggtagaggacaacattaaggatgatcatagactaccaacattcttcttcagattaaatgttaaattcagtaatttaatttgtttcaggtgagccttcttcacatattgagcaacaataatcatcttcgtggtcatggtggtgatgaccatgatgcgcctagaaatgcatgtgtgaaatattcaatatatgtcaccatttctattttcagtaatacaagattagaccatccctgcacatctgcctatctgcctggcaaaatattatcgtcgcttccaagattgagaatatggctgcgtttggaaagccttagattctagcattggtgatcggttgtgtgtacgtgtctcccgtctgtgaaaaatttatgatcccgaggatgagtataagcttttccatgctcatatggtcctcatcgacgaggaggctggcagtgctcatgctcaaatataccctccactcactgacgttttcaaacctctgataaaggagggcaatgtctacaatgtctcctacattcagatcaagaaagctaataggatgtacaagcatgttgacaacgatatcatgatcggtttcacaaaatggatcctatgctgcctcaacaaacccgcggtttgaacacgtgacagatgacggcttagcttctgtggatggacatcttggtcgcttttgtagatggaatgtttggttggcttttgtagacagaattaggctgcacttgtgattgtgtaacgcttatgagcatggttgtgtggactgtgtcggccaaagtatacctcccaatgccttgtatatatcacatgcttagctgtctatccccaactaggtcgcctgataatagacttcgatcatgtcatgctattctataacaattttcgctgtaacttgcctaatcgtcatactatggtacacgcttaaatttggtgctgcaactttattgtggattataaaagagagaaaaatacagcataaagttataatgtcaaattgccacagctcactgttaagacttatttgatctagtgaaacctagttatctattagtaaaaattaattactgacaagtatacaggtgcatcatgaaaaccaaagattaagtgtgatcaggtagagctagagcaaatttgagggggtgtacttgtcttgcgggtgcatagctttttagtatgaaggtgcagatgaggtgaaaaattgatcataatcactgtttttcatttttgctgtgggtgcgctcgcgccacagttttatacatagtagctccgcccctgaatgagataaataattaaatcttagtttttctgaagagtatagtgcacattactatgccactaactaaaccctacattttgaac

SEQ ID NO: 2203 - DNA, 3035 bp, Zea Mays
cttcctttcccaactcggtcgacgcgttcgccacggctgcgcagtcctcctcctcgcctccgatcccctcccttcgacgatgcgagcacacccgctcatcctcttcgtacctgcaccgccacctcatcctcttcctcgccgcgccgacacccaccgcgctctctccctcccgcggcgacgcccttcgccaacgagaaccgcacgccgtcgtctcccacgggcactgtcgcacgctgggccacgctgcagtcggtggcgccgccacaccttcttcctccatgtgccgtcgccgccctattcttcttcgagatgcagccgctagcgctgccctcctcccagctccccttcatggccgcgtgcagggactatgtgccagtgttagtttttggtaccagtctacaggtctttcatttctacattcaaagagtagtgtactctgtactcttccagaaaactttacatggtaccggaaccgggaccagcggcgacggtgtagtggtgaggaggcagaggagtgccttcggcctcgacggaagaaggccgccgatggagaagaagaccagctgggagcgtggcgcggcgtcgcggtcgtgcacgaggaggaggagcctgcacttgccggagggagaagaagcatgtagcacggtgcggtgctgcagtcgtgcgtgagagttgagaccacaatccttatgaaaagttacactgtaagtatgtcgtcctgcttgcatttcttccatgttccttttctcactgtaagcttagtttttgtgatcagcttccagatagaagagttattaaagtagacactaaacgattccaacctcctgaatctctttttactcctgtaacacttccatttatatttatacataatggtattgtcaacagtacacatagtttccatcagtttgttaatagtgcacctttagattgaatgagcttcttgcagagcaccaaggattaggcattgaaatgtgtggataaaaatattagaggaccacacatcattattatgcaacattgtctatgcacatgaacataattgtatcggtagtaagccgccagcatgtttgaaagttaaaaatgtgaattaagaacgaattatcgtatcctgctatacttatgcaacctaccaagaattagggcattgtagaaaccatataaagtattgagatcaatttgaatttgtctgcctcatgattttttgatacctgacctttatgaaggtagaggacaacattaaggatgatcatagactaccaacattcttcttcagattaaatgttaaattcagtaatttaatttgtttcaggtgagccttcttcacatattgagcaacaataatcatcttcgtggtcatggtggtgatgaccatgatgcgcctagaaatgcatgtgtgaaatattcaatatatgtcaccatttctattttcagtaatacaagattagaccatccctgcacatctgcctatctgcctggcaaaatattatcgtcgcttccaagattgagaatatggctgcgtttggaaagccttagattctagcattgggtaacatgtctattatcccacattatctaagtttaactagatactcatattttatgaaaaaaactgcactgaaaaatcacgaggtgctagatgttgcgctagcagcagcatcatagcacatcttgtctattccagttacaaatgtgcatattgtagaatatttttgtaacatactgctgctcccttccattcgttttggttttggcaattttctatgcacgtgtcgctcatccatggtacctcttttgtactaagatcattgtgacatttaacatgtttacatcatctcttactcgacacatactcactggactaatgttcttgtccctccttttgctttccttagcagatggcggaggttctaataagtaaccttatgattggaaattgcagtgatcggttgtgtgtacgtgtctcccgtctgtgaaaaatttatgatcccgaggatgagtataagcttttccatgctcatatggtcctcatcgacgaggaggtacgcgacctgcttactacatgaagcatgctgcataccagatcaaagaaattttaatatggggctggcagtgctcatgctcaaatataccctccactcactgacgttttcaaacctctgataaaggagggcaatgtctacaatgtctcctacattcagatcaagaaagctaataggatgtacaagcatgttgacaacgatatcatgatcggtttcacaaaatggatcctatgctgcctcaacaaacccgcggtttgaacacgtgacagatgacggcttagcttctgtggatggacatcttggtcgcttttgtagatggaatgtttggttggcttttgtagacagaattaggctgcacttgtgattgtgtaacgcttatgagcatggttgtgtggactgtgtcggccaaagtatacctcccaatgccttgtatatatcacatgcttagctgtctatccccaactaggtcgcctgataatagacttcgatcatgtcatgctattctataacaattttcgctgtaacttgcctaatcgtcatactatggtacacgcttaaatttggtgctgcaactttattgtggattataaaagagagaaaaatacagcataaagttataatgtcaaattgccacagctcactgttaagacttatttgatctagtgaaacctagttatctattagtaaaaattaattactgacaagtatacaggtgcatcatgaaaaccaaagattaagtgtgatcaggtagagctagagcaaatttgagggggtgtacttgtcttgcgggtgcatagctttttagtatgaaggtgcagatgaggtgaaaaattgatcataatcactgtttttcatttttgctgtgggtgcgctcgcgccacagttttatacatagtagctccgcccctgaatgagataaataattaaatcttagtttttctgaagagtatagtgcacattactatgccactaactaaaccctacattttgaac

SEQ ID NO: 2204 - DNA, 3089 bp, Zea Mays
cttcctttcccaactcggtcgacgcgttcgccacggctgcgcagtcctcctcctcgcctccgatcccctcccttcgacgatgcgagcacacccgctcatcctcttcgtacctgcaccgccacctcatcctcttcctcgccgcgccgacacccaccgcgctctctccctcccgcggcgacgcccttcgccaacgagaaccgcacgccgtcgtctcccacgggcactgtcgcacgctgggccacgctgcagtcggtggcgccgccacaccttcttcctccatgtgccgtcgccgccctattcttcttcgagatgcagccgctagcgctgccctcctcccagctccccttcatggccgcgtgcagggactatgtgccagtgttagtttttggtaccagtctacaggtctttcatttctacattcaaaggtgagaatcaatcatgttcggctccctttaaaaaagtaatgtttcccaatccttcatagtaaaactaaacacacattgtaaagacatttgtcgtacgagatcttttatagaggtgtgttttaacccaaaggcaggctgtggagatcaattccagatattgccttcttgttgtgtctcagttgattttttttagcattgaacgtaacttacagtttgacataacaagcggtgaatgtaacactacagtttaactcaacaagccattggctgtagctcacaatcagcttggctgaactgccaaaaaaaatacaagcagtccattacagttcaacttaacaagagcagttctgttggtaaagccgatgcaaataagtaccaattgttagttaggaagggaaaagtgtcagcagtcaatggctgattaaaaaactaaatgtctttgaatttgttgggccgtgtgcctagtgcctggcctattaactggcttgttcgctgcggctttaatccgactgcgactgcggcttctacagtattttgtctctaggaattgcagctgcaatagtattttgcagctgcaacagtgctcccgcatgggcagccgaacaagctaaacatgtacatatatacttattataccagtgaggtgtgtgtagagtagtgtactctgtactcttccagaaaactttacatggtaccggaaccgggaccagcggcgacggtgtagtggtgaggaggcagaggagtgccttcggcctcgacggaagaaggccgccgatggagaagaagaccagctgggagcgtggcgcggcgtcgcggtcgtgcacgaggaggaggagcctgcacttgccggagggagaagaagcatgtagcacggtgcggtgctgcagtcgtgcgtgagtaggttcttattattgttttctatcctgctggatatgtagtcatgacagttaaattatgtacaactatgattacaaacgggaatacaagctaggagttgagaccacaatccttatgaaaagttacactgtaagtatgtcgtcctgcttgcatttcttccatgttccttttctcactgtaagcttagtttttgtgatcagcttccagatagaagagttattaaagtagacactaaacgattccaacctcctgaatctctttttactcctgtaacacttccatttatatttatacataatggtattgtcaacagtacacatagtttccatcagtttgttaatagtgcacctttagattgaatgagcttcttgcagagcaccaaggattaggcattgaaatgtgtggataaaaatattagaggaccacacatcattattatgcaacattgtctatgcacatgaacataattgtatcggtagtaagccgccagcatgtttgaaagttaaaaatgtgaattaagaacgaattatcgtatcctgctatacttatgcaacctaccaagaattagggcattgtagaaaccatataaagtattgagatcaatttgaatttgtctgcctcatgattttttgatacctgacctttatgaaggtagaggacaacattaaggatgatcatagactaccaacattcttcttcagattaaatgttaaattcagtaatttaatttgtttcagtgatcggttgtgtgtacgtgtctcccgtctgtgaaaaatttatgatcccgaggatgagtataagcttttccatgctcatatggtcctcatcgacgaggaggctggcagtgctcatgctcaaatataccctccactcactgacgttttcaaacctctgataaaggagggcaatgtctacaatgtctcctacattcagatcaagaaagctaataggatgtacaagcatgttgacaacgatatcatgatcggtttcacaaaatggatcctatgctgcctcaacaaacccgcggtttgaacacgtgacagatgacggcttagcttctgtggatggacatcttggtcgcttttgtagatggaatgtttggttggcttttgtagacagaattaggctgcacttgtgattgtgtaacgcttatgagcatggttgtgtggactgtgtcggccaaagtatacctcccaatgccttgtatatatcacatgcttagctgtctatccccaactaggtcgcctgataatagacttcgatcatgtcatgctattctataacaattttcgctgtaacttgcctaatcgtcatactatggtacacgcttaaatttggtgctgcaactttattgtggattataaaagagagaaaaatacagcataaagttataatgtcaaattgccacagctcactgttaagacttatttgatctagtgaaacctagttatctattagtaaaaattaattactgacaagtatacaggtgcatcatgaaaaccaaagattaagtgtgatcaggtagagctagagcaaatttgagggggtgtacttgtcttgcgggtgcatagctttttagtatgaaggtgcagatgaggtgaaaaattgatcataatcactgtttttcatttttgctgtgggtgcgctcgcgccacagttttatacatagtagctccgcccctgaatgagataaataattaaatcttagtttttctgaagagtatagtgcacattactatgccactaactaaaccctacattttgaac

SEQ ID NO: 2205 - DNA, 3540 bp, Zea Mays
cttcctttcccaactcggtcgacgcgttcgccacggctgcgcagtcctcctcctcgcctccgatcccctcccttcgacgatgcgagcacacccgctcatcctcttcgtacctgcaccgccacctcatcctcttcctcgccgcgccgacacccaccgcgctctctccctcccgcggcgacgcccttcgccaacgagaaccgcacgccgtcgtctcccacgggcactgtcgcacgctgggccacgctgcagtcggtggcgccgccacaccttcttcctccatgtgccgtcgccgccctattcttcttcgagatgcagccgctagcgctgccctcctcccagctccccttcatggccgcgtgcaggtggaccgctccccaccccgtcgccttcctcctcgtactgcccccaagaacgccctaggttactttttcttagatttgccttttggtttcaagtatgtttctctgatgccctagctgtctggtggattaaatttaattattgagctgcaactttcaccaattggtttggagaaagacaatagaggcttgggttcttttagttaagaaaaattgcgtccgtgttcagttataacataagattgtttattgttctctgtaatctcacatttctttttctatatatgaatagggactatgtgccagtgttagtttttggtaccagtctacaggtctttcatttctacattcaaaggtgagaatcaatcatgttcggctccctttaaaaaagtaatgtttcccaatccttcatagtaaaactaaacacacattgtaaagacatttgtcgtacgagatcttttatagaggtgtgttttaacccaaaggcaggctgtggagatcaattccagatattgccttcttgttgtgtctcagttgattttttttagcattgaacgtaacttacagtttgacataacaagcggtgaatgtaacactacagtttaactcaacaagccattggctgtagctcacaatcagcttggctgaactgccaaaaaaaatacaagcagtccattacagttcaacttaacaagagcagttctgttggtaaagccgatgcaaataagtaccaattgttagttaggaagggaaaagtgtcagcagtcaatggctgattaaaaaactaaatgtctttgaatttgttgggccgtgtgcctagtgcctggcctattaactggcttgttcgctgcggctttaatccgactgcgactgcggcttctacagtattttgtctctaggaattgcagctgcaatagtattttgcagctgcaacagtgctcccgcatgggcagccgaacaagctaaacatgtacatatatacttattataccagtgaggtgtgtgtagagtagtgtactctgtactcttccagaaaactttacatggtaccggaaccgggaccagcggcgacggtgtagtggtgaggaggcagaggagtgccttcggcctcgacggaagaaggccgccgatggagaagaagaccagctgggagcgtggcgcggcgtcgcggtcgtgcacgaggaggaggagcctgcacttgccggagggagaagaagcatgtagcacggtgcggtgctgcagtcgtgcgtgagtaggttcttattattgttttctatcctgctggatatgtagtcatgacagttaaattatgtacaactatgattacaaacgggaatacaagctaggagttgagaccacaatccttatgaaaagttacactgtaagtatgtcgtcctgcttgcatttcttccatgttccttttctcactgtaagcttagtttttgtgatcagcttccagatagaagagttattaaagtagacactaaacgattccaacctcctgaatctctttttactcctgtaacacttccatttatatttatacataatggtattgtcaacagtacacatagtttccatcagtttgttaatagtgcacctttagattgaatgagcttcttgcagagcaccaaggattaggcattgaaatgtgtggataaaaatattagaggaccacacatcattattatgcaacattgtctatgcacatgaacataattgtatcggtagtaagccgccagcatgtttgaaagttaaaaatgtgaattaagaacgaattatcgtatcctgctatacttatgcaacctaccaagaattagggcattgtagaaaccatataaagtattgagatcaatttgaatttgtctgcctcatgattttttgatacctgacctttatgaaggtagaggacaacattaaggatgatcatagactaccaacattcttcttcagattaaatgttaaattcagtaatttaatttgtttcagtaatacaagattagaccatccctgcacatctgcctatctgcctggcaaaatattatcgtcgcttccaagattgagaatatggctgcgtttggaaagccttagattctagcattggcagatggcggaggttctaataagtaaccttatgattggaaattgcagtgatcggttgtgtgtacgtgtctcccgtctgtgaaaaatttatgatcccgaggatgagtataagcttttccatgctcatatggtcctcatcgacgaggaggctggcagtgctcatgctcaaatataccctccactcactgacgttttcaaacctctgataaaggagggcaatgtctacaatgtctcctacattcagatcaagaaagctaataggatgtacaagcatgttgacaacgatatcatgatcggtttcacaaaatggatcctatgctgcctcaacaaacccgcggtttgaacacgtgacagatgacggcttagcttctgtggatggacatcttggtcgcttttgtagatggaatgtttggttggcttttgtagacagaattaggctgcacttgtgattgtgtaacgcttatgagcatggttgtgtggactgtgtcggccaaagtatacctcccaatgccttgtatatatcacatgcttagctgtctatccccaactaggtcgcctgataatagacttcgatcatgtcatgctattctataacaattttcgctgtaacttgcctaatcgtcatactatggtacacgcttaaatttggtgctgcaactttattgtggattataaaagagagaaaaatacagcataaagttataatgtcaaattgccacagctcactgttaagacttatttgatctagtgaaacctagttatctattagtaaaaattaattactgacaagtatacaggtgcatcatgaaaaccaaagattaagtgtgatcaggtagagctagagcaaatttgagggggtgtacttgtcttgcgggtgcatagctttttagtatgaaggtgcagatgaggtgaaaaattgatcataatcactgtttttcatttttgctgtgggtgcgctcgcgccacagttttatacatagtagctccgcccctgaatgagataaataattaaatcttagtttttctgaagagtatagtgcacattactatgccactaactaaaccctacattttgaac

SEQ ID NO: 2206 - DNA, 2405 bp, Zea Mays
cttcctttcccaactcggtcgacgcgttcgccacggctgcgcagtcctcctcctcgcctccgatcccctcccttcgacgatgcgagcacacccgctcatcctcttcgtacctgcaccgccacctcatcctcttcctcgccgcgccgacacccaccgcgctctctccctcccgcggcgacgcccttcgccaacgagaaccgcacgccgtcgtctcccacgggcactgtcgcacgctgggccacgctgcagtcggtggcgccgccacaccttcttcctccatgtgccgtcgccgccctattcttcttcgagatgcagccgctagcgctgccctcctcccagctccccttcatggccgcgtgcagggactatgtgccagtgttagtttttggtaccagtctacaggtctttcatttctacattcaaagagtagtgtactctgtactcttccagaaaactttacatggtaccggaaccgggaccagcggcgacggtgtagtggtgaggaggcagaggagtgccttcggcctcgacggaagaaggccgccgatggagaagaagaccagctgggagcgtggcgcggcgtcgcggtcgtgcacgaggaggaggagcctgcacttgccggagggagaagaagcatgtagcacggtgcggtgctgcagtcgtgcgtgagagttgagaccacaatccttatgaaaagttacactgtaagtatgtcgtcctgcttgcatttcttccatgttccttttctcactgtaagcttagtttttgtgatcagcttccagatagaagagttattaaagtagacactaaacgattccaacctcctgaatctctttttactcctgtaacacttccatttatatttatacataatggtattgtcaacagtacacatagtttccatcagtttgttaatagtgcacctttagattgaatgagcttcttgcagagcaccaaggattaggcattgaaatgtgtggataaaaatattagaggaccacacatcattattatgcaacattgtctatgcacatgaacataattgtatcggtagtaagccgccagcatgtttgaaagttaaaaatgtgaattaagaacgaattatcgtatcctgctatacttatgcaacctaccaagaattagggcattgtagaaaccatataaagtattgagatcaatttgaatttgtctgcctcatgattttttgatacctgacctttatgaaggtagaggacaacattaaggatgatcatagactaccaacattcttcttcagattaaatgttaaattcagtaatttaatttgtttcagtgatcggttgtgtgtacgtgtctcccgtctgtgaaaaatttatgatcccgaggatgagtataagcttttccatgctcatatggtcctcatcgacgaggaggtacgcgacctgcttactacatgaagcatgctgcataccagatcaaagaaattttaatatggggctggcagtgctcatgctcaaatataccctccactcactgacgttttcaaacctctgataaaggagggcaatgtctacaatgtctcctacattcagatcaagaaagctaataggatgtacaagcatgttgacaacgatatcatgatcggtttcacaaaatggatcctatgctgcctcaacaaacccgcggtttgaacacgtgacagatgacggcttagcttctgtggatggacatcttggtcgcttttgtagatggaatgtttggttggcttttgtagacagaattaggctgcacttgtgattgtgtaacgcttatgagcatggttgtgtggactgtgtcggccaaagtatacctcccaatgccttgtatatatcacatgcttagctgtctatccccaactaggtcgcctgataatagacttcgatcatgtcatgctattctataacaattttcgctgtaacttgcctaatcgtcatactatggtacacgcttaaatttggtgctgcaactttattgtggattataaaagagagaaaaatacagcataaagttataatgtcaaattgccacagctcactgttaagacttatttgatctagtgaaacctagttatctattagtaaaaattaattactgacaagtatacaggtgcatcatgaaaaccaaagattaagtgtgatcaggtagagctagagcaaatttgagggggtgtacttgtcttgcgggtgcatagctttttagtatgaaggtgcagatgaggtgaaaaattgatcataatcactgtttttcatttttgctgtgggtgcgctcgcgccacagttttatacatagtagctccgcccctgaatgagataaataattaaatcttagtttttctgaagagtatagtgcacattactatgccactaactaaaccctacattttgaac

SEQ ID NO: 2207 - DNA, 2526 bp, Zea Mays
cttcctttcccaactcggtcgacgcgttcgccacggctgcgcagtcctcctcctcgcctccgatcccctcccttcgacgatgcgagcacacccgctcatcctcttcgtacctgcaccgccacctcatcctcttcctcgccgcgccgacacccaccgcgctctctccctcccgcggcgacgcccttcgccaacgagaaccgcacgccgtcgtctcccacgggcactgtcgcacgctgggccacgctgcagtcggtggcgccgccacaccttcttcctccatgtgccgtcgccgccctattcttcttcgagatgcagccgctagcgctgccctcctcccagctccccttcatggccgcgtgcagggactatgtgccagtgttagtttttggtaccagtctacaggtctttcatttctacattcaaagaaaactttacatggtaccggaaccgggaccagcggcgacggtgtagtggtgaggaggcagaggagtgccttcggcctcgacggaagaaggccgccgatggagaagaagaccagctgggagcgtggcgcggcgtcgcggtcgtgcacgaggaggaggagcctgcacttgccggagggagaagaagcatgtagcacggtgcggtgctgcagtcgtgcgtgagtaggttcttattattgttttctatcctgctggatatgtagtcatgacagttaaattatgtacaactatgattacaaacgggaatacaagctaggagttgagaccacaatccttatgaaaagttacactgtaagtatgtcgtcctgcttgcatttcttccatgttccttttctcactgtaagcttagtttttgtgatcagcttccagatagaagagttattaaagtagacactaaacgattccaacctcctgaatctctttttactcctgtaacacttccatttatatttatacataatggtattgtcaacagtacacatagtttccatcagtttgttaatagtgcacctttagattgaatgagcttcttgcagagcaccaaggattaggcattgaaatgtgtggataaaaatattagaggaccacacatcattattatgcaacattgtctatgcacatgaacataattgtatcggtagtaagccgccagcatgtttgaaagttaaaaatgtgaattaagaacgaattatcgtatcctgctatacttatgcaacctaccaagaattagggcattgtagaaaccatataaagtattgagatcaatttgaatttgtctgcctcatgattttttgatacctgacctttatgaaggtagaggacaacattaaggatgatcatagactaccaacattcttcttcagattaaatgttaaattcagtaatttaatttgtttcagtaatacaagattagaccatccctgcacatctgcctatctgcctggcaaaatattatcgtcgcttccaagattgagaatatggctgcgtttggaaagccttagattctagcattggtgatcggttgtgtgtacgtgtctcccgtctgtgaaaaatttatgatcccgaggatgagtataagcttttccatgctcatatggtcctcatcgacgaggaggctggcagtgctcatgctcaaatataccctccactcactgacgttttcaaacctctgataaaggagggcaatgtctacaatgtctcctacattcagatcaagaaagctaataggatgtacaagcatgttgacaacgatatcatgatcggtttcacaaaatggatcctatgctgcctcaacaaacccgcggtttgaacacgtgacagatgacggcttagcttctgtggatggacatcttggtcgcttttgtagatggaatgtttggttggcttttgtagacagaattaggctgcacttgtgattgtgtaacgcttatgagcatggttgtgtggactgtgtcggccaaagtatacctcccaatgccttgtatatatcacatgcttagctgtctatccccaactaggtcgcctgataatagacttcgatcatgtcatgctattctataacaattttcgctgtaacttgcctaatcgtcatactatggtacacgcttaaatttggtgctgcaactttattgtggattataaaagagagaaaaatacagcataaagttataatgtcaaattgccacagctcactgttaagacttatttgatctagtgaaacctagttatctattagtaaaaattaattactgacaagtatacaggtgcatcatgaaaaccaaagattaagtgtgatcaggtagagctagagcaaatttgagggggtgtacttgtcttgcgggtgcatagctttttagtatgaaggtgcagatgaggtgaaaaattgatcataatcactgtttttcatttttgctgtgggtgcgctcgcgccacagttttatacatagtagctccgcccctgaatgagataaataattaaatcttagtttttctgaagagtatagtgcacattactatgccactaactaaaccctacattttgaac

SEQ ID NO: 2208 - DNA, 2942 bp, Zea Mays
ggggaactcctagactgtgggagcagtagctcaagagccggacactcaacagacagagtacgtacaagcgactggtgaccgtgtgtgtttgtgtgatttgattggggtgttgccatggccggatcgggaagcgatggggctccagcgaccgccggcgccagcctaatgagcgactacctcgacggcccaaacgccatccaacggcgcgctgcgtcggtcgcaatcgtgcgctccggcgcgggggcaggggacggcccgcgcgtcgtcgacgggcccgggcgggaggaccggagggcgcagtcgtcccgacgagcctcgctgtcgttatggcgctctcgggcgccggccacgaagacggcggccgttgactcgatacccagctccgtcccgggcgctgccgcgccgcggggtgccaaggataaagggtcctcgacggcgtggaggagctggaagccggtgcgcgcgctcgcgcacctcgggaagcgccgcgcggggtgcctgttctcggtcgaggtcgacgccgcccgcggcgtgccggcgtccatggaagggttccgcctcgccgtcaccgtgcgcaaggcggagaccagggacggctcggtgcagaccctgccgtgccgggtgcgcggtggcgccgcggacttcgacgagacgctcttcgtcaggtgcaacctctacttcgccggcggagccggcacggggaagccgctccggctccagccgcggaggttcgtcgtaaccgtcgtcgccgtcgagggacgaggacggggcgcccttctgggcacgcacaccgtcgacgtcagctcgctcgtgctcgagtctctccgcaagatcagctccgagggacgccgcgtcaggtggttcgacgagacgttcgcgctctccggcactgcggccggcggagagctgcagctcaagctcgggtttcagctcatggaagacgcagggctcagcctgtacacgcaggccgaggagagggaccgcgggtctccggctccgggctcctctcgtgccagggctcacaacaggaactccttcagcatttcaagcacgcccaagctttcgccatctgacgcttccgtctcaccttccatgagggcctacaagcagcttgtcgataggcttcgtgtcgacgagaatggagatcctgatcatcatcctgcggtacgatctctgatgcctcggaagcccggcgacgacgagctttcggcatccaccaccgacgccggggacgtgaacagcctccccgagtacgaggtcgtggagaagggcgttgagacggttaaagaagtcgtccactaccaggctcaacgcgaggtgctgcgggagctcgactccattgccgagcagatcgaggccatcgaggcgctgatgaccaacggcgggaagaagtcgcccagggcggcgggtcagcagcagcgtctggacgcggatgaagagatggtgacggtggagtttcttaggaagctcgaggcggacggtgtcggcgacaagaagaagctcaggctgcccttgacgccgagatccgagccggcgtcgccagcaaggaaggcggtgacgactccgcccgtggtgccagacttggggcggggcattggccctgccgtgcaaacgcgtgacggcgggttcctggtgtccatgaacccgttcgacctgccgctggggaacagagatgggcccccaaagctcgccatgcaggtgtccaggcctttcgtgctgccgggcgccacggcggccacagggttcgacgtgctccagaagatggcggcggcaggcggcgccgacgaggtgcgcgacagggtggcgtcgctcggcggcatggatgacattacggggaagacgcccgagcaggtgggctttgagggcatcgcggcggctgtgatcggcgggcgacgcaccgagggcgcgagctcgagcgccgcgcggtccgtgcggctcgtccggaagctcgccgtggccttgtccgagggccggagcgagcgcgtctccacgggcatctggagcgccggtgacgacccggagacgctggacgaagttttcgccttctccctgcagaagctggagaccatggccgtggacgcgctggcggtccaggccgagatggccgacgaggacgcgccgttcgaggtctccgcggccgcgggggacacgggcgtgttcgactcgctggtgccctcggacgagtggtccgagtctggtgcctcggacgggcgcgtcaccctggtggcggccatccaggtgcgcgacccgtcgcggcggtacgaggcggtgggcgcgcccatggtcgccgtcgtgcagtcggcgaggctgttgggcgcggcgggctacagcgccgggaggttcaaggtacgaagcctgcacgtcggcggcgtgcagatgaggtgcacgccgtccggaggtggcgggagcgcgcgctggggcgcggagaggcagaagctgacggcgatgcagtggatgctcgcgcacgggccggcccgcgctggcaagagggcggcgacgacgacggcgcaggcgggggcgagagtgcagcggcccgacgtcgtgtggagcctgtcgtcgcgggtgctcgccgggatgtggcttaagacggtgcggaacccggacgtaaggattggcggcggcggcggcggcacgtgaggtcatctgcagtctgcttcttggctacgtgcagtatgactgcgtgagagcatcgagcatagattccatgatgatagagtatcatagtatgcagacatacaagtaacgtcagtattgtggaattgcagtttgtatggtatggtagtgttacaactttagattgttattttggtgagtgttcctttaagttgctatcagtggtatgccagaaatgccttgcatacaccgtgtatccagcgtatacactatatatacaaatatatttatgaaaaaaaatctaaaaatatcaacgaatattacgctaa

SEQ ID NO: 2209 - DNA, 2938 bp, Zea Mays
cctagactgtgggagcagtaggtagctcaagagccggacactcaacagacagagtacgtacaagcgactggtgaccgtgtgtgtttgtgtgatttgattggggtgttgccatggccggatcgggaagcgatggggctccagcgaccgccggcgccagcctaatgagcgactacctcgacggcccaaacgccatccaacggcgcgctgcgtcggtcgcaatcgtgcgctccggcgcgggggcaggggacggcccgcgcgtcgtcgacgggcccgggcgggaggaccggagggcgcagtcgtcccgacgagcctcgctgtcgttatggcgctctcgggcgccggccacgaagacggcggccgttgactcgatacccagctccgtcccgggcgctgccgcgccgcggggtgccaaggataaagggtcctcgacggcgtggaggagctggaagccggtgcgcgcgctcgcgcacctcgggaagcgccgcgcggggtgcctgttctcggtcgaggtcgacgccgcccgcggcgtgccggcgtccatggaagggttccgcctcgccgtcaccgtgcgcaaggcggagaccagggacggctcggtgcagaccctgccgtgccgggtgcgcggtggcgccgcggacttcgacgagacgctcttcgtcaggtgcaacctctacttcgccggcggagccggcacggggaagccgctccggctccagccgcggaggttcgtcgtaaccgtcgtcgccgtcgagggacgaggacggggcgcccttctgggcacgcacaccgtcgacgtcagctcgctcgtgctcgagtctctccgcaagatcagctccgagggacgccgcgtcaggtggttcgacgagacgttcgcgctctccggcactgcggccggcggagagctgcagctcaagctcgggtttcagctcatggaagacgcagggctcagcctgtacacgcaggccgaggagagggaccgcgggtctccggctccgggctcctctcgtgccagggctcacaacaggaactccttcagcatttcaagcacgcccaagctttcgccatctgacgcttccgtctcaccttccatgagggcctacaagcagcttgtcgataggcttcgtgtcgacgagaatggagatcctgatcatcatcctgcggtacgatctctgatgcctcggaagcccggcgacgacgagctttcggcatccaccaccgacgccggggacgtgaacagcctccccgagtacgaggtcgtggagaagggcgttgagacggttaaagaagtcgtccactaccaggctcaacgcgaggtgctgcgggagctcgactccattgccgagcagatcgaggccatcgaggcgctgatgaccaacggcgggaagaagtcgcccagggcggcgggtcagcagcagcgtctggacgcggatgaagagatggtgacggtggagtttcttaggaagctcgaggcggacggtgtcggcgacaagaagaagctcaggctgcccttgacgccgagatccgagccggcgtcgccagcaaggaaggcggtgacgactccgcccgtggtgccagacttggggcggggcattggccctgccgtgcaaacgcgtgacggcgggttcctggtgtccatgaacccgttcgacctgccgctggggaacagagatgggcccccaaagctcgccatgcaggtgtccaggcctttcgtgctgccgggcgccacggcggccacagggttcgacgtgctccagaagatggcggcggcaggcggcgccgacgaggtgcgcgacagggtggcgtcgctcggcggcatggatgacattacggggaagacgcccgagcaggtgggctttgagggcatcgcggcggctgtgatcggcgggcgacgcaccgagggcgcgagctcgagcgccgcgcggtccgtgcggctcgtccggaagctcgccgtggccttgtccgagggccggagcgagcgcgtctccacgggcatctggagcgccggtgacgacccggagacgctggacgaagttttcgccttctccctgcagaagctggagaccatggccgtggacgcgctggcggtccaggccgagatggccgacgaggacgcgccgttcgaggtctccgcggccgcgggggacacgggcgtgttcgactcgctggtgccctcggacgagtggtccgagtctggtgcctcggacgggcgcgtcaccctggtggcggccatccaggtgcgcgacccgtcgcggcggtacgaggcggtgggcgcgcccatggtcgccgtcgtgcagtcggcgaggctgttgggcgcggcgggctacagcgccgggaggttcaaggtacgaagcctgcacgtcggcggcgtgcagatgaggtgcacgccgtccggaggtggcgggagcgcgcgctggggcgcggagaggcagaagctgacggcgatgcagtggatgctcgcgcacgggccggcccgcgctggcaagagggcggcgacgacgacggcgcaggcgggggcgagagtgcagcggcccgacgtcgtgtggagcctgtcgtcgcgggtgctcgccgggatgtggcttaagacggtgcggaacccggacgtaaggattggcggcggcggcggcggcacgtgaggtcatctgcagtctgcttcttggctacgtgcagtatgactgcgtgagagcatcgagcatagattccatgatgatagagtatcatagtatgcagacatacaagtaacgtcagtattgtggaattgcagtttgtatggtatggtagtgttacaactttagattgttattttggtgagtgttcctttaagttgctatcagtggtatgccagaaatgccttgcatacaccgtgtatccagcgtatacactatatatacaaatatatttatgaaaaaaaatctaaaaatatcaacgaatattacgctaa

SEQ ID NO: 2210 - DNA, 2457 bp, Zea Mays
catgccttggataactgtatgcctctctgcaatttcaatagccatcatagcaattatagcctgcagctttgttccaactgctagaataacctacacataggaaagcactgttagccgtccccaaccaaacaaaacctttacccaaaaagggataagaaacaaacactgaaagcacttactacaaggggaattgcagagaaccagaataagttgtgccatcctggacaacgcaaaatccaaatcaaaagaaattagtaccgtttctgcaaagcacccctgtgccctagaagctgtatcctgtcaaatcacacatactcgcatactccctccgtcccaaaataattgatgttttaagtttgacacgataatttagaagtaaaaaaggtgtggtgcacagaaaacaagagagatctagagaaatagagacaaatgttggaaaaaggaaaaatgtgtattgaaagaagagaaaaagtctaatgggaagtgaaaatgaaaactattaagttgcatacaccaattaattcaacctaaaagtttaagttgattgaaagagatgggtaattcacttatattattccaaaaactctccctcacgtcgagcatctcttgggtctcagatgtggaatatgagcgagcaacaattattttattttaattacgctaaccaggattcaacctcatgacctctagctttgataccccatattaaattccaacaataactattctaggacaaaaattgaattgtataactacaactattttgggacggagggagcaagtgataactaaatgctagacatttggagtgtaagctctaatttctgtgtgacctgatagttcagtttgacatgagaatgttcatagtaattttctggaagatggtgatcagaaaataagataagataactcaccatgaacattgaacagcatgacagccaaagcagaagcccatagtggtggactgataaattaattgatgacacaaatgagtaactgattattaggaagatgaaacaagaaacaataacgaaataagcataacattacttgagtaacgaaactaactgttataaccacatattcattttccaaaaaaaagctaggtattcaaatcaaaactacatgaattaagaaactataccgatcaacttcttagacagaagcatatttgtgattagtatactcatctatctagcgagtaagacaattagaaacgactgggttttctaattttgatggactacattttaaaagtatataacatgcatatataactacaaagtaaattatcaacatttcttacctaatgccaacaactgtcttgaaatcatcctccaaggaccttttaatgtactttcgaaaattgaacctagtccccggagataaatgagcctgtaaaatgatttttcagcaacctaaactgatagcaggagcttactcgtgaatctcaaattacttactgaaatgaatccatgtcgcaaagtaaagtagtctgtcttacggacggatctgaagaactgcctaaagaagctcacctacagttttatatcaagtgtaaccatacaacaatgggccccgaagtcagtagcttcatttatagattccatgtgacagaagatcattcgaaaaagcattaaagtttagttcagtcactatatcactggttgataatcattttattactcattttttgctgtgaaattctggagaccttttgggtcccttactcccttgttcactaatttatagatgaaataaacaatatatcctctgtcccataataagtgcacttctataattcaaattttgtaccaaaacaagtgtacatctaggaattggaccacctaactcttttttttactttctctcatcctaaaatgcaacggttacatttttatagaggtacatatgtaatttctcactaacattgatctcttcacctaaactctagaagtacacttattttgggacagataaagtatgttcaagacaccaagtgtagactacaaactcttcatattcaatatttagtacatttatacaaagtattttgtggatgttaagtgttaactgagaagaaagtattacatagtctatgaaacttattgtagccacagaaaggagccatgaaatgactcacaaaatagagcgtgattgtgcttttgctccaacaacttgcatgttgcctcacaaaagatgtttggtgcgtaagcctgaactttgaggggtctgcataagttaaatatatgacataaatttgcaaattagtggagaaaccaaagcagcttgatagtaaacaaataaatatcaaactaactatgcataaacttaatggttttaacaattgtatgttatacttcttttttttttgcataaaagcgtactaagaaaagtagccaatcatcaaaatataaagtaccatttaaataattatactgaggggagcaagtttcc

SEQ ID NO: 2211 - DNA, 800 bp, Zea Mays
gaaagactagctagactatcctagcgtgtgcggatacacatttcaatctctactactacttatgtctttactgtagccgtgcacagacgcacggttctgtcatcgcgccattcacctcctccatcccgattcctccgcccgcgattcccctccccacgcccgtagcccccgccgtcgtcctcgcggccagccgaggacagccgccgcgcccgcaaatcacgcgaccatgcccttccatgtcctcgcgttctccattgcagccacatccatggcgtcgcccccttccatcgatggcagcccgcgcaagattcttccctgcagccgcgcccgcaaatcacgcgactccccctttcatggcgtcgcccccttccatggcagtcgcgctccctctgcgcccttccatccatggccgcggatccctgcgcgccgcgattcttcccatacactccctctgcgcccttccatccatggccgcggatctctgcgcaccgcaattcttcccatacgctccctccgcgcggtttgcggatgccaatcctctccctccacaccgcgattcttcccatcctctcgcgactgccttccccccattagttttggcgtccacaatccctccctccgcacaccacatccgggcacatcatcggtgtgccgctgccggcgacgaagaaggagccccgctcccgccagccggtgtgccgccactccgcatccgtgcgtagcgccggtgttccacgaggctaagtgtttacacaacagcgtcttagcgctcacaccacctactggattatcagcttcac

SEQ ID NO: 2212 - DNA, 1196 bp, Zea Mays
tcgcgccattcacctcctccatcccgattcctccgcccgcgattcccctccccacgcccgtagcccccgccgtcgtcctcgcggccagccgaggacagccgccgcgcccgcaaatcacgcgaccatgcccttccatgtcctcgcgttctccattgcagccacatccatggcgtcgcccccttccatcgatggcagcccgcgcaagattcttccctgcagccgcgcccgcaaatcacgcgactccccctttcatggcgtcgcccccttccatggcagtcgcgctccctctgcgcccttccatccatggccgcggatccctgcgcgccgcgattcttcccatacactccctctgcgcccttccatccatggccgcggatctctgcgcaccgcaattcttcccatacgctccctccgcgcggtttgcggatgccaatcctctccctccacaccgcgattcttcccatcctctcgcgactgccttccccccattagttttggcgtccacaatccctccctccgcacaccacatccgggcacatcatcggtgtgccgctgccggcgacgaagaaggagccccgctcccgccagccggtgtgccgccactccgcatccgtgcgtagcgccggtgttccacgttgcgaagggaatctcaaataacaaaatttgtcgatcttaagtttcttcatcaaccagttgttgtttcggctagcgaccggtgcgcaagaaggaagggataaggtgcttggttgacccggaccggacgacaggacaccgtcggggattcgctgcaacgcagcgacggcttccgcatcttctcaggccaaggtttaatatcagctaccttgttctacaagctggctatgtgggggaatgacagatgactgaaatttgttggggatgcaaagattcttcgaaggaactttgtgattgatctgttaagttatgaggacaattcgtgccgatatgccattcctgcaaacatacaatagagacttatcgatatcgctaaaaaggattagctggttagtgtacagttgtcgacacatttttctgtaattaaaaattttaaattaactttttagaaataatttgtgtgatattgataatgttttccacacgtattttgcatattatagtgatgtttgtcgttccgtatcaatgtttcatacaaatcttttacttccgtcgcaacgcac

SEQ ID NO: 2213 - DNA, 857 bp, Zea Mays
gcgccattcacctcctccatcccgattcctccgcccgcgattcccctccccacgcccgtagcccccgccgtcgtcctcgcggccagccgaggacagccgccgcgcccgcaaatcacgcgaccatgcccttccatgtcctcgcgttctccattgcagccacatccatggcgtcgcccccttccatcgatggcagcccgcgcaagattcttccctgcagccgcgcccgcaaatcacgcgactccccctttcatggcgtcgcccccttccatggcagtcgcgctccctctgcgcccttccatccatggccgcggatccctgcgcgccgcgattcttcccatacactccctctgcgcccttccatccatggccgcggatctctgcgcaccgcaattcttcccatacgctccctccgcgcggtttgcggatgccaatcctctccctccacaccgcgattcttcccatcctctcgcgactgccttccccccattagttttggcgtccacaatccctccctccgcacaccacatccgggcacatcatcggtgtgccgctgccggcgacgaagaaggagccccgctcccgccagccggtgtgccgccactccgcatccgtgcgtagcgccggtgttccacgttgcgaagggaatctcaaataacaaaatttgtcgatcttaagtttcttcatcaaccagtttgttgtttcggctagcgaccggtgcgcaagaaggaagggataaggtgcttggttgacccggaccggacgacaggacaccgtcggggattcgctgcaacgcagcgacggcttccgcatcttctcaggccaaggtcttggagtatccacacgagagccaactggag

SEQ ID NO: 2214 - DNA, 1187 bp, Zea Mays
ctcctccatcccgattcctccgcccgcgattcccctccccacgcccgtagcccccgccgtcgtcctcgcggccagccgaggacagccgccgcgcccgcaaatcacgcgaccatgcccttccatgtcctcgcgttctccattgcagccacatccatggcgtcgcccccttccatcgatggcagcccgcgcaagattcttccctgcagccgcgcccgcaaatcacgcgactccccctttcatggcgtcgcccccttccatggcagtcgcgctccctctgcgcccttccatccatggccgcggatccctgcgcgccgcgattcttcccatacactccctctgcgcccttccatccatggccgcggatctctgcgcaccgcaattcttcccatacgctccctccgcgcggtttgcggatgccaatcctctccctccacaccgcgattcttcccatcctctcgcgactgccttccccccattagttttggcgtccacaatccctccctccgcacaccacatccgggcacatcatcggtgtgccgctgccggcgacgaagaaggagccccgctcccgccagccggtgtgccgccactccgcatccgtgcgtagcgccggtgttccacgttgcgaagggaatctcaaataacaaaatttgtcgatcttaagtttcttcatcaaccagtagtttgttgtttcggctagcgaccggtgcgcaagaaggaagggataaggtgcttggttgacccggaccggacgacaggacaccgtcggggattcgctgcaacgcagcgacggcttccgcatcttctcaggccaaggtttaatatcagctaccttgttctacaagctggctatgtgggggaatgacagatgactgaaatttgttggggatgcaaagattcttcgaaggaactttgtgattgatctgttaagttatgaggacaattcgtgccgatatgccattcctgcaaacatacaatagagacttatcgatatcgctaaaaaggattagctggttagtgtacagttgtcgacacatttttctgtaattaaaaattttaaattaactttttagaaataatttgtgtgatattgataatgttttccacacgtattttgcatattatagtgatgtttgtcgttccgtatcaatgtttcatacaaatcttttacttccgtcgcaacgcac

SEQ ID NO: 2215 - DNA, 653 bp, Zea Mays
atttctttcaaggttaatatattatatataaatatactatagtacttgtattatataaggctaggctatgccatcatttagataccactcgtttcgcatcagccttatctgctgactatagctagccctaccaaaacaacaacgacaacacctgaacagcaatagtagcaaggcaatgaagcctttcatctgcagcagccatttcgtcgttctcgttctgtccatcgtcattgccgccgagatggcgtccgtcgaggcggatcatgactgctaccacctgagcggaaagttcaaggggtggtgcttgtatccggaccactgcgcagacgtgtgcttcactgagagcgacaacaaccttggcggcaagtgtcgcggcttcccgtctcgttgctactgcaagacatactgcgcgcaggggccaaaggccgctcctaggactactgttgctgctagccctgctctggtgtaatgtttgcctggtagctcgtagtaatgtctgtggttgtgagaaaatcaattcgtgacaattaattcgatcagcatcatagacatgttcggctgtattgttctaccgtggcgtggattgtgagactatctatctcaccttctatcatatctcttattttaaactatatcctataaatagtaccgtc

SEQ ID NO: 2216 - DNA, 1920 bp, Zea Mays
aatacggctgtcaaacatttaatcattttccatattaagatgcagtgctactgccgctccggaatcgagtgcggaaaaaggcagaaggactgcatcgataatgaacggtccggcaacgggattagtagtagctatcagcaccaggctgctggactacgtaccatcaaacgcccacgtgccaggctgtgctggaaacggtatgtggcagacgaagagttcatccgaatcctcgctgacgcgcctccaagccgcggcacgcgtgtcccggaggtcggtgccccccccccccccccccccccccccctaagcctaaggcccagaaccaactaacctctcttttttcgctcgctatatcccccgtcccacggcgccgcgcttcgccgcctcccaaacgcgtccaaaacattctgcggcctgttggagggcagcaccaagtatcacagtctagctactgcctggcaccagcaagcttctgccctgccccgccccgccgccagaatccgaaaccagtaaaccacagcggcaacaacctcgcggcgcccgcgtggaggcaggcggcgcataaagccagccggcgctgctcctgctgtgcgcaacggtcccctcctcctcctcctcctccgctctcctctccccaaagtaataactagtaaacagagctgcgtccaggcttcttcgatcggtccatggctgtcgtcacgagggacgcggcgtgcctgcccctcgtcctcctgctcctagtcttctccgcggccccgtctccggctgacggctgcgaccgctgcgtgcgccggtccaaggccacctactaccaggcctcctcgctcgccctcaacgggtaccctgcgagtacgcgaaggaccgcaacctgttgatacgcgtggaggagaagagccggccgccaagcaacctgtccatcaggttcctgtaccagggcggccagaccgacatcgtcgccgtcgacgtcgccaccgtggggtcgtccaactggcggttcatggcgcgggaccacgggccggcgtggagcacggcgcaggcgccgccggggccgctgcagttccggctggtggtgaccggtggctacgacggcaagtgggtgtgggcggagtcggaggtgctgccgcgccggtgggaggccggccgcgtctacgacgccggggtgcaggtctccgacgtcgcgcaggaagggtgctacccctgcgacacgcgcgagtggcagtgacgtgacgcgcgcacgggctggattgtagtagattgtacagtttttttttttggtcgggaatgggacgaaagatatgaaatgatgatgagcggagccggagagccgaatcaaaccaaatcaaacaaacgtgccgttgcaagttggttcggccgcgttgctcgaccccatttagggcttgttcggttattttcaatccatatggatcggaggggaatgatacggatcggaggggattttgacttattagggattgaaacctcctcaatcctcctcaatccatatggattgggatagaaccgaacaagcccttattgggtgtgtgcgccggagttggagcgcacgatgcgtgtgctctgtgctgtgtgcaatgcatgatgagtggctcttgtcgtcaactccctcaggaaccactcgttcagaaccgaacaggcggacgccgtcgtcgtgacgaggaggtgaggtcagagacaggcctcacgcagccaaaacggaaagaaatgtttggcagatcaaaagaaaacggcgccctaacatctccaaaagcgctttgtgtagtgctgccgtcgattcctctatcggtggcgctggaacacagagagtaaccggcagttgccgaccattaggtgggggccgttcagtcagtgattcccacagcacagtcccattatcaccaagagaatccttgatttcgacatggg

SEQ ID NO: 2217 - DNA, 1324 bp, Zea Mays
gccgcctcccaaacgcgtccaaaacattctgcggcctgttggagggcagcaccaagtatcacagtctagctactgcctggcaccagcaagcttctgccctgccccgccccgccgccagaatccgaaaccagtaaaccacagcggcaacaacctcgcggcgcccgcgtggaggcaggcggcgcataaagccagccggcgctgctcctgctgcttcttcgatcggtccatggctgtcgtcacgagggacgcggcgtgcctgcccctcgtcctcctgctcctagtcttctccgcggccccgtctccggctgacggctgcgaccgctgcgtgcgccggtccaaggccacctactaccaggcctcctcgctcgccctcaacggtggggtcgtccaactggcggttcatggcgcgggaccacgggccggcgtggagcacggcgcaggcgccgccggggccgctgcagttccggctggtggtgaccggtggctacgacggcaagtgggtgtgggcggagtcggaggtgctgccgcgccggtgggaggccggccgcgtctacgacgccggggtgcaggtctccgacgtcgcgcaggaagggtgctacccctgcgacacgcgcgagtggcagtgacgtgacgcgcgcacgggctggattgtagtagattgtacagtttttttttttggtcgggaatgggacgaaagatatgaaatgatgatgagcggagccggagagccgaatcaaaccaaatcaaacaaacgtgccgttgcaagttggttcggccgcgttgctcgaccccatttagggcttgttcggttattttcaatccatatggatcggaggggaatgatacggatcggaggggattttgacttattagggattgaaacctcctcaatcctcctcaatccatatggattgggatagaaccgaacaagcccttattgggtgtgtgcgccggagttggagcgcacgatgcgtgtgctctgtgctgtgtgcaatgcatgatgagtggctcttgtcgtcaactccctcaggaaccactcgttcagaaccgaacaggcggacgccgtcgtcgtgacgaggaggtgaggtcagagacaggcctcacgcagccaaaacggaaagaaatgtttggcagatcaaaagaaaacggcgccctaacatctccaaaagcgctttgtgtagtgctgccgtcgattcctctatcggtggcgctggaacacagagagtaaccggcagttgccgaccattaggtgggggccgttcagtcagtgattcccacagcacagtcccattatcaccaagagaatccttgatttcgacatggg

SEQ ID NO: 2218 - DNA, 2175 bp, Zea Mays
gcaaaagctcggttgctttcttctggcctcgtgcggaggaggcgaagggggtcggaggcctgcggcaccggagcatggcgaaccttatcggttattgctgcgacggcgacgatcgcctgctcgtcgccgagttcatgcccaacgacaccctcgccaagcaccttttccactgggaaaaccagactattgagtgggctatgcgtctgagagttgcatactacatttcccaagcattggaatactgtagtaccaaggggtggcctttatatcatgacctaaatgcatacagggtcctctttgatgagaatggtgaccctcggctgtcatgctttggtctgatgaaaaacagcagggatggaaaaagctatagcacgaacctagcatatacacctccagaatatctgagaaatgtgaaaaatatgctgttctctatttgttcatgtcagtataactggtggttttcagcagacaatcattttttaatgttgctactacaaagacatgatttctgaaagctgagttccaaaattgtagtgttgatctttttattttaaaagaaaaaatgtacatctggaatttagttttttggaaggatcagtgactcagtttaagattttctgattcctttgtatgtgctatttaaattgagcatattgtgcccttggtaagtcagttaccaggtgctgtgagatggtctggttagtgtgtccttggtctctgtctgtcattgaaatcaataagtaatgcaaacaaaaaagcaagaaatgcttcatctgtattattttctgaggaaagttttattttcaggcagggttactccagaaagtgtcattttcagttttggcactgtacttcttgaccttctcagtgggaaacgcataccgccttcacatgcgcttgatatcatgagaggcagaaacatccaagcagttatggattcacatttggagggaaactactcaattgaggtggctactacattggtgaatcttgcttctcagtgtctacaatatgagccaagagatcgtcctgacataaaaaagttggtttccattctggagcctttgcagaaaaaaatagaggtaccgtcctatgtgatgcttggaattgcaaagccagtggaagaaccacaggcacctcctactccacagcgccctctttctcccatgggagaagcttgttccagaatggaccttactgccatctatcagatcctattcacaacgcattaccgagatgatgaagggagcaatgagctgtcttttcaagaatggacacagcagatgagggatatgctggatgcaaggaaacgtggcgactctgccttcaaagacaaagattttaaggcagcaatcgattgctatactcagtttgtcgatgtggggataatggtgtcaccgactgtattcgccagacgaagcttgtgctaccttatgtgtgaccaacctgatgcggccctccgtgatgcaatgcaagcgcagatcgtctaccctgattggccaacagcattctacatgcaggcagttgcactatccaagctaaacatgcagagtgacgccgtggacatgctgaacgaggcatcacagctagaagagaagaggcaaaagagcacaagagttccttgaatggcattgccagctcagagaagtggcacgtcttctatacatataacatagattgcacactatgtagtacagtagtatattctccaacctttcccaccctgtaaaaagcgcatagtatattgcgtggtctagaattagaagtaaggagaagtgaactgcagagaagatgctctttgctccctggactctggagccctgtgatggcacttgtgtgataggttcaattttttgggcccatgtatataacatccgttgcatgggagtttagagtataggttgccggttggtcaggagggccctgtcgccgaagataataaacatgttatgtttgtgaaaaactgtctgggtatcgcttccagcagggcatgttagtaagggcttgtttgtatctcagagctaaaacaaaagtgactaaagttttagtcaggctaaagatctaaacattaagagctaagagctaaaagtgactaaaataacaaaaatatatcattcccgtcacttttagctcctaacgaggggtcaaactttagtcaaattgttttagctccgg

SEQ ID NO: 2219 - DNA, 2038 bp, Zea Mays
aaagctcggttgctttcttctggcctcgtgcggaggaggcgaagggggtcggaggcctgcggcaccggagcatggcgaaccttatcggttattgctgcgacggcgacgatcgcctgctcgtcgccgagttcatgcccaacgacaccctcgccaagcaccttttccactaatggtgaccctcggctgtcatgctttggtctgatgaaaaacagcagggatggaaaaagctatagcacgaacctagcatatacacctccagaatatctgagaaatgtgaaaaatatgctgttctctatttgttcatgtcagtataactggtggttttcagcagacaatcattttttaatgttgctactacaaagacatgatttctgaaagctgagttccaaaattgtagtgttgatctttttattttaaaagaaaaaatgtacatctggaatttagttttttggaaggatcagtgactcagtttaagattttctgattcctttgtatgtgctatttaaattgagcatattgtgcccttggtaagtcagttaccaggtgctgtgagatggtctggttagtgtgtccttggtctctgtctgtcattgaaatcaataagtaatgcaaacaaaaaagcaagaaatgcttcatctgtattattttctgaggaaagttttattttcaggcagggttactccagaaagtgtcattttcagttttggcactgtacttcttgaccttctcagtgggaaacgcataccgccttcacatgcgcttgatatcatgagaggcagaaacatccaagcagttatggattcacatttggagggaaactactcaattgaggtggctactacattggtgaatcttgcttctcagtgtctacaatatgagccaagagatcgtcctgacataaaaaagttggtttccattctggagcctttgcagaaaaaaatagaggtaccgtcctatgtgatgcttggaattgcaaagccagtggaagaaccacaggcacctcctactccacagcgccctctttctcccatgggagaagcttgttccagaatggaccttactgccatctatcagatcctattcacaacgcattaccgagatgatgaagggagcaatgagctgtcttttcaagaatggacacagcagatgagggatatgctggatgcaaggaaacgtggcgactctgccttcaaagacaaagattttaaggcagcaatcgattgctatactcagtttgtcgatgtggggataatggtgtcaccgactgtattcgccagacgaagcttgtgctaccttatgtgtgaccaacctgatgcggccctccgtgatgcaatgcaagcgcagatcgtctaccctgattggccaacagcattctacatgcaggcagttgcactatccaagctaaacatgcagagtgacgccgtggacatgctgaacgaggcatcacagctagaagagaagaggcaaaagagcacaagagttccttgaatggcattgccagctcagagaagtggcacgtcttctatacatataacatagattgcacactatgtagtacagtagtatattctccaacctttcccaccctgtaaaaagcgcatagtatattgcgtggtctagaattagaagtaaggagaagtgaactgcagagaagatgctctttgctccctggactctggagccctgtgatggcacttgtgtgataggttcaattttttgggcccatgtatataacatccgttgcatgggagtttagagtataggttgccggttggtcaggagggccctgtcgccgaagataataaacatgttatgtttgtgaaaaactgtctgggtatcgcttccagcagggcatgttagtaagggcttgtttgtatctcagagctaaaacaaaagtgactaaagttttagtcaggctaaagatctaaacattaagagctaagagctaaaagtgactaaaataacaaaaatatatcattcccgtcacttttagctcctaacgaggggtcaaactttagtcaaattgttttagctccgg

SEQ ID NO: 2220 - DNA, 2188 bp, Zea Mays
aaagctcggttgctttcttctggcctcgtgcggaggaggcgaagggggtcggaggcctgcggcaccggagcatggcgaaccttatcggttattgctgcgacggcgacgatcgcctgctcgtcgccgagttcatgcccaacgacaccctcgccaagcaccttttccactgtgagcccctctcgtgctctgcagttcgttgcctgtatgtaccatttgatcatgttccaaagatcggcactcgctgctatgctaatgcagtgcaattctggtaaatggggaataactgagataattgacaggagacacgcgagatgttctgctttgattacaacactaactcacgttttctgtgcgatatgttctgattctgtttattacatcagttcaaagggaaaactatattgaaactcgtgagtttattattcggagtttgatcgcttgttttgtcttcagcaacatgacgaatactgaatgtatttacctcatggttttactttaacataaatgaacaagcaaataattggaagcaacgattggcttcttctgatttattggccactgtggttttgctcacgtgcaggggaaaaccagactattgagtgggctatgcgtctgagagttgcatactacatttcccaagcattggaatactgtagtaccaaggggtggcctttatatcatgacctaaatgcatacagggtcctctttgatgagaatggtgaccctcggctgtcatgctttggtctgatgaaaaacagcagggatggaaaaagctatagcacgaacctagcatatacacctccagaatatctgagaaatggcagggttactccagaaagtgtcattttcagttttggcactgtacttcttgaccttctcagtgggaaacgcataccgccttcacatgcgcttgatatcatgagaggcagaaacatccaagcagttatggattcacatttggagggaaactactcaattgaggtggctactacattggtgaatcttgcttctcagtgtctacaatatgagccaagagatcgtcctgacataaaaaagttggtttccattctggagcctttgcagaaaaaaatagaggtaccgtcctatgtgatgcttggaattgcaaagccagtggaagaaccacaggcacctcctactccacagcgccctctttctcccatgggagaagcttgttccagaatggaccttactgccatctatcagatcctattcacaacgcattaccgagatgatgaagggagcaatgagctgtcttttcaagaatggacacagcagatgagggatatgctggatgcaaggaaacgtggcgactctgccttcaaagacaaagattttaaggcagcaatcgattgctatactcagtttgtcgatgtggggataatggtgtcaccgactgtattcgccagacgaagcttgtgctaccttatgtgtgaccaacctgatgcggccctccgtgatgcaatgcaagcgcagatcgtctaccctgattggccaacagcattctacatgcaggcagttgcactatccaagctaaacatgcagagtgacgccgtggacatgctgaacgaggcatcacagctagaagagaagaggcaaaagagcacaagagttccttgaatggcattgccagctcagagaagtggcacgtcttctatacatataacatagattgcacactatgtagtacagtagtatattctccaacctttcccaccctgtaaaaagcgcatagtatattgcgtggtctagaattagaagtaaggagaagtgaactgcagagaagatgctctttgctccctggactctggagccctgtgatggcacttgtgtgataggttcaattttttgggcccatgtatataacatccgttgcatgggagtttagagtataggttgccggttggtcaggagggccctgtcgccgaagataataaacatgttatgtttgtgaaaaactgtctgggtatcgcttccagcagggcatgttagtaagggcttgtttgtatctcagagctaaaacaaaagtgactaaagttttagtcaggctaaagatctaaacattaagagctaagagctaaaagtgactaaaataacaaaaatatatcattcccgtcacttttagctcctaacgaggggtcaaactttagtcaaattgttttagctccgg

SEQ ID NO: 2221 - DNA, 1971 bp, Zea Mays
ccacgttaagctttgcaaacactctttccactttcccgttggatcaacttgcccaggagagcgagttccaactaaaatcacaattgcaagtccaacaaaggaatggtgaccctcggctgtcatgctttggtctgatgaaaaacagcagggatggaaaaagctatagcacgaacctagcatatacacctccagaatatctgagaaatgtgaaaaatatgctgttctctatttgttcatgtcagtataactggtggttttcagcagacaatcattttttaatgttgctactacaaagacatgatttctgaaagctgagttccaaaattgtagtgttgatctttttattttaaaagaaaaaatgtacatctggaatttagttttttggaaggatcagtgactcagtttaagattttctgattcctttgtatgtgctatttaaattgagcatattgtgcccttggtaagtcagttaccaggtgctgtgagatggtctggttagtgtgtccttggtctctgtctgtcattgaaatcaataagtaatgcaaacaaaaaagcaagaaatgcttcatctgtattattttctgaggaaagttttattttcaggcagggttactccagaaagtgtcattttcagttttggcactgtacttcttgaccttctcagtgggaaacgcataccgccttcacatgcgcttgatatcatgagaggcagaaacatccaagcagttatggattcacatttggagggaaactactcaattgaggtggctactacattggtgaatcttgcttctcagtgtctacaatatgagccaagagatcgtcctgacataaaaaagttggtttccattctggagcctttgcagaaaaaaatagaggtaccgtcctatgtgatgcttggaattgcaaagccagtggaagaaccacaggcacctcctactccacagcgccctctttctcccatgggagaagcttgttccagaatggaccttactgccatctatcagatcctattcacaacgcattaccgagatgatgaagggagcaatgagctgtcttttcaagaatggacacagcagatgagggatatgctggatgcaaggaaacgtggcgactctgccttcaaagacaaagattttaaggcagcaatcgattgctatactcagtttgtcgatgtggggataatggtgtcaccgactgtattcgccagacgaagcttgtgctaccttatgtgtgaccaacctgatgcggccctccgtgatgcaatgcaagcgcagatcgtctaccctgattggccaacagcattctacatgcaggcagttgcactatccaagctaaacatgcagagtgacgccgtggacatgctgaacgaggcatcacagctagaagagaagaggcaaaagagcacaagagttccttgaatggcattgccagctcagagaagtggcacgtcttctatacatataacatagattgcacactatgtagtacagtagtatattctccaacctttcccaccctgtaaaaagcgcatagtatattgcgtggtctagaattagaagtaaggagaagtgaactgcagagaagatgctctttgctccctggactctggagccctgtgatggcacttgtgtgataggttcaattttttgggcccatgtatataacatccgttgcatgggagtttagagtataggttgccggttggtcaggagggccctgtcgccgaagataataaacatgttatgtttgtgaaaaactgtctgggtatcgcttccagcagggcatgttagtaagggcttgtttgtatctcagagctaaaacaaaagtgactaaagttttagtcaggctaaagatctaaacattaagagctaagagctaaaagtgactaaaataacaaaaatatatcattcccgtcacttttagctcctaacgaggggtcaaactttagtcaaattgttttagctccgg

SEQ ID NO: 2222 - DNA, 363 bp, Zea Mays
atggaacctgcggagaagagaacgcgcaaaacgcgacaaatgacattggagcgcatcgcgcagagcatgatgctgactagaacacgacaccggcgagctgagacgactgaacaagtgctggcgagcagggaaggcatcgagctgggcgacggcggcgacatgggcgagcacagtaaaggggcacgattgtgggcggtgatcggcgagcagctccatggacaacgcttggagttgggattggatctggacgccgagggaaaagacagccggaccagtggctaccaggacgcgacaagagagagggaacgtccagtactagcgacggcgagcatcaagggaagaagcaaggcaacatgcgcatag

SEQ ID NO: 2223 - DNA, 842 bp, Zea Mays
aacaaaccctagctgctcggccaggccaaaacggcccagctgaggcccatttgccgccgccgccagggggtttcctccccctctctgtgacgcgcgggccccacccaaggcgcctcgcctcctcgagcaaggccgcacgcaggcgcaccgtcactacgccgccgccgggctagctagggcgcctgggcgtccgcgcccaaattaatccgtcgtcgattcgtctccctgcgtgatggagcagtgatggcggccgtttctttctcccccattcctcctctcaccattgatgccgagaagaaacagccacgccattgatggcgcttgatggagccgtcggctacctctccctctctctagcgccctctcctctccctctcctcctctataaagggcaatcgagcctcctcccttcctccccctgccccaagctctccctcacctctcacagccacgtccacgccgaccactggagcgtcgcttcgtcgccgtccgcggaagctcgccggagccctcctcggtcgcgtcctccccgtgccgagcccctgcctcaacgaagcagcacccatgccgccattccccgtccgagcctcgccccgcgaagcccctgtcgatcgtgtcatctgttcgtcgcgaggttgaagataacccagaataatttattaattttcgaaatcacttgttgattcagtttatgaattttataattattgtgttgtaatatgggaatgtcgtgcttcagaattcatgtgtatgtgaattattgatttttgggtatatatgcgataaattagtacaccgttattagtcatattacttgtttacaatgacttttagaaggttgg

SEQ ID NO: 2224 - DNA, 678 bp, Zea Mays
aacaaaccctagctgctcggccaggccaaaacggcccagctgaggcccatttgccgccgccgccagggggtttcctccccctctctgtgacgcgcgggccccacccaaggcgcctcgcctcctcgagcaaggccgcacgcaggcgcaccgtcactacgccgccgccgggctagctagggcgcctgggcgtccgcgcccaaattaatccgtcgtcgattcgtctccctgcgtgatggagcagtgatggcggccgtttctttctcccccattcctcctctcaccattgatgccgagaagaaacagccacgccattgatggcgcttgatggagccgtcggctacctctccctctctctagcgccctctcctctccctctcctcctctataaagggcaatcgagcctcctcccttcctccccctgccccaagctctccctcacctctcacagccacgtccacgccgaccactggagcgtcgcttcgtcgccgtccgcggaagctcgccggagccctcctcggtcgcgtcctccccgtgccgagcccctgcctcaacgaagcagcacccatgccgccattccccgtccgagcctcgccccgcgaagcccctgtcgatcgtgtcatctgttcgtcgcgagaagctgattgtgtggtagaagaaccgaattcgtttgaggacgac

SEQ ID NO: 2225 - DNA, 8456 bp, Zea Mays
cagagatcagagtgacttgccttgctgcccttacgcaccgaaagcgaaagggggcataaagaggcaaagcgctgattcaaaggagtcgcctcaggtttgctgcgatgctgtccccgatccatatcatggtgtctacaagcaatcgagtagagagttgtagtcgattacgatgcaaagcaaagaatccagcaaagaaaattatggccatcgtttgtttcagtttttttttctgattatcggcaccagaagccgtcttgcactaccaaatgttcagcttctatggaaatctctgaagtgaaaacccaactaaatcaacataaacacacaatcgatcgaatcttcgcgatatgagaaatccgtcaccttttagatcgtaaatcttatagatttcttcatctttctccgcatgtagtcctcacaatacttagattctcctcacaaaagctgaaacaaagacagatcgaaccagtgctgccagcgatcccagtgctgtgcatgaatttttcattgttggcttcctcggtgaacggttaaaggtcagattacttgttgaaattttgtcttggccagtggccacacgtgtgaatttacattaaacttggagctagaggctagagcatgtcgtgcactactgcatacatatatatattatccaaaccaaaaacaaaaacatttggatactaatgttgggtagctgtagcaatgtaggtcagtcgtttcttgctgtacgtccaggatatgttcttcccttgccttgctaccgaagcatctgatgcagttcgcgtttatcgaggtaaagtatcaagtgagttctacgcttttcatgcatctgacatgcttgcctcgtccttcgtctaaaagtaaaatgagtcaagtctatttaacctttttttcaaggactcgcactttttaactggaatacacttcaaaatatgttctcacatggttttgctggcccacactggtactacataagtagtcttaatatatatatatcctttttagcagcaaaatgttacgttgtttagcctgatatatcacgatatttgcacttttgagaagtatggagataaactttttatcccgctatttaaaacactgcttaatatatattatcttatgtagtggcacattagatttttgacgacatggaggggagagggaggtaagaaaagggagaaattttagtatatgagtctcaattcggctacttgtcaatataagggacccaattcgcgtgtttttcaggaaatgacactaacacacctattcttcattccgagtgtttgttgggcattgtctttgttggtcactcttgacttctgaaagatatcaaaaataaggcaacacaatgaattattcttaagctcctccctttaattaacccatcttcgaagatcaattaaagtgaaaagataagaaccatggacaaataacaatacaaaacgataatgaaacataacagattaaataagttactcatcttggtatgttattacttttcctcattctttataatataacaaatgattaaaatatgtcttcggcttcacaaacattaatgcgaaggtatgcagagaacacaactttgtaggcgaagcaaatcagtcctccctgagttcaaaaaagcgtccctaatgcatgtcattgttcctctatttatagtcgtgatgtacagcttcggtaaaaattacaatcatgtcctgaaacctatacatatgagttataaactcgaccaagggtatcgacatcttttccttttgtagtcttgttgaacaagtctttaggactccgcctcgctattgccgaccactttatcgcgtacgtactccgctaaatcgaagcttgttgctttatccttgcaatcatgatatacatacattgtacccagaccaaggtaattttcagcatttcaccttgttacacttaaaacatactcagaaataacttggcgggttgatgttttgaggaccttcggctaaagaggtccccaacagtagcctctcatgatattagtttgtttttcataacgaactaagaccacgaaattaacgaaggccttgtaccgaaggttcgaaaaacacctttcctgagctcgttagtgaaaacaaattattgaaaatacgcattcgtgaaaacctgtcatgatgggctaagatttgaatttttaattccctgctcgttttatgtataaaagggaccgagtcccatgtgttagacacgacattcacttgcttttgccaacctactgttgtcatttgttcatactacgaagctttacttctaaaactttcttccacaaagcttcgctccttgcaatcttcatggctttgtgaaatggctagagaaggaaggagtgatgaactcgccctggtggcatactatgatgccgcagagaagaccgggattgaaaagattactggataaatcatggctgacttattttatgactctaacgatagtgaataatttgattttgaggaggaaaatggtgatgtcaaagatcggtcatcgaagccgagtcatgttatcttcggtaaatcaaggtaatgaaggacaactatattagtgatactttcattgtgaggcttggcgaagaggacactacaccccttcctgagaaagatgaagtggtggtgttccaaatcttcttaaagacagggctccaattcccaccacataatatggtagttaaggtattgaaattttttgatatatgccttcaacaattgatctcgaacgctttagtgtggttagggatcttcatctgggctatgagaagccaaggcgtagagccaaatgtcgattacttttgccacattcatgagctacattaccagacaaatgcaagtgggaaagagtagcatcataacaaatttggttgttacaatttcgagtattgataagaccacacttcggcataaagaggtcaacatgcgtcatgaacgatgaatctcaaccgctctagtgacttttaatgcagtgtgcagctagattgtacaaaagaccttgtgcaagagcatctagccttcaatgtctagccacttagggttaatcggggaatgctggagccgaaggaagacaacctaaaagggaaatgtgccatagggccatttctacctgttttggtgattaagtgtccaacacaccacattggaccaactagtttgatatgagtatgagcacaggttcacttggaggtaaattaatggaactaagtccaaatgggcaaaatctggaggcgaaaagtgcaactttgggtaaaaacataaacatgaagtttaagtgtttgaataagttgtacataacctattctatgattctagcacctttgtttggctactaactcatttctgcaagaaaagtgcattttggacttggttttgtgcacaattcaaatcctagagaaactatggcaaagaggtaagtttctgacacttagtcagatgaattacatgctaattatgttttctaagtagtaggaaaaccctcaaagaaagccaaaaaatgtttggaggagataggctcaaaagagccatacatggtctggtttgggtcgcaccggatcggactggtccagtggttcaccggatcgagtccctgtgacctggctgtactgctcggtctcgagaattttattataaaatccatcagaccgtgaacagtactagtctggtgtgcaacgggtcatttctccaactgtcgacttcgacgcgtgctaggcgtcaatggctagctgacgtggcccacggtccggtggtgcatcagaccagtccggtgccacttagctatggaaaatgcagaataagatcacgaactggggggcacatggacccggtccagtggtgcactggaccggtcctgtgcgcccccatgtggattcctaaatgattttaaatgaggcatggattcctaaacgattttaaatgaggcatgaataagatcccgaactaggggcatatggattcctaaatgattttaaatgaggcatgctctagaatttaaaagtacttgttaattgcttagcttgtgctgaattgtaaatttaaaacagacagcaatgactgcatgtgttcaactgttcatagatcataatgcttttgtaacaattgatgtagctttcttgtttggtttaaacatactgtttgcaaatctgtcgtgtcgaaattcatgtaatctatgtccacttaaaattttgattttatgttttaccagttgtaagtgtgaagtgttaaaagaaagcacaattggcaggtcagcattcaaagcctaagaggatcaagggaatgggaatatgggatctagactatagattgaactagactatcaattcaatctattcatctcatatctttcattttaggttgtctccagcaacgaacgctaaatgatcctgtactctaaatttagcagatgagacatccgctatcggctccagctgcaacctgtaagaggaactgcaaaaatagcggatggcttcgacgaacgctaaagacaaagtgtatttgttcatccgctatcatgctctcacacgtagtccaccctctttctctctctactttttctcctgcgcagttgtcagatgtcgtgcaaatttgtctgctattgcttggctgtagtcggttttaaaaattaattagtctctaattaattcttggttcacataaacgattttccgtttctgtgtgtatgataaggaaaatacataatacaacttttttgtaaataatatgaccgatgaataatttgtatataaaatgaaaatgtattgtaagaagtatttttatttttcaacatacgcaattaatttttctataagtgacatgtaaaaacaatgtgtattatgaaatctggtatactgtagatatagaggaccgaatttatgggatgttactggagatgaaaaagatatagaggatagaatcttttagagcgtgtatagaacagagaatatttctttagagaatagaatttagggaacgttgctgaagagtagagatagccttagaaagtagcaagcagcgaataaaatggctgcaccaagaagttttgtactctgacttgaacaggatttcatgcattgaaagtgtcatcccttgctttgttttaactacccttttcgttaagttaaattattcgaactcttcctagaattagattgtttatttagtacacattgctattttctaatgctacaaagtatggacacagggcacaatcttcagtaattccaaatgtgagagtagcaaatttaaaatcaaaatattacattttacacattgttgcagtgatcatttcttacatatataacagtttgagatagaaaaaatctactttgtacatgtcttttagttgtatggctatttctactcaagttttttgatgtgttttttgctttttgcaggctggaatatgggaggaaaagaacccccaactcatgggtcaattagtaggaaaagaatctcaactcaattgaggaaaaaatcactttttatgcactacaaagaagtattttatgctagtttaaatagaatgcatcatccctagtaactggacagctggttaggcttatatttttggtataatgtgtactaaacaaatgcctatatgattatcgtagtttatgcatttttagatggattttatgacacttcttattgtgttttacgctaaaattacctgaaatcacttcttgttgcgttttacgccaagttacaacacttcttgatacgttttacgccaattcgacccatttgaacgcattccgacggcgggcccatcgtttatgctatatatataaaggtaaagaaagctgtaaaaattccaatcagcaaatatttcacaaagcaacctaaatgctgccaggttcataaataaatattactcacattcattggttgggcttgtgccaaatcctatgcatgcatttctcaaatcttctgaatcccttccgcaccgaaaaaaatcgaggggacggtgtcgtccccgcctcatcctattttgacctcaaaccaaacaaaaatggatggaaggaccggtcctgaggttttatagacccggggcgaaacaaaaaaatttggggccctttaagactctctctctctctaataagtacataagcaaattttttaatgataaaaatctctaatatatcaaaacaacttcaaatctttgtacatattaccttaaaaatttcttctaccctctcgccaaagagccgatcgttgcctcgaagcgctagtctaaggtgctaatggacgggagaagcggcatcaacatcatgtatgttcaaaccctagacggcttggggatcacacgctctgtgttgtgccccagcttagcgtcgttccatgccatcatcctaggccaccaggcctacccgctcgagcaaatatctttgcccatcacattcggtgacccccgcaacttccgcaccgaacgaatgtagtttgaggtggtggacgtttcggggtcctacaacaccattcttggcaagccgtgctatgtcaagtttatggtcgtctccaattacacgtacttaaagttgaagatgcccggtccccgtgggatcatcatgtcatcctcccctcaaggcagcctacacttgtgagcaggccaactatgagctcgcctcaacactagccgcgacaagagaaggggctgagcttcagaagactgttcctcaaggccccctaggtgctcccgagaccagctcaggcccctccaagtctgccaaggacgtagaggatgccccgatgaacgcagctgagacatccaagcacgcttgtatcaggcgacatcttctggcaagtgacaaggcatgcttaccgactaccccgggctctccctcaatatacgcggcgtcattgtcggggcaccaaaaagttcttagaaacaggatttgtaaaaaaaaatgtgccacccagtgtgggtcacgaatcgtgtacttatcaagaaaaagaatgagagcggttggatgagagctcttttccctctgctgcggatcggccaggcctaagaatccgctactggctgcgagtccctccgggatcccgtcctcatctacatgcccgagtaagtagaacatggcaaccaagtcaccacactctgcacagggggtgggaaacagggatcactccacgaaaacacgccaggacacatactctcgattgtaaccaatcgcaggaccccagacttaaggaaaggatggggtcatggtacacaagcaagaaacaacatcacaacaaaaggcacggacatatgtttggtcccatcattcaaacaaagtttgttactagacaacgaagttacgacatttagacgtcgacgggcgaccctaagctccaagggcccgtcaggaggacgccaatgttaatcgcttgcttttgattactataaggtatcaagaacaaggcaacacaagttagaagattgaaaccctctcccttcttttatctcttcttcgaagagataaattaaggaaaaagatgcaaacaagggatgtagatgaagtaaagatacataataatgtaatgaagaacgaaatgtgttactcttctaatatgacttagaatttttcattccattattctaccagtagcatgctgcattctacaagcaagcagttcaaaccacatagacattgatacttagaccgtgtccagcagttcacccatatggttacctaaaacattgttttgcactgtagaccgcactatttaaaagtggcgtttaaatatagggatggggatgggtaagctgctaaagataatcttagttccaaccacaacaaacatagtgtctcagaagcacttgagttccaaccacaactaacgcagtgtctcaaaagcacttgagttcgcgccgacggtggcatcatccaagatggaaggcgctgcgacgcaaggcaataccggtgaaagatctaagcagggagattggagggagggtggatcctcgacagggttcgtcggcgtggacagattcatggcgacgggggtgccattgtaataagtacaatgtaacatctcaatcaatcacaccaaacaagtctaagtaagcttttcaacattaattaggatggttctaaacatagttctaaaaattggaagtttaagtcaatcatctgccaatattagtaatatatgatttctcaataatatatgaatctgataggatttctattcctaccagggatctccctcaagctgtactggtgtactgctggaggttggcgggggactgggcgagagggacgccaggacgtcgtgttcacggcgtgggaaaacaggctagctcaggttccggcttccacagggaagacggctaggtaatttctttgatgatccttcctcttgtcttacatctcctatttatactagcctctctctcaatagaaggcaacttatctcttaataaaaggaaactaatctctctgaataaaaggaagtttatct

SEQ ID NO: 2226 - DNA, 4181 bp, Zea Mays
gggaaacccatgtaaccggacgacgccgtcgaagaaggcgcgagcgacggacgacgctgtgtaaggatgccccagcgcaataaagtgcgcgtatttggagaatcgatcgaccaccgtgaggatgacagccttgccgcccaccttgggaagcccctcgatgaagtccattgaaatgtcggcccatatttgggacggcacatcgagcggttgtagaaggccggctgggtgcagagtctcggtcttgtttttctggcacgttttgcatgtacgtacccattcttgtaccaaggcgcgatcgctggggatgtagaactcggcacgaaggcggtggagtgttttctgaacaccctcatggcctgctgagtgcgccaaagtgagcacctggcggcgcaggtccccatggtcgggcacgaagatgcgagatccgtggaggaagaggccatcctccagacgccaaggcgcttcaagggtgccctcctgcaggcgctggcaaagatgctgcgcggcgtcggtggtgctggtcgcgttccggatctcttccagtagggcgaaggaaggcccggagagggcatggaccgaggcggccccctccgaacttagtgccgaagatggggacacctcatcacggcgagacagtgcgtccgccacagtattgaggcggcccgggcggtactccacgtcgaagtcgaaaccgaagagtttgctgagccattgatgctgtggcacagtggacaaccgttgatcgagtagaaacttgagactgtagtggtccgtacgtacccgaaaatagcgaccccaaagatacggtcgccaatggcgcactgcttgaaccaacccaatcaactcgcgctcatacgcggcgagtttcatgtggcgtggtgcaaatggtctgctgaagaaagcgagaggtcccgcgccttggtgaagtacggcgccgaaccccacaccagaggcatcacagtcgactgtgaagcacttgtcgaagtccggcatttggagcacgggtccggaggtgagggcggtcttgagtgcttggaatgctgctgttgcctcctcatcccacatgaacgcgtctcggcgcaggagacgcgtgagtggtgctgcaatcgtgccgaagtcgcggatgaatttgcggtagtagcccgcaaggcccaggaagccgcgtaggcccctggctgagctcggcgtcggccatgtggagacggctaccaccttagccgtgtccatggctaccccctccgcggagatcacatggccgaggtacgccacagatttttccccaaatgaacatttggagcgcttgacatgtagatggtgtgctcggagggcattgaggaccacgcccaggtgctgcaggtgttcggcccatgtggcactgtagattagtatatcgtcaaagaataccaggacgaacctgcggagatagggccgtagcacatcattcattagtgcctggaaggtcgctggggcgttggagaggccaaaaggcatcaccaagaattcatagtgaccctgatgtgtgcgaaaagcagtcttggcgatgtcatccgggtgcattcgcacctggtggtagcccgaccggaggtcgagcttagtgaagtagcgagctccatgcagttcatcgagcaattcctccacgacaggaatgggaaacttatccttagatgtcttggcgttgagggctcggaagtcgatgcagaaacgccatgagttgtcatgtttccggaccaagagcaccggagcagagaacggcgaggtgctgggccgaatgatgccttgagcaagcatggccgcacactggcgttccagttcgtccttctggagctgggggtatctgtagggggcgaaccgcgaccggaggagtgcctggaagaagatggatgcggtggtcgtacggccgaggtggaggcagcccggccggttcggtgaacaccacctcaaattgctggagcaggcgatccatgagtggctggccgggtgtggacggtatggcacaggaggtcggtgtgcgtgcctggcccctgcgcgagcacaagccagtccaccgcacggaccgggaagcccgcgtgaaagacatgcacatgtccttgaaattccacagtataggccccagagtgctgaggaactctacgcccaggatgagatcaaactcgccgaggttgatgccgtaacagttgacgcagaaagcttcggcgttgatggcgatctccacgttccgtgctacgccctggcacggcacgcgttccccgttagccaccatcacccgaagcgtggggcagggtttagtggctaatttgaggcggtgcatgatgtcgacgttgatgaagttggtcgtcgatcccgagtcgagaagcgccaccacccgatggccatgaatgatcaccggcaggagcatggcctgctcggtccggacccctgcaatagcgtgaagggataccgtcggtggagggtcggagtcctgcatggcgtccgcccctgggaccgcgggatgtccgggctcgccgtggttgaaggccccggcgtgatcctccggtgtgaacgtgtcgtcgacgtagtccgccgactccaggtagaagagacgctggcagacgtggccacggacatagggttcgtcacaattgtaacacaatccttgccgtcgacgttccatctgttccgctggtgtgagccggcggaactgtcgtgtcggagttgaggaacccgttgatggcggcgaacccgatgaaggtagcccgtgcggttgtcggggtggaccggacggcggtggtcgcgacgagctcctcccgccacgtactggaggaaacgtccctgggccagccacacggcgttcgaacgcccgtgccaagtgcatggctgtttgcaggttctggggttcgcgtagctcgacgtcgatccgtatgtggtcgggcagtcctcccacaaagagctccgccttctgggatgccgagaggttgtgtgcatggcacagcactgcattgaaacgctcggcgtagtcgtgcaccgtagagatgaacggcaaccgagcaagctccgacagcctcgtgccgcgcactgctggcccgaaacgtaaggtgcagagctcgcggaaacggccccaggctggcatgccttcgtcttgctcgagggcgtagtaccacgtctgggcggccccagtgagatggtacgatgccaaccaggtgcgatccgaggccggggtacgttggcctcggaagaactgctcacattggttgatccaattgagcgggtcgacggtgccatcatatgtcgggaaatcgagtttgtagaagcgaggtgtctggggaccgaggccgggtccctgtcccggcggaggtggcgcagtgtcgtgcgacatggccccctcaaattgtccccggccaccctggaccgagccgtagggtccaaggccgtcgacgcctccgaagttggcgccggtgccgtaaggtaggtgaaacatcgctggcaatggcatgccggccgctcccggcggtgtcggggacgtcgtcatcgtgtactgcggcgcgcccatggatgccatcacatatgatgggatcggtgatggtgacgccggcatggataacatgtgtatgggcactccttgtgttgctgtcgccccggtatggggaagggcatagagtggcggctgtggtgggggtatggtaggtgacggggctggctgggagtgcatggatcgcaggagaaaatcctgcatggctgccattgaccaggacagatcgtggaccgctgtggccacagattccagcgtgagtattggcggatgtgtggtggaaactggcggcgagatggtggtggacggccctggaacagtggaaggcgatggtggcggtgggtggctggtgaatggaggatcgctggacatagctgataccaggttgataggatttctattcctaccagggatctccctcaagctgtactggtgtactgctggaggttggcgggggactgggcgagagggacgccgggacgccgtgttcacggcgtgggaaaacaggctagctcaggttccggcttccacagggaagacggctaggtaatttctttgatgatccttcctcttgtcttacatctcctatttatactagcctctctctcaatagaaggcaacttatctcttaataaaaggaaactaatctctctgaataaaaggaagtttatctcta

SEQ ID NO: 2227 - DNA, 511 bp, Zea Mays
attttttttcttttcgttatttgagggggctgctttctctctgtttttcagttaacagagcgcaccatttccctaacgggcatcagggtgccgtcctacaaagtacaaaccctaccgaccatctcgtccaaagcaacagggtgccgtcctacaaagtacaaaccctactgaccatctcgtccaaagcaacactgacacccaatcttacttactgttatgacatgtttctggccatcaaccttgtctcttagattgccaagcgtcagcctatcgtctctcagctacaacgcggaggctaagtactacgatgtggtcaacagcgtggcggagacctcctaggtgcgccagcttctcgaggagctccacaaccctcttcagtggatcactctcgtctactgcgacaacgttagcatgatctacctctctactaatcccgttcagcatcagggcacgaagcacgtggagatcaacctgcacttcgcatacgaccgtgtcgccgccgatgatgttc

SEQ ID NO: 2228 - DNA, 1791 bp, Zea Mays
ggtggccttgtcgagctcgacgacctcggaggcaccccagcggtccagccgcatccacaggcgcgcgccgggcttcttcttggtgatcttccccgacaaggcacccccggcgcccgcggtgactgagaggggagagggcggctgggcggtctgccccgccgctgcagagtccggggtcgcggacggcgaggcggcggtgggggaggcgagaagagccctcgtcgcgttgtcctgcttggagggggaagggaggcgacgcccggagcgattccgcttggaggaggacgaggaggatctggtgaagaacggaagcttccggccgccggatcgcttccccatggcgttgcggcggcggcgtgccgcggcaccggcacggtccacgggggtgaatgggtcggacggcgggttctgtcgtcgtggtcgaactccaaatctgtggtagacgagtgggccggtcagggccaaccgctcgtgagaggaagccctaggatgctggtcggacggttgaaattgcgtgcagcgtcaacgcgccaagttgccgcgctggcgcttgccgcgaaagagagaccactatccagaagcgaagataatatcttcgtcttcccccttctcgccgatggctgcaacacccactgccgccgttttgctcgcgcgcccgctcatcgcactctccagtgctttcacctcccctcatcgtgcgcgggtgccgagcgatccctcctccatctcggtgccgccactgaggagtcgatggtgccagtggcgcggcccgctccgatcgctgccccccgaaggagctccggccgagctgatggaagaggactccaagtttgtgccgttgaacgcggacgatcccatgtacggcccaccggcgctactgctcatcggatttgagaaaggcgaaactgtcacggccttcctgaaagagcttgaaggtgaattcctcaaggtgatccattgtacagaggagatgacaaagcaaaccttatgggatgccatgcacactgagcagcctgatttggaagctgtcaagattgcaggaccactgccaaggatatgcatattttctggtctaactggcgaggagatgatgatgttcatcaacgccttcccagaaaccgggctggaagcagctgcctttgctgcgcttgtccctaacagtgcagagaaggttctcggcgaagtgatcgaggaaataatgggagaccatgagatgctgacaggaaaggactccaaatgagaagaatttgaagcacggacatgcctatcaagaaaattgtcactttgcattctgatatatggcatctaaatctgattcaaattgccgcaacaggaagctgggtatggaaaaaactgttcaagatagtgttgcagaagaaacatcagtttaatttttcttctgataaatacgggtccttttccatctggtcacctccagaatttgagctcctacttactgtatgtcgtacatataatatagtttatagtgaccaacaagttgctcatgactggccagcttttggactttgggggctttctgtccgttgacttttttctattgatttttataatattttatttagcttttcagtacataacaatctagagaggcttctctcagcgtgttttatagcttttagtttatttgtttactcaaaagtcagttgtccagatttttaaacgccaggtcaacatcttatggcttctggctaccagaaactattgaaacaaagctgagataaatattttgagacattcccaatgatggtctcaaaatgttttttttctttc

SEQ ID NO: 2229 - DNA, 1450 bp, Zea Mays
cccacgcgcgccccacgtgtgagactgagacgccagatccatccaacggttcgtgtcacaccacgccaaggccgcacgcaccgcggacgggtccacacgccagagactgaagctggcaggcataaactgtggggactggggagctcgttctctccgccggcccgctcactctccctggtctctcgtctcctccactccaagagaacaggcgccggcgaaaggcgggagcagcgcgctgcccattcaccgccccctgatttcttgggagttgcggatcggtctccggggcagcgtggaacggctgggcccctcggatcgccggagatgctgccctacgcgacggcggcggaggcggaggcggcgcttggccggcccatgacgcccgccgaggcgctgtggttccggtacaccgcgggggtgtccgactaccacctctactgctgcaacatcctcttcctcttcgtcgtcttcacggtggccccgcttcccatcgcgctcctcgagctccgggccccggccgcggtctcgccgtacaaactgcagccgcgggtgcggctctccagggccgagttcgtccggtgctacaaggacgtcctccgcatcttcttcctcgtcatcggcccgctccagctcgtctcctacccggcggtcaagttggcagcacagctactggtgtacttccttgttgaggactacctcaattactggatccacaggtttctccacggggagtgggggtaccagaatatccaccgtgttcaccatgagttcactgcgccaataggattcgcagctccatatgcacactgggctgaggtgctgatactcggcatcccctccttcgtcgggccagccattgttccaggccacatgatcacattctggctctggattatactccgtcaggtggaggctatcgagacacatagcggctttgatttcccattcaccccgacaaagtatattccattctatggaggagcagaataccatgactatcatcattatgtaggaggccagagccaaagcaattttgcttctgttttcacttactgtgattacttatatggcactgacaaaggttacagattccacaaaacatacctagcaaagctgaaggatctggggcataatgatggccagaaaggagacggcagcggacccagctatgtgaaactggattagattgcaagatatagtgcatcttgagtgtttctatggtcatcgacttcactgtggcatttcgaaatgggatattgctgagttgggctggtcacgtgtgttctcatttctgtagcaggcatacagctttcagctctgccttctttcttttttttttctagcgtttatgaaattctatggaacttgtacgctgacgaataacaacgcaactctcacgaataacaacgccaattcttaaagttcatcgagttcgctccgtgcttttatt

SEQ ID NO: 2230 - DNA, 700 bp, Zea Mays
cttgtattgctcagtctaagtggatcatgttggaaatttatccttcttcattcatacttagtggctgggaagtttttttgttatcttggatgtttctactcagtcaacattgtctcaagtctcaaactctcaacatatgccatttgctggagccctatgaccttgcaacacagagtatttagctttgatttcccattcaccccgacaaagtatattccattctatggaggagcagaataccatgactatcatcattatgtaggaggccagagccaaagcaattttgcttctgttttcacttactgtgattacttatatggcactgacaaaggttacagattccacaaaacatacctagcaaagctgaaggatctggggcataatgatggccagaaaggagacggcagcggacccagctatgtgaaactggattagattgcaagatatagtgcatcttgagtgtttctatggtcatcgacttcactgtggcatttcgaaatgggatattgctgagttgggctggtcacgtgtgttctcatttctgtagcaggcatacagctttcagctctgccttctttcttttttttttctagcgtttatgaaattctatggaacttgtacgctgacgaataacaacgcaactctcacgaataacaacgccaattcttaaagttcatcgagttcgctccgtgcttttatt

SEQ ID NO: 2231 - DNA, 1477 bp, Zea Mays
tttactgttgcatttacttttggggccgaaaccatgtccactcttagtagctagtacacttcacttgctcatcctgggccccaagcctccaaagttcgtccccatcaacatgttcctactctgcaggaccaacacctcacaacaggcctgatggcattctcacctcctataaaacgtcttgcagaactggacacgttcaatatatcaacacggtcaccaagtcctctccggatggcaaggccttgtgaccttccgccggtgcggcaagcagcggctcttctcctggcatgcgcgcttgctctgctcgcggtgcagctgcggccgtgcagagcccagcagcagcagcagcctccgtcgccgggatactaccccagcggcatgttcaggccgctgggcttctccgaggcctaccgcaccctgtggggcgcgcagcaccagacgctgtcgccggacggcaagtccctgacgctctggatggacagcagctcgggcagcgggttcaagtctgcgcgggcgtaccggaacggctacttcggcgcgtccgtcagggtgcagccggggtacaccgccggcgtcaacaccgccttctaccgaggagtacccggggcaccacgacgagatcgacatggagctgctggggacggtgccgggggagccgtacacgctgcagaccaacgtgtacgtgcgcggcagcggcgacggcaccatcgtcggccgggagatgcggttccacctctggttcgaccccaccgccgacttccaccactacgccatcatctggaaccccgaccagatcctgttcctggtggacgacgtgcccgtcaggcggtacgagaggaaggcggaggccacgttccctgaccgggagatgtgggcgtacggctccatctgggacgcctccgactgggccaccgacggcggccgctaccgcgccgactaccggtaccagccgttcgtgtcgcggttcgccggcctcagggtcggcgggtgcgccgcggacgcgtccgcggactgccagccagtgccggcgtctccggcggcgccggggacggcggcgatcagcgcgcagcaggaggccgccatgcggtgggcgcagcggaactccatggtgtattactactgcctcgactcaaccagggaccgcgcgctctaccccgagtgctgagacgctgcgctgcgctatacctacagactacagtggcgagctgagggtgtcagagctatatggaaccgcgagcacctcgcattcgcaacacaaacgtatatttgaatattacaacttggaagatgaaagacgatccaatctgatatagaattatcattgtcaggttgtgttctgaaaacaaaaatgaaattataattccatcgagagaatatcgaggtacagggagaacgggtgaatgtctgacgttacgtgttataaagtgatgtgcaatgatgactacaaactaaaaatatcagtggatgagcatagcag

SEQ ID NO: 2232 - DNA, 3941 bp, Zea Mays
ctactttatatttatattagtagagatatagatagtttgaaagaaaatatagatttggaaatcgtgaaaaaacagctatcactcttacaagttggagtgagactgatcatacgcttcttcgcgtgtaacctcaacggctcaacctcaccgtgctcccattctagtctcctctccacttcattacacatccccgcgaaatcccggacccgacgcgaccaaccaccttgttcagtgaccccctcccccgcgcgatccaccgccggcgcgcgtgtaccctaaccaccgtgcggatctgggagcagctggcggcgctccctcaaatggtccccggcggcgaggggccccccggaaggcagaacagctgagatgcgacgcgacgcggtgccgccacccaccgccccctcagcctcctcctcgtcatccctcttcagcggcggcggcggcgagcggctgttcgagtctgggcccagcccgctcgtcttccttcccctgctcctgatccagggcggtggcatggacctctctcgcgtcggcgagaaactcctcagctctgttcgctcggcccgctccctcggcctcccaccgatccccacggcgccccctccccgccctgaggttccagaacgagctgcggcggcagcagctgctgcacgtgcgatcgccgggttgccacctcacgagaggatcaacctgccatccaattcggaggacttggtctccatctatgggagcaacccccagggccaaccggtggaggagctcgaggaggtgttctatgaggaggagtttgatccaataaagtatattctgcaaagtattccggaggaaggaggtggcgatgccacctatttcgataagcagtctacattgagattagagcagcttgacaagattgcagaaagattagcacaccatgttatgggtcatcatgaagaaatggtgaaggggatgcagttagtgatggaattagaacatgacttaaaggttgcaaatgtaatctgcatgaatggacgaaggcatataacctcttcgaagaatgaggtgtcgagggatctggttgtcaatgtaaaatcaaaaaagaaacaagctttgctggatgttcttcctatccttacagagcttcgtcatgctctagacatgcagatggaacttgaaacttttgttgagaaagaaaattactttcaggcattccaattattgcctgaatatttgcaaattttggagaattattcaggcctttctgctgtacaagaaatgggacgtggtatagaggcatggttagttcggacaatccaaaaattggacacccatttacttggtgtttgtcatatctttgatgcagaaaactatctaactgttgttgatgcatatgcactaatgggtgatgtcagtggcatggctgaaaagatgcagagtttcttcttgcaggaagtgctgtctcgaacacactatgtcctgaaagaaatgttggaagaggaggttggaaataatacacagaaaaataggtttacatatagtgatctttgtgttcaaattcctgaacccaaacttcgcctctgcttgttgagaaccctagagtttttattttcattgatgtgctcatactatactattatgagcttttcttcaggagataagaatattgactccaagggccaagatgaagcatataaggatggcacatctcagaatagcagcgaaactttagttaatttaggaagaggtcattcaagtgcagcagtcactcaggatggttctgcagctgaaaaaattgacagagcatcatcatctgaggtcagcaaccctgatactagtacatcagaaacaggttctccattctatcagcttagaacagatgctacgaaacttgttgcacaaacatttcaaagagggcgaagaaatctttggcagctggcaacaagtcgcttatctgttctattatctagttcggctgtttgttcaactagcacataccaattcctgaagaattatgaagatcttgccatcttcattttggctggcgaagcattttgtggatttgaagctagtgagttccgccagaagttgaagactgtctgtttgaactacatggtgtcctttcaccggcaaaatgtatatgcacttaagatggtactggaaaaggagtcttggacaataatgtccgctgaagcttcacaaataattagtttagcaggtctaactggtgatggtgctgcactgtgctctcctaccagtagaagtcctaagttgccaataaattgttaccatgggacaactacagccaactcaggaaaggaaaagctcggatttgcttcttggcttgtgattgaaaatccattttcttttaagctagaaaatggctctgccgaatccccaaagtccaatatgcttgttgactcatcagctagcaataatcatggcaatggaaacaattcatctttagatgaagagaatgaagaccttttagcggatttcattgatgaagatagtcagttgcctagtaggacaccaaaagcgaaaatggtaaaaggcaattctttacattggaaagatggagacatttcatcacagacaggctcatcactttctctattaaggatgatggacaaatacgccaggctgatgcaaaagctggaaattgtcaatgttgagctttttaagggtatctcccaactatttggcatcttttaccactacatatatgagacatttgggaaccaagacaagagtcaaagcagcaagcctttgcctgatcatcaatcatctcggcttaaagccgctttatcaaaaataacacaagactctgatcagtggacaaagccaaatactgtttcatattcaccttcatcccctttgtcaaaaaattcaacttttggtcaaatggatgtgatgcctactgcacctcccagttcaatgttcacctcctatgggttaaaggagagatgtgcagctgctgaaacattatcattggttgctcgaattttgaaccgatctagagcccatctacactcagtattgtctaaaaataacagttctgttgttgaggagttctttaggacactggtggactctgttccagatttgacagagcacattcacagaacgagtgcgcgtatgcttttgcatattgatgggtatccagataagattgcgaatgctaaatgggaggtaaaggagcttggaatagagcacaatggatatgttgatttgttactgggcgagttcaaacactacaaaacaagattggaccatggaggaatttctagggagctccaacaccttctgctagagtacggcgtagagagcatatcggaagttctagtcgaaggtctctctagagtgaagaggtgcaccgatgaagggcgtgctctgatgtcactcgacctccaggtactaattaatgggctgcagcacatcgtggcatcaaatgtgaggccgaagctgcagaccgtggacactttcataaaggcttactatctaccggagaccgagtacgtccactgggcgcggtctcatccagaattcagtacaagtcaggtagtcgggttggttaacctggtggccaccatgaaagggtggagacggaagacgagactagaaaccgtggagaagatcgaggcggggccatagactcggtgacaggaataggagggaatccataggagaggaaaccccttcctattcaattttgaatagcaaggtgttttctcccccatagatctactccatttccctgatcatcaaatcagccattagaaccatttttttgttgaacccgtcgcccgctcacccatattgtatatttttaagcgttgaccctgtattatatcaagcgagttgacactcccaagaaggaaaagaactgtgcaccaccctacatggaacattggctcaataaatatggctcgttcaaaaaaataataataatatagcagcattag

SEQ ID NO: 2233 - DNA, 3660 bp, Zea Mays
tcattacacatccccgcgaaatcccggacccgacgcgaccaaccaccttgttcagtgaccccctcccccgcgcgatccaccgccggcgcgcgtgtaccctaaccaccgtgcggatctgggagcagctggcggcgctccctcaaatggtccccggcggcgaggggccccccggaaggcagaacagctgagatgcgacgcgacgcggtgccgccacccaccgccccctcagcctcctcctcgtcatccctcttcagcggcggcggcggcgagcggctgttcgagtctgggcccagcccgctcgtcttccttcccctgctcctgatccagggcggtggcatggacctctctcgcgtcggcgagaaactcctcagctctgttcgctcggcccgctccctcggcctcccaccgatccccacggcgccccctccccgccctgaggttccagaacgagctgcggcggcagcagctgctgcacgtgcgatcgccgggttgccacctcacgagaggatcaacctgccatccaattcggaggacttggtctccatctatgggagcaacccccagggccaaccggtggaggagctcgaggaggtgttctatgaggaggagtttgatccaataaagtatattctgcaaagtattccggaggaaggaggtggcgatgccacctatttcgataagcagtctacattgagattagagcagcttgacaagattgcagaaagattagcacaccatgttatgggtcatcatgaagaaatggtgaaggggatgcagttagtgatggaattagaacatgacttaaaggttgcaaatgtaatctgcatgaatggacgaaggcatataacctcttcgaagaatgaggtgtcgagggatctggttgtcaatgtaaaatcaaaaaagaaacaagctttgctggatgttcttcctatccttacagagcttcgtcatgctctagacatgcagatggaacttgaaacttttgttgagaaagaaaattactttcaggcattccaattattgcctgaatatttgcaaattttggagaattattcaggcctttctgctgtacaagaaatgggacgtggtatagaggcatggttagttcggacaatccaaaaattggacacccatttacttggtgtttgtcatatctttgatgcagaaaactatctaactgttgttgatgcatatgcactaatgggtgatgtcagtggcatggctgaaaagatgcagagtttcttcttgcaggaagtgctgtctcgaacacactatgtcctgaaagaaatgttggaagaggaggttggaaataatacacagaaaaataggtttacatatagtgatctttgtgttcaaattcctgaacccaaacttcgcctctgcttgttgagaaccctagagtttttattttcattgatgtgctcatactatactattatgagcttttcttcaggagataagaatattgactccaagggccaagatgaagcatataaggatggcacatctcagaatagcagcgaaactttagttaatttaggaagaggtcattcaagtgcagcagtcactcaggatggttctgcagctgaaaaaattgacagagcatcatcatctgaggtcagcaaccctgatactagtacatcagaaacaggttctccattctatcagcttagaacagatgctacgaaacttgttgcacaaacatttcaaagagggcgaagaaatctttggcagctggcaacaagtcgcttatctgttctattatctagttcggctgtttgttcaactagcacataccaattcctgaagaattatgaagatcttgccatcttcattttggctggcgaagcattttgtggatttgaagctagtgagttccgccagaagttgaagactgtctgtttgaactacatggtgtcctttcaccggcaaaatgtatatgcacttaagatggtactggaaaaggagtcttggacaataatgtccgctgaagcttcacaaataattagtttagcaggtctaactggtgatggtgctgcactgtgctctcctaccagtagaagtcctaagttgccaataaattgttaccatgggacaactacagccaactcaggaaaggaaaagctcggatttgcttcttggcttgtgattgaaaatccattttcttttaagctagaaaatggctctgccgaatccccaaagtccaatatgcttgttgactcatcagctagcaataatcatggcaatggaaacaattcatctttagatgaagagaatgaagaccttttagcggatttcattgatgaagatagtcagttgcctagtaggacaccaaaagcgaaaatggtaaaaggcaattctttacattggaaagatggagacatttcatcacagacaggctcatcactttctctattaaggatgatggacaaatacgccaggctgatgcaaaagctggaaattgtcaatgttgagctttttaagggtatctcccaactatttggcatcttttaccactacatatatgagacatttgggaaccaagacaagagtcaaagcagcaagcctttgcctgatcatcaatcatctcggcttaaagccgctttatcaaaaataacacaagactctgatcagtggacaaagccaaatactgtttcatattcaccttcatcccctttgtcaaaaaattcaacttttggtcaaatggatgtgatgcctactgcacctcccagttcaatgttcacctcctatgggttaaaggtatccagataagattgcgaatgctaaatgggaggtaaaggagcttggaatagagcacaatggatatgttgatttgttactgggcgagttcaaacactacaaaacaagattggaccatggaggaatttctagggagctccaacaccttctgctagagtacggcgtagagagcatatcggaagttctagtcgaaggtctctctagagtgaagaggtgcaccgatgaagggcgtgctctgatgtcactcgacctccaggtactaattaatgggctgcagcacatcgtggcatcaaatgtgaggccgaagctgcagaccgtggacactttcataaaggcttactatctaccggagaccgagtacgtccactgggcgcggtctcatccagaattcagtacaagtcaggtagtcgggttggttaacctggtggccaccatgaaagggtggagacggaagacgagactagaaaccgtggagaagatcgaggcggggccatagactcggtgacaggtttttttttttttttttttgctgtgttgtttgcttcagctgcacatagagctgtaatttcccccctcattttcttttggtttgatgacccaggaataggagggaatccataggagaggaaaccccttcctattcaattttgaatagcaaggtgttttctcccccatagatctactccatttccctgatcatcaaatcagccattagaaccatttttttgttgaacccgtcgcccgctcacccatattgtatatttttaagcgttgaccctgtattatatcaagcgagttgacactcccaagaaggaaaagaactgtgcaccaccctacatggaacattggctcaataaatatggctcgttcaaaaaaataataataatatagcagcattag

SEQ ID NO: 2234 - DNA, 2119 bp, Zea Mays
taatgaagatatctaatgctgctttagcctcatgaaggggatgcagttagtgatggaattagaacatgacttaaaggttgcaaatgtaatctgcatgaatggacgaaggcatataacctcttcgaagaatgaggtgtcgagggatctggttgtcaatgtaaaatcaaaaaagaaacaagctttgctggatgttcttcctatccttacagagcttcgtcatgctctagacatgcagatggaacttgaaacttttgttgagaaagaaaattactttcaggcattccaattattgcctgaatatttgcaaattttggagaattattcaggcctttctgctgtacaagaaatgggacgtggtatagaggcatggttagttcggacaatccaaaaattggacacccatttacttggtgtttgtcatatctttgatgcagaaaactatctaactgttgttgatgcatatgcactaatgggtgatgtcagtggcatggctgaaaagatgcagagtttcttcttgcaggaagtgctgtctcgaacacactatgtcctgaaagaaatgttggaagaggaggttggaaataatacacagaaaaataggtttacatatagtgatctttgtgttcaaattcctgaacccaaacttcgcctctgcttgttgagaaccctagagtttttattttcattgatgtgctcatactatactattatgagcttttcttcaggagataagaatattgactccaagggccaagatgaagcatataaggatggcacatctcagaatagcagcgaaactttagttaatttaggaagaggtcattcaagtgcagcagtcactcaggatggttctgcagctgaaaaaattgacagagcatcatcatctgaggtcagcaaccctgatactagtacatcagaaacaggttctccattctatcagcttagaacagatgctacgaaacttgttgcacaaacatttcaaagagggcgaagaaatctttggcagctggcaacaagtcgcttatctgttctattatctagttcggctgtttgttcaactagcacataccaattcctgaagaattatgaagatcttgccatcttcattttggctggcgaagcattttgtggatttgaagctagtgagttccgccagaagttgaagactgtctgtttgaactacatggtgtcctttcaccggcaaaatgtatatgcacttaagatggtactggaaaaggagtcttggacaataatgtccgctgaagcttcacaaataattagtttagcaggtctaactggtgatggtgctgcactgtgctctcctaccagtagaagtcctaagttgccaataaattgttaccatgggacaactacagccaactcaggaaaggaaaagctcggatttgcttcttggcttgtgattgaaaatccattttcttttaagctagaaaatggctctgccgaatccccaaagtccaatatgcttgttgactcatcagctagcaataatcatggcaatggaaacaattcatctttagatgaagagaatgaagaccttttagcggatttcattgatgaagatagtcagttgcctagtaggacaccaaaagcgaaaatggtaaaaggcaattctttacattggaaagatggagacatttcatcacagacaggctcatcactttctctattaaggatgatggacaaatacgccaggctgatgcaaaagctggaaattgtcaatgttgagctttttaagggtatctcccaactatttggcatcttttaccactacatatatgagacatttgggaaccaagacaagagtcaaagcagcaagcctttgcctgatcatcaatcatctcggcttaaagccgctttatcaaaaataacacaagactctgatcagtggacaaagccaaatactgtttcatattcaccttcatcccctttgtcaaaaaattcaacttttggtcaaatggatgtgatgcctactgcacctcccagttcaatgttcacctcctatgggttaaaggatttctgtattgttgctgccttactgccgtaattgaagtgatgatattgatagaaaggtttgagggaaaacccctaaccctaactgggt

SEQ ID NO: 2235 - DNA, 2025 bp, Zea Mays
ctgttcccaaccaatcgtgtagaccactaaaaatcaccatcctattttcgattgatgtcttgaggaggaaattattagtgacaatgtgacatagatgttcttcctatccttacagagcttcgtcatgctctagacatgcagatggaacttgaaacttttgttgagaaagaaaattactttcaggcattccaattattgcctgaatatttgcaaattttggagaattattcaggcctttctgctgtacaagaaatgggacgtggtatagaggcatggttagttcggacaatccaaaaattggacacccatttacttggtgtttgtcatatctttgatgcagaaaactatctaactgttgttgatgcatatgcactaatgggtgatgtcagtggcatggctgaaaagatgcagagtttcttcttgcaggaagtgctgtctcgaacacactatgtcctgaaagaaatgttggaagaggaggttggaaataatacacagaaaaataggtttacatatagtgatctttgtgttcaaattcctgaacccaaacttcgcctctgcttgttgagaaccctagagtttttattttcattgatgtgctcatactatactattatgagcttttcttcaggagataagaatattgactccaagggccaagatgaagcatataaggatggcacatctcagaatagcagcgaaactttagttaatttaggaagaggtcattcaagtgcagcagtcactcaggatggttctgcagctgaaaaaattgacagagcatcatcatctgaggtcagcaaccctgatactagtacatcagaaacaggttctccattctatcagcttagaacagatgctacgaaacttgttgcacaaacatttcaaagagggcgaagaaatctttggcagctggcaacaagtcgcttatctgttctattatctagttcggctgtttgttcaactagcacataccaattcctgaagaattatgaagatcttgccatcttcattttggctggcgaagcattttgtggatttgaagctagtgagttccgccagaagttgaagactgtctgtttgaactacatggtgtcctttcaccggcaaaatgtatatgcacttaagatggtactggaaaaggagtcttggacaataatgtccgctgaagcttcacaaataattagtttagcaggtctaactggtgatggtgctgcactgtgctctcctaccagtagaagtcctaagttgccaataaattgttaccatgggacaactacagccaactcaggaaaggaaaagctcggatttgcttcttggcttgtgattgaaaatccattttcttttaagctagaaaatggctctgccgaatccccaaagtccaatatgcttgttgactcatcagctagcaataatcatggcaatggaaacaattcatctttagatgaagagaatgaagaccttttagcggatttcattgatgaagatagtcagttgcctagtaggacaccaaaagcgaaaatggtaaaaggcaattctttacattggaaagatggagacatttcatcacagacaggctcatcactttctctattaaggatgatggacaaatacgccaggctgatgcaaaagctggaaattgtcaatgttgagctttttaagggtatctcccaactatttggcatcttttaccactacatatatgagacatttgggaaccaagacaagagtcaaagcagcaagcctttgcctgatcatcaatcatctcggcttaaagccgctttatcaaaaataacacaagactctgatcagtggacaaagccaaatactgtttcatattcaccttcatcccctttgtcaaaaaattcaacttttggtcaaatggatgtgatgcctactgcacctcccagttcaatgttcacctcctatgggttaaaggatttctgtattgttgctgccttactgccgtaattgaagtgatgatattgatagaaaggtttgagggaaaacccctaaccctaactgggt

SEQ ID NO: 2236 - DNA, 401 bp, Zea Mays
aggagaactgtttttttttttttttttttgctgtgttgtttgcttcagctgcacatagagctgtaatttcccccctcattttcttttggtttgatgacccaggaataggagggaatccataggagaggaaaccccttcctattcaattttgaatagcaaggtgttttctcccccatagatctactccatttccctgatcatcaaatcagccattagaaccatttttttgttgaacccgtcgcccgctcacccatattgtatatttttaagcgttgaccctgtattatatcaagcgagttgacactcccaagaaggaaaagaactgtgcaccaccctacatggaacattggctcaataaatatggctcgttcaaaaaaataataataatatagcagcattag

SEQ ID NO: 2237 - DNA, 3121 bp, Zea Mays
cttgcttttattagaaaattattagatcaggtttgcttttctttaatgctgcccaatatttcttgacttatcttgttcgagaaaagatttttatcagtcaattgacacatttctctattcgtgttcatgcatcacaagttatatctcttctcagtggttttgataattttagatttgcgtgcatagatgctcccaaattgaaggtgagtcaatctttgtaataccatcatggaaaaggcatatgattatcaattgacactttctctatcgtgttcatgcatcacaagttgctgatttgcagtgcagtttttccatgcagccatagttcgagaagcaaaaaaaacacgaagccccagagacatgaccataatagacagttatagaccccataagacaacgacccaatagagagctgaaatttttgaaattatctaaacccactgcagatataatgatgaaaaaacactgcacacatactacattgcttcgttcaaaatgatataaaaatactcttttcaaaagaaagcaagatgtaaactctaccattaattaattgctcattatgttgtctgtgccactaattctatactattttttcttaaactcttgtcaccttacacccactttgggagcaagttcatctgtaagaccatgcaaatcagtgttcatgaaaattttgtagagagtacaggttgtcatcaccttcacaatgtagagagtcactgttatctcgctttacttgatacttgtacatgaatattatatttgctagctacgttgtttcaagttaatgaataagtattcatcataattcatccatcaattattcttctccatttttaaaaatggtaactttactttgaatgcacatattttagaattatttggatgttttttcttgctatatttctaagtgaaaccagtttgttattagttgtgcaccgatgctaataattgtagtactgactctttactttttttaaaaaaatcctttaatcaaccatttattgtccaaatgtgaaatttgtgacaatgtaggaaagcttgaggatgaccacatataggctaaagctttggcaggtttattttcgctattctagaaaaaacttagtcagaattgattgcatgctgtttaaggcatgtttttctctcttctcaaaaaacaatctattttcccagaatatttgtatcccgactttttatcctacataaaacaacatgaaaaagaatacattgttccattgcaatttctagaaaacaaatcgagactgtcgttggcttgaagtactgaacttatcactcttgttcgtttgcctagggggactgaataaaattgaatagttcacagtggattcaactttagtcaagaccaatatgatcatcctcctatagtgtttctcattaaccacaaaatatgtaactgtaaatgtcccatttgtaacatatcctatgttttgtaaggtattcttggacattgtggattcacacatatcatctgacaattcatgcttgttcctgttcctcggaatgcataatgtgcatgtgcttgcaaatccaaggagtccataagggagaagttccttcgctgttcaatacttctttaataatatttagaatgtcaagtatttttctaataacatttaacatcttgatattcagtagcctacgctttgttgatgctatcatatcattaacttcaccgacactactaaaattaacaatatcagtaggtttttgaaatccagacaataacattgtactacattcattctaaatattcatatgacctttatttatgtagtgtcaagcttgtccaatcgtcatttatgcccgaaatcggtagaggtgtaccgcacgaggcgattatataatatgtattggatttcggtctgctagaccagtggtgttgttacctggcagactttagcatgaccccagggcatagagaacttcttagtttgatgctccgtatgctacgagattttccttgtgttatttttcagtagttgatgtagcccgttcttacacgtaaaatctaacataatcaatagataacgctatgaactgcctcgttgatgctattgatgcacattttaggtgtagttttatgaggatacaagatccttgtgtgtcgcttcaatagtattttgttaagatcaaccaggaggttcttgcctttcgattattctaagttctgagtaaggcttagatgcctgaattctttaggccattaataaaagtattgtattaccagtacatcatacaaacagatcatattgttcttggcatttttatatcataattgtgctttaatatatatgatgatacttgtacagaactacagatgtaacttcaataatatctttctgcacttggacaagttgatgatcagcagcgggattactaaattaggggacaacgaggtcttgctgctcatggagagtggtgtcaggataccctcgtgtgtatgcatttctgcagcgacaagagcaccaccacttcaggtttcaatctaaaactacgaaagcacattcatctcaagagacatgaagatgtccatatgctcagatatgacaggattatccttttccattgtgggtgtggcaataatgcacatttcataattttggatctccatgcacaaggaaacattcttctcatagattcagaacacatagtaatgacactacgttctcataggttgttgcctaattgataagttttcttagcatgtattaccatcgttgcagcagtattgactaataaggataagaaaatattagagttaacatgttgtcctgtgaccgctcccctgcctggccctcaacttcttcctcttcgtcgcctccatcaaggcgtcgctgatcaagttcctgtagggtgtgtgggtgcccattcttctgaccctcatcttgctcaccgtcatgttcgtgtggaaccacaccactatctagaagtatgagtatgacgcatacaataaggtgaccctggagtggttggtggcgctggacgacaagctgggcatagcacaacacaatgtgcgaaaacttgtttacaattttttacatttgaagcggtgataatgtaaaatttcttaataatttttacgtatgaatagttg

SEQ ID NO: 2238 - DNA, 2464 bp, Zea Mays
atatcccccaattcccccttcccctccaacggccaacggctgctcctcctcctctcaggctctcacaccaatccccactctccctccttccgtaattgcgtctctcaccacctcggcaactccaatcccaaacggccacaccctagctggtctggtggcatcggccggcacacggcgatgcctgccacggtcttcgcctccccctccatcgccgcgtcgccgtcgccgtcgctgtctccgtggtccccacgtccgcctcctcgtcgcgtccacgtccgtgtccgcgtccgcccgcccccgccgagaagcggaagcagcgggggcgacgagccctctactgccaccccgtgggcgagccccgactggctcacgtctctctcgcgcgcggtcggccggagcggcggcgacgactcggggatccccgtcgcgtccgccaagctcgatgatgtgcgggacctcctcggcggcgcgctcttcctgccgctcttcaagtggttccgcgaggaagggcccgtgtaccgccttgccgcggggccacaggactttgtcatcgtcagcgaccccgccgtcgccaggcacgtgctgcgtgggtacggctcgcgctacgctaagggactagtcgctgaagtctccgagttcctcttcggctccggcttcgccatcgcagaaggcgacttatggacggtgagacgcagagctgttgtgccttccctgcacaaaagatttctgtccattatcgtggacaaggtattttgtaaatgtgctgagagactaatagacaaacttgagccatatgctttgagtggggaacctgtcaatatggaagcgaggttttctcagttgacattggatgtgattggtttatcattgttcaactacaattttgattccctcacaacagatagtcctgtcattgatgctgtttatactgcactcaaagaagcagagcttcgttctacagatcttttgccatactggaaggttggtttcttgtgcaagataatcccaagacagataaaagcagagaatgcggttatgattataaggaacactgttgaagagctgattatgaagtgtaaagaaatagtggaagctgaaaatgaacagattgagggtgaggaatatgtaaacgaaggggatcctagcattctacgcttcctacttgctagccgagatgaggtaagcagtgtacaattacgtgatgatctcttgtcaatgttagttgctggtcatgaaacaacaggctctgtactgacgtggacaatctatcttctcagtaaggatccgactgcactgaggagagctcaagatgaagtagatcgtgttctacaaggtagactacccaaatatgaggatgtaaaggagctgaagtacttgatgcgctgtataaatgagtctatgcggctgtatccacaccctcctgtgctgttacggcgtgcaatagttgatgatgttcttcctggaaactataaggttaaggctggtcaagatattatgatatctgtgtacaatatacacaggtccccagaggtttgggatagagcagatgagttcattccagagaggtttgatttagagggacctgttccaaatgagtcaaacacagatttcaggtttattccattcagtgggggtcctcggaaatgtgttggagatcaatttgctctcctagaagcaatagtggcacttgcagttgtgttgcagaagatggatatgcagcttgtgccagatcaaaagattaacatgactactggagctacaattcatacaaccagtggactatatatgaatgtaagcctgcgtaaagttcagcaagaagctgagttagcgctgagcgaatcgaaatagatggaaacgacttcagacaagaatagagctcctgaactggatacaatcatacaaatatgaaatatgcttctccagtttctcgttgaaagctctactgtactatactagatgtcaatgcgtcggcatacagattacagattcgcttctcttgaaacatgaaaggatccttcgctggctgattcgtttggctattcgtgagtgtaaaatttatcttaggctttatttagatactcaagtattgacctcaatcaacatgtgttgatgtggatttggatgtaattagttcaaattacacctaaatccatctcaatactcaatacatgtggatttaggtcaatactagaatatccaaactaggtcttagtggtaatccaagaccgaacagaaacatgtttctacttagctgacggcggcacaaatatagtattagtgctagtttgggaacttaaatcccctcagtgattggagggattgaaaaagaaattagtttattttcccctaatcttctctaatcatagaggagatttgagtttccgaactagcccttacatacacatattttgtctggttttctccccgaaacataaatccagttttaagcctcattcatttattt

SEQ ID NO: 2239 - DNA, 2442 bp, Zea Mays
cccaattcccccttcccctccaacggccaacggctgctcctcctcctctcaggctctcacaccaatccccactctccctccttccgtaattgcgtctctcaccacctcggcaactccaatcccaaacggccacaccctagctggtctggtggcatcggccggcacacggcgatgcctgccacggtcttcgcctccccctccatcgccgcgtcgccgtcgccgtcgctgtctccgtggtccccacgtccgcctcctcgtcgcgtccacgtccgtgtccgcgtccgcccgcccccgccgagaagcggaagcagcgggggcgacgagccctctactgccaccccgtgggcgagccccgactggctcacgtctctctcgcgcgcggtcggccggagcggcggcgacgactcggggatccccgtcgcgtccgccaagctcgatgatgtgcgggacctcctcggcggcgcgctcttcctgccgctcttcaagtggttccgcgaggaagggcccgtgtaccgccttgccgcggggccacaggactttgtcatcgtcagcgaccccgccgtcgccaggcacgtgctgcgtgggtacggctcgcgctacgctaagggactagtcgctgaagtctccgagttcctcttcggctccggcttcgccatcgcagaaggcgacttatggacggtgagacgcagagctgttgtgccttccctgcacaaaagatttctgtccattatcgtggacaaggtattttgtaaatgtgctgagagactaatagacaaacttgagccatatgctttgagtggggaacctgtcaatatggaagcgaggttttctcagttgacattggatgtgattggtttatcattgttcaactacaattttgattccctcacaacagatagtcctgtcattgatgctgtttatactgcactcaaagaagcagagcttcgttctacagatcttttgccatactggaaggttggtttcttgtgcaagataatcccaagacagataaaagcagagaatgcggttatgattataaggaacactgttgaagagctgattatgaagtgtaaagaaatagtggaagctgaaaatgaacagattgagggtgaggaatatgtaaacgaaggggatcctagcattctacgcttcctacttgctagccgagatgaggtaagcagtgtacaattacgtgatgatctcttgtcaatgttagttgctggtcatgaaacaacaggctctgtactgacgtggacaatctatcttctcagtaaggatccgactgcactgaggagagctcaagatgaagtagatcgtgttctacaaggtagactacccaaatatgaggatgtaaaggagctgaagtacttgatgcgctgtataaatgagtctatgcggctgtgctgttacggcgtgcaatagttgatgatgttcttcctggaaactataaggttaaggctggtcaagatattatgatatctgtgtacaatatacacaggtccccagaggtttgggatagagcagatgagttcattccagagaggtttgatttagagggacctgttccaaatgagtcaaacacagatttcaggtttattccattcagtgggggtcctcggaaatgtgttggagatcaatttgctctcctagaagcaatagtggcacttgcagttgtgttgcagaagatggatatgcagcttgtgccagatcaaaagattaacatgactactggagctacaattcatacaaccagtggactatatatgaatgtaagcctgcgtaaagttcagcaagaagctgagttagcgctgagcgaatcgaaatagatggaaacgacttcagacaagaatagagctcctgaactggatacaatcatacaaatatgaaatatgcttctccagtttctcgttgaaagctctactgtactatactagatgtcaatgcgtcggcatacagattacagattcgcttctcttgaaacatgaaaggatccttcgctggctgattcgtttggctattcgtgagtgtaaaatttatcttaggctttatttagatactcaagtattgacctcaatcaacatgtgttgatgtggatttggatgtaattagttcaaattacacctaaatccatctcaatactcaatacatgtggatttaggtcaatactagaatatccaaactaggtcttagtggtaatccaagaccgaacagaaacatgtttctacttagctgacggcggcacaaatatagtattagtgctagtttgggaacttaaatcccctcagtgattggagggattgaaaaagaaattagtttattttcccctaatcttctctaatcatagaggagatttgagtttccgaactagcccttacatacacatattttgtctggttttctccccgaaacataaatccagttttaagcctcattcatttattt

SEQ ID NO: 2240 - DNA, 2225 bp, Zea Mays
cccaattcccccttcccctccaacggccaacggctgctcctcctcctctcaggctctcacaccaatccccactctccctccttccgtaattgcgtctctcaccacctcggcaactccaatcccaaacggccacaccctagctggtctggtggcatcggccggcacacggcgatgcctgccacggtcttcgcctccccctccatcgccgcgtcgccgtcgccgtcgctgtctccgtggtccccacgtccgcctcctcgtcgcgtccacgtccgtgtccgcgtccgcccgcccccgccgagaagcggaagcagcgggggcgacgagccctctactgccaccccgtgggcgagccccgactggctcacgtctctctcgcgcgcggtcggccggagcggcggcgacgactcggggatccccgtcgcgtccgccaagctcgatgatgtgcgggacctcctcggcggcgcgctcttcctgccgctcttcaagtggttccgcgaggaagggcccgtgtaccgccttgccgcggggccacaggactttgtcatcgtcagcgaccccgccgtcgccaggcacgtgctgcgtgggtacggctcgcgctacgctaagggactagtcgctgaagtctccgagttcctcttcggctccggcttcgccatcgcagaaggcgacttatggacgatagtcctgtcattgatgctgtttatactgcactcaaagaagcagagcttcgttctacagatcttttgccatactggaaggttggtttcttgtgcaagataatcccaagacagataaaagcagagaatgcggttatgattataaggaacactgttgaagagctgattatgaagtgtaaagaaatagtggaagctgaaaatgaacagattgagggtgaggaatatgtaaacgaaggggatcctagcattctacgcttcctacttgctagccgagatgaggtaagcagtgtacaattacgtgatgatctcttgtcaatgttagttgctggtcatgaaacaacaggctctgtactgacgtggacaatctatcttctcagtaaggatccgactgcactgaggagagctcaagatgaagtagatcgtgttctacaaggtagactacccaaatatgaggatgtaaaggagctgaagtacttgatgcgctgtataaatgagtctatgcggctgtgctgttacggcgtgcaatagttgatgatgttcttcctggaaactataaggttaaggctggtcaagatattatgatatctgtgtacaatatacacaggtccccagaggtttgggatagagcagatgagttcattccagagaggtttgatttagagggacctgttccaaatgagtcaaacacagatttcaggtttattccattcagtgggggtcctcggaaatgtgttggagatcaatttgctctcctagaagcaatagtggcacttgcagttgtgttgcagaagatggatatgcagcttgtgccagatcaaaagattaacatgactactggagctacaattcatacaaccagtggactatatatgaatgtaagcctgcgtaaagttcagcaagaagctgagttagcgctgagcgaatcgaaatagatggaaacgacttcagacaagaatagagctcctgaactggatacaatcatacaaatatgaaatatgcttctccagtttctcgttgaaagctctactgtactatactagatgtcaatgcgtcggcatacagattacagattcgcttctcttgaaacatgaaaggatccttcgctggctgattcgtttggctattcgtgagtgtaaaatttatcttaggctttatttagatactcaagtattgacctcaatcaacatgtgttgatgtggatttggatgtaattagttcaaattacacctaaatccatctcaatactcaatacatgtggatttaggtcaatactagaatatccaaactaggtcttagtggtaatccaagaccgaacagaaacatgtttctacttagctgacggcggcacaaatatagtattagtgctagtttgggaacttaaatcccctcagtgattggagggattgaaaaagaaattagtttattttcccctaatcttctctaatcatagaggagatttgagtttccgaactagcccttacatacacatattttgtctggttttctccccgaaacataaatccagttttaagcctcattcatttattt

SEQ ID NO: 2241 - DNA, 2369 bp, Zea Mays
cccaattcccccttcccctccaacggccaacggctgctcctcctcctctcaggctctcacaccaatccccactctccctccttccgtaattgcgtctctcaccacctcggcaactccaatcccaaacggccacaccctagctggtctggtggcatcggccggcacacggcgatgcctgccacggtcttcgcctccccctccatcgccgcgtcgccgtcgccgtcgctgtctccgtggtccccacgtccgcctcctcgtcgcgtccacgtccgtgtccgcgtccgcccgcccccgccgagaagcggaagcagcgggggcgacgagccctctactgccaccccgtgggcgagccccgactggctcacgtctctctcgcgcgcggtcggccggagcggcggcgacgactcggggatccccgtcgcgtccgccaagctcgatgatgtgcgggacctcctcggcggcgcgctcttcctgccgctcttcaagtggttccgcgaggaagggcccgtgtaccgccttgccgcggggccacaggactttgtcatcgtcagcgaccccgccgtcgccaggcacgtgctgcgtgggtacggctcgcgctacgctaagggactagtcgctgaagtctccgagttcctcttcggctccggcttcgccatcgcagaaggcgacttatggacggtgagacgcagagctgttgtgccttccctgcacaaaagatttctgtccattatcgtggacaaggtattttgtaaatgtgctgagagactaatagacaaacttgagccatatgctttgagtggggaacctgtcaatatggaagcgaggttttctcagttgacattggatgtgattggtttatcattgttcaactacaattttgattccctcacaacagatagtcctgtcattgatgctgtttatactgcactcaaagaagcagagcttcgttctacagatcttttgccatactggaaggttggtttcttgtgcaagataatcccaagacagataaaagcagagaatgcggttatgattataaggaacactgttgaagagctgattatgaagtgtaaagaaatagtggaagctgaaaatgaacagattgagggtgaggaatatgtaaacgaaggggatcctagcattctacgcttcctacttgctagccgagatgaggtaagcagtgtacaattacgtgatgatctcttgtcaatgttagttgctggtcatgaaacaacaggctctgtactgacgtggacaatctatcttctcagtaaggatccgactgcactgaggagagctcaagatgaagtagatcgtgttctacaaggtgctgttacggcgtgcaatagttgatgatgttcttcctggaaactataaggttaaggctggtcaagatattatgatatctgtgtacaatatacacaggtccccagaggtttgggatagagcagatgagttcattccagagaggtttgatttagagggacctgttccaaatgagtcaaacacagatttcaggtttattccattcagtgggggtcctcggaaatgtgttggagatcaatttgctctcctagaagcaatagtggcacttgcagttgtgttgcagaagatggatatgcagcttgtgccagatcaaaagattaacatgactactggagctacaattcatacaaccagtggactatatatgaatgtaagcctgcgtaaagttcagcaagaagctgagttagcgctgagcgaatcgaaatagatggaaacgacttcagacaagaatagagctcctgaactggatacaatcatacaaatatgaaatatgcttctccagtttctcgttgaaagctctactgtactatactagatgtcaatgcgtcggcatacagattacagattcgcttctcttgaaacatgaaaggatccttcgctggctgattcgtttggctattcgtgagtgtaaaatttatcttaggctttatttagatactcaagtattgacctcaatcaacatgtgttgatgtggatttggatgtaattagttcaaattacacctaaatccatctcaatactcaatacatgtggatttaggtcaatactagaatatccaaactaggtcttagtggtaatccaagaccgaacagaaacatgtttctacttagctgacggcggcacaaatatagtattagtgctagtttgggaacttaaatcccctcagtgattggagggattgaaaaagaaattagtttattttcccctaatcttctctaatcatagaggagatttgagtttccgaactagcccttacatacacatattttgtctggttttctccccgaaacataaatccagttttaagcctcattcatttattt

SEQ ID NO: 2242 - DNA, 2237 bp, Zea Mays
attcccccttcccctccaacggccaacggctgctcctcctcctctcaggctctcacaccaatccccactctccctccttccgtaattgcgtctctcaccacctcggcaactccaatcccaaacggccacaccctagctggtctggtggcatcggccggcacacggcgatgcctgccacggtcttcgcctccccctccatcgccgcgtcgccgtcgccgtcgctgtctccgtggtccccacgtccgcctcctcgtcgcgtccacgtccgtgtccgcgtccgcccgcccccgccgagaagcggaagcagcgggggcgacgagccctctactgccaccccgtgggcgagccccgactggctcacgtctctctcgcgcgcggtcggccggagcggcggcgacgactcggggatccccgtcgcgtccgccaagctcgatgatgtgcgggacctcctcggcggcgcgctcttcctgccgctcttcaagtggttccgcgaggaagggcccgtgtaccgccttgccgcggggccacaggactttgtcatcgtcagcgaccccgccgtcgccaggcacgtgctgcgtgggtacggctcgcgctacgctaagggactagtcgctgaagtctccgagttcctcttcggctccggcttcgccatcgcagaaggcgacttatggacgatagtcctgtcattgatgctgtttatactgcactcaaagaagcagagcttcgttctacagatcttttgccatactggaaggttggtttcttgtgcaagataatcccaagacagataaaagcagagaatgcggttatgattataaggaacactgttgaagagctgattatgaagtgtaaagaaatagtggaagctgaaaatgaacagattgagggtgaggaatatgtaaacgaaggggatcctagcattctacgcttcctacttgctagccgagatgaggtaagcagtgtacaattacgtgatgatctcttgtcaatgttagttgctggtcatgaaacaacaggctctgtactgacgtggacaatctatcttctcagtaaggatccgactgcactgaggagagctcaagatgaagtagatcgtgttctacaaggtagactacccaaatatgaggatgtaaaggagctgaagtacttgatgcgctgtataaatgagtctatgcggctgtatccacaccctcctgtgctgttacggcgtgcaatagttgatgatgttcttcctggaaactataaggttaaggctggtcaagatattatgatatctgtgtacaatatacacaggtccccagaggtttgggatagagcagatgagttcattccagagaggtttgatttagagggacctgttccaaatgagtcaaacacagatttcaggtttattccattcagtgggggtcctcggaaatgtgttggagatcaatttgctctcctagaagcaatagtggcacttgcagttgtgttgcagaagatggatatgcagcttgtgccagatcaaaagattaacatgactactggagctacaattcatacaaccagtggactatatatgaatgtaagcctgcgtaaagttcagcaagaagctgagttagcgctgagcgaatcgaaatagatggaaacgacttcagacaagaatagagctcctgaactggatacaatcatacaaatatgaaatatgcttctccagtttctcgttgaaagctctactgtactatactagatgtcaatgcgtcggcatacagattacagattcgcttctcttgaaacatgaaaggatccttcgctggctgattcgtttggctattcgtgagtgtaaaatttatcttaggctttatttagatactcaagtattgacctcaatcaacatgtgttgatgtggatttggatgtaattagttcaaattacacctaaatccatctcaatactcaatacatgtggatttaggtcaatactagaatatccaaactaggtcttagtggtaatccaagaccgaacagaaacatgtttctacttagctgacggcggcacaaatatagtattagtgctagtttgggaacttaaatcccctcagtgattggagggattgaaaaagaaattagtttattttcccctaatcttctctaatcatagaggagatttgagtttccgaactagcccttacatacacatattttgtctggttttctccccgaaacataaatccagttttaagcctcattcatttattt

SEQ ID NO: 2243 - DNA, 2113 bp, Zea Mays
ctcctcctctcaggctctcacaccaatccccactctccctccttccgtaattgcgtctctcaccacctcggcaactccaatcccaaacggccacaccctagctggtctggtggcatcggccggcacacggcgatgcctgccacggtcttcgcctccccctccatcgccgcgtcgccgtcgccgtcgctgtctccgtggtccccacgtccgcctcctcgtcgcgtccacgtccgtgtccgcgtccgcccgcccccgccgagaagcggaagcagcgggggcgacgagccctctactgccaccccgtgggcgagccccgactggctcacgtctctctcgcgcgcggtcggccggagcggcggcgacgactcggggatccccgtcgcgtccgccaagctcgatgatgtgcgggacctcctcggcggcgcgctcttcctgccgctcttcaagtggttccgcgaggaagggcccgtgtaccgccttgccgcggggccacaggactttgtcatcgtcagcgaccccgccgtcgccaggcacgtgctgcgtgggtacggctcgcgctacgctaagggactagtcgctgaagtctccgagttcctcttcggctccggcttcgccatcgcagaaggcgacttatggacgatagtcctgtcattgatgctgtttatactgcactcaaagaagcagagcttcgttctacagatcttttgccatactggaaggttggtttcttgtgcaagataatcccaagacagataaaagcagagaatgcggttatgattataaggaacactgttgaagagctgattatgaagtgtaaagaaatagtggaagctgaaaatgaacagattgagggtgaggaatatgtaaacgaaggggatcctagcattctacgcttcctacttgctagccgagatgaggtaagcagtgtacaattacgtgatgatctcttgtcaatgttagttgctggtcatgaaacaacaggctctgtactgacgtggacaatctatcttctcagtaaggatccgactgcactgaggagagctcaagatgaagtagatcgtgttctacaaggtgctgttacggcgtgcaatagttgatgatgttcttcctggaaactataaggttaaggctggtcaagatattatgatatctgtgtacaatatacacaggtccccagaggtttgggatagagcagatgagttcattccagagaggtttgatttagagggacctgttccaaatgagtcaaacacagatttcaggtttattccattcagtgggggtcctcggaaatgtgttggagatcaatttgctctcctagaagcaatagtggcacttgcagttgtgttgcagaagatggatatgcagcttgtgccagatcaaaagattaacatgactactggagctacaattcatacaaccagtggactatatatgaatgtaagcctgcgtaaagttcagcaagaagctgagttagcgctgagcgaatcgaaatagatggaaacgacttcagacaagaatagagctcctgaactggatacaatcatacaaatatgaaatatgcttctccagtttctcgttgaaagctctactgtactatactagatgtcaatgcgtcggcatacagattacagattcgcttctcttgaaacatgaaaggatccttcgctggctgattcgtttggctattcgtgagtgtaaaatttatcttaggctttatttagatactcaagtattgacctcaatcaacatgtgttgatgtggatttggatgtaattagttcaaattacacctaaatccatctcaatactcaatacatgtggatttaggtcaatactagaatatccaaactaggtcttagtggtaatccaagaccgaacagaaacatgtttctacttagctgacggcggcacaaatatagtattagtgctagtttgggaacttaaatcccctcagtgattggagggattgaaaaagaaattagtttattttcccctaatcttctctaatcatagaggagatttgagtttccgaactagcccttacatacacatattttgtctggttttctccccgaaacataaatccagttttaagcctcattcatttattt

SEQ ID NO: 2244 - DNA, 2430 bp, Zea Mays
cctctcaggctctcacaccaatccccactctccctccttccgtaattgcgtctctcaccacctcggcaactccaatcccaaacggccacaccctagctggtctggtggcatcggccggcacacggcgatgcctgccacggtcttcgcctccccctccatcgccgcgtcgccgtcgccgtcgctgtctccgtggtccccacgtccgcctcctcgtcgcgtccacgtccgtgtccgcgtccgcccgcccccgccgagaagcggaagcagcgggggcgacgagccctctactgccaccccgtgggcgagccccgactggctcacgtctctctcgcgcgcggtcggccggagcggcggcgacgactcggggatccccgtcgcgtccgccaagctcgatgatgtgcgggacctcctcggcggcgcgctcttcctgccgctcttcaagtggttccgcgaggaagggcccgtgtaccgccttgccgcggggccacaggactttgtcatcgtcagcgaccccgccgtcgccaggcacgtgctgcgtgggtacggctcgcgctacgctaagggactagtcgctgaagtctccgagttcctcttcggctccggcttcgccatcgcagaaggcgacttatggacggtgagacgcagagctgttgtgccttccctgcacaaaagatttctgtccattatcgtggacaaggtattttgtaaatgtgctgagagactaatagacaaacttgagccatatgctttgagtggggaacctgtcaatatggaagcgaggttttctcagttgacattggatgtgattggtttatcattgttcaactacaattttgattccctcacaacagatagtcctgtcattgatgctgtttatactgcactcaaagaagcagagcttcgttctacagatcttttgccatactggaaggttggtttcttgtgcaagataatcccaagacagataaaagcagagaatgcggttatgattataaggaacactgttgaagagctgattatgaagtgtaaagaaatagtggaagctgaaaatgaacagattgagggtgaggaatatgtaaacgaaggggatcctagcattctacgcttcctacttgctagccgagatgaggtaagcagtgtacaattacgtgatgatctcttgtcaatgttagttgctggtcatgaaacaacaggctctgtactgacgtggacaatctatcttctcagtaagtgttacactactgaaggatccgactgcactgaggagagctcaagatgaagtagatcgtgttctacaaggtagactacccaaatatgaggatgtaaaggagctgaagtacttgatgcgctgtataaatgagtctatgcggctgtatccacaccctcctgtgctgttacggcgtgcaatagttgatgatgttcttcctggaaactataaggttaaggctggtcaagatattatgatatctgtgtacaatatacacaggtccccagaggtttgggatagagcagatgagttcattccagagaggtttgatttagagggacctgttccaaatgagtcaaacacagatttcaggtttattccattcagtgggggtcctcggaaatgtgttggagatcaatttgctctcctagaagcaatagtggcacttgcagttgtgttgcagaagatggatatgcagcttgtgccagatcaaaagattaacatgactactggagctacaattcatacaaccagtggactatatatgaatgtaagcctgcgtaaagttcagcaagaagctgagttagcgctgagcgaatcgaaatagatggaaacgacttcagacaagaatagagctcctgaactggatacaatcatacaaatatgaaatatgcttctccagtttctcgttgaaagctctactgtactatactagatgtcaatgcgtcggcatacagattacagattcgcttctcttgaaacatgaaaggatccttcgctggctgattcgtttggctattcgtgagtgtaaaatttatcttaggctttatttagatactcaagtattgacctcaatcaacatgtgttgatgtggatttggatgtaattagttcaaattacacctaaatccatctcaatactcaatacatgtggatttaggtcaatactagaatatccaaactaggtcttagtggtaatccaagaccgaacagaaacatgtttctacttagctgacggcggcacaaatatagtattagtgctagtttgggaacttaaatcccctcagtgattggagggattgaaaaagaaattagtttattttcccctaatcttctctaatcatagaggagatttgagtttccgaactagcccttacatacacatattttgtctggttttctccccgaaacataaatccagttttaagcctcattcatttattt

SEQ ID NO: 2245 - DNA, 2376 bp, Zea Mays
cctctcaggctctcacaccaatccccactctccctccttccgtaattgcgtctctcaccacctcggcaactccaatcccaaacggccacaccctagctggtctggtggcatcggccggcacacggcgatgcctgccacggtcttcgcctccccctccatcgccgcgtcgccgtcgccgtcgctgtctccgtggtccccacgtccgcctcctcgtcgcgtccacgtccgtgtccgcgtccgcccgcccccgccgagaagcggaagcagcgggggcgacgagccctctactgccaccccgtgggcgagccccgactggctcacgtctctctcgcgcgcggtcggccggagcggcggcgacgactcggggatccccgtcgcgtccgccaagctcgatgatgtgcgggacctcctcggcggcgcgctcttcctgccgctcttcaagtggttccgcgaggaagggcccgtgtaccgccttgccgcggggccacaggactttgtcatcgtcagcgaccccgccgtcgccaggcacgtgctgcgtgggtacggctcgcgctacgctaagggactagtcgctgaagtctccgagttcctcttcggctccggcttcgccatcgcagaaggcgacttatggacggtgagacgcagagctgttgtgccttccctgcacaaaagatttctgtccattatcgtggacaaggtattttgtaaatgtgctgagagactaatagacaaacttgagccatatgctttgagtggggaacctgtcaatatggaagcgaggttttctcagttgacattggatgtgattggtttatcattgttcaactacaattttgattccctcacaacagatagtcctgtcattgatgctgtttatactgcactcaaagaagcagagcttcgttctacagatcttttgccatactggaaggttggtttcttgtgcaagataatcccaagacagataaaagcagagaatgcggttatgattataaggaacactgttgaagagctgattatgaagtgtaaagaaatagtggaagctgaaaatgaacagattgagggtgaggaatatgtaaacgaaggggatcctagcattctacgcttcctacttgctagccgagatgaggtaagcagtgtacaattacgtgatgatctcttgtcaatgttagttgctggtcatgaaacaacaggctctgtactgacgtggacaatctatcttctcagtaaggatccgactgcactgaggagagctcaagatgaagtagatcgtgttctacaaggtagactacccaaatatgaggatgtaaaggagctgaagtacttgatgcgctgtgctgttacggcgtgcaatagttgatgatgttcttcctggaaactataaggttaaggctggtcaagatattatgatatctgtgtacaatatacacaggtccccagaggtttgggatagagcagatgagttcattccagagaggtttgatttagagggacctgttccaaatgagtcaaacacagatttcaggtttattccattcagtgggggtcctcggaaatgtgttggagatcaatttgctctcctagaagcaatagtggcacttgcagttgtgttgcagaagatggatatgcagcttgtgccagatcaaaagattaacatgactactggagctacaattcatacaaccagtggactatatatgaatgtaagcctgcgtaaagttcagcaagaagctgagttagcgctgagcgaatcgaaatagatggaaacgacttcagacaagaatagagctcctgaactggatacaatcatacaaatatgaaatatgcttctccagtttctcgttgaaagctctactgtactatactagatgtcaatgcgtcggcatacagattacagattcgcttctcttgaaacatgaaaggatccttcgctggctgattcgtttggctattcgtgagtgtaaaatttatcttaggctttatttagatactcaagtattgacctcaatcaacatgtgttgatgtggatttggatgtaattagttcaaattacacctaaatccatctcaatactcaatacatgtggatttaggtcaatactagaatatccaaactaggtcttagtggtaatccaagaccgaacagaaacatgtttctacttagctgacggcggcacaaatatagtattagtgctagtttgggaacttaaatcccctcagtgattggagggattgaaaaagaaattagtttattttcccctaatcttctctaatcatagaggagatttgagtttccgaactagcccttacatacacatattttgtctggttttctccccgaaacataaatccagttttaagcctcattcatttattt

SEQ ID NO: 2246 - DNA, 2348 bp, Zea Mays
cctctcaggctctcacaccaatccccactctccctccttccgtaattgcgtctctcaccacctcggcaactccaatcccaaacggccacaccctagctggtctggtggcatcggccggcacacggcgatgcctgccacggtcttcgcctccccctccatcgccgcgtcgccgtcgccgtcgctgtctccgtggtccccacgtccgcctcctcgtcgcgtccacgtccgtgtccgcgtccgcccgcccccgccgagaagcggaagcagcgggggcgacgagccctctactgccaccccgtgggcgagccccgactggctcacgtctctctcgcgcgcggtcggccggagcggcggcgacgactcggggatccccgtcgcgtccgccaagctcgatgatgtgcgggacctcctcggcggcgcgctcttcctgccgctcttcaagtggttccgcgaggaagggcccgtgtaccgccttgccgcggggccacaggactttgtcatcgtcagcgaccccgccgtcgccaggcacgtgctgcgtgggtacggctcgcgctacgctaagggactagtcgctgaagtctccgagttcctcttcggctccggcttcgccatcgcagaaggcgacttatggacggtgagacgcagagctgttgtgccttccctgcacaaaagatttctgtccattatcgtggacaaggtattttgtaaatgtgctgagagactaatagacaaacttgagccatatgctttgagtggggaacctgtcaatatggaagcgaggttttctcagttgacattggatgtgattggtttatcattgttcaactacaattttgattccctcacaacagatagtcctgtcattgatgctgtttatactgcactcaaagaagcagagcttcgttctacagatcttttgccatactggaaggttggtttcttgtgcaagataatcccaagacagataaaagcagagaatgcggttatgattataaggaacactgttgaagagctgattatgaagtgtaaagaaatagtggaagctgaaaatgaacagattgagggtgaggaatatgtaaacgaaggggatcctagcattctacgcttcctacttgctagccgagatgaggtaagcagtgtacaattacgtgatgatctcttgtcaatgttagttgctggtcatgaaacaacaggctctgtactgacgtggacaatctatcttctcagtaaggatccgactgcactgaggagagctcaagatgaagtagatcgtgttctacaaggtagactacccaaatatgaggatgtgctgttacggcgtgcaatagttgatgatgttcttcctggaaactataaggttaaggctggtcaagatattatgatatctgtgtacaatatacacaggtccccagaggtttgggatagagcagatgagttcattccagagaggtttgatttagagggacctgttccaaatgagtcaaacacagatttcaggtttattccattcagtgggggtcctcggaaatgtgttggagatcaatttgctctcctagaagcaatagtggcacttgcagttgtgttgcagaagatggatatgcagcttgtgccagatcaaaagattaacatgactactggagctacaattcatacaaccagtggactatatatgaatgtaagcctgcgtaaagttcagcaagaagctgagttagcgctgagcgaatcgaaatagatggaaacgacttcagacaagaatagagctcctgaactggatacaatcatacaaatatgaaatatgcttctccagtttctcgttgaaagctctactgtactatactagatgtcaatgcgtcggcatacagattacagattcgcttctcttgaaacatgaaaggatccttcgctggctgattcgtttggctattcgtgagtgtaaaatttatcttaggctttatttagatactcaagtattgacctcaatcaacatgtgttgatgtggatttggatgtaattagttcaaattacacctaaatccatctcaatactcaatacatgtggatttaggtcaatactagaatatccaaactaggtcttagtggtaatccaagaccgaacagaaacatgtttctacttagctgacggcggcacaaatatagtattagtgctagtttgggaacttaaatcccctcagtgattggagggattgaaaaagaaattagtttattttcccctaatcttctctaatcatagaggagatttgagtttccgaactagcccttacatacacatattttgtctggttttctccccgaaacataaatccagttttaagcctcattcatttattt

SEQ ID NO: 2247 - DNA, 2028 bp, Zea Mays
cctctcaggctctcacaccaatccccactctccctccttccgtaattgcgtctctcaccacctcggcaactccaatcccaaacggccacaccctagctggtctggtggcatcggccggcacacggcgatgcctgccacggtcttcgcctccccctccatcgccgcgtcgccgtcgccgtcgctgtctccgtggtccccacgtccgcctcctcgtcgcgtccacgtccgtgtccgcgtccgcccgcccccgccgagaagcggaagcagcgggggcgacgagccctctactgccaccccgtgggcgagccccgactggctcacgtctctctcgcgcgcggtcggccggagcggcggcgacgactcggggatccccgtcgcgtccgccaagctcgatgatgtgcgggacctcctcggcggcgcgctcttcctgccgctcttcaagtggttccgcgaggaagggcccgtgtaccgccttgccgcggggccacaggactttgtcatcgtcagcgaccccgccgtcgccaggcacgtgctgcgtgggtacggctcgcgctacgctaagggactagtcgctgaagtctccgagttcctcttcggctccggcttcgccatcgcagaaggcgacttatggacggttggtttcttgtgcaagataatcccaagacagataaaagcagagaatgcggttatgattataaggaacactgttgaagagctgattatgaagtgtaaagaaatagtggaagctgaaaatgaacagattgagggtgaggaatatgtaaacgaaggggatcctagcattctacgcttcctacttgctagccgagatgaggtaagcagtgtacaattacgtgatgatctcttgtcaatgttagttgctggtcatgaaacaacaggctctgtactgacgtggacaatctatcttctcagtaaggatccgactgcactgaggagagctcaagatgaagtagatcgtgttctacaaggtgctgttacggcgtgcaatagttgatgatgttcttcctggaaactataaggttaaggctggtcaagatattatgatatctgtgtacaatatacacaggtccccagaggtttgggatagagcagatgagttcattccagagaggtttgatttagagggacctgttccaaatgagtcaaacacagatttcaggtttattccattcagtgggggtcctcggaaatgtgttggagatcaatttgctctcctagaagcaatagtggcacttgcagttgtgttgcagaagatggatatgcagcttgtgccagatcaaaagattaacatgactactggagctacaattcatacaaccagtggactatatatgaatgtaagcctgcgtaaagttcagcaagaagctgagttagcgctgagcgaatcgaaatagatggaaacgacttcagacaagaatagagctcctgaactggatacaatcatacaaatatgaaatatgcttctccagtttctcgttgaaagctctactgtactatactagatgtcaatgcgtcggcatacagattacagattcgcttctcttgaaacatgaaaggatccttcgctggctgattcgtttggctattcgtgagtgtaaaatttatcttaggctttatttagatactcaagtattgacctcaatcaacatgtgttgatgtggatttggatgtaattagttcaaattacacctaaatccatctcaatactcaatacatgtggatttaggtcaatactagaatatccaaactaggtcttagtggtaatccaagaccgaacagaaacatgtttctacttagctgacggcggcacaaatatagtattagtgctagtttgggaacttaaatcccctcagtgattggagggattgaaaaagaaattagtttattttcccctaatcttctctaatcatagaggagatttgagtttccgaactagcccttacatacacatattttgtctggttttctccccgaaacataaatccagttttaagcctcattcatttattt

SEQ ID NO: 2248 - DNA, 423 bp, Zea Mays
gggagtagggcgcggcttagggaaggagaggaggcgggagaaaagtggcggcggccagcaggagagagggcgtgcgcggcaaggttaccagccagggagcggcggcgtctgtgcagagggagcagggcgcggcttagggaaggagaggaggcggccggccgctgggccaaacgggccggctagggttagatagattaggttttgttttttttctttttcttttccttttttttaaatttcgaaatacctatttaaataaccataaaaattcataatattcaaccaaccctattcataattaagatatttattttgagactaataattatcatatcaattatgtgaatttttatttaagaagaaatgatacttaatatttaaaatgagcatctcaaaaatcattccaaatgaaacaaacacttc

SEQ ID NO: 2249 - DNA, 944 bp, Zea Mays
ggaagaggcattggtcggacccgcgtggttctcccgtgtcctctctctctagtgtcgacgagtgggcgaacgccgccaccgccttacgccagtcgccaggcgctcaggttttcatcttcgggcccttcaccggcgaccagcacccaacagttacatgtgcatcaggctttgatgattgctgtacaaggatgatatggcctcccgcccaaagctgtctggtattcagaagcaggttttggcgctgtacaggggattccttcggacagcacgccttaaggcccctgaagaacgccgcaggatcgagtctgttgtctttgcagagttccgtgacaacgcaaggagtgttgaccgtaggaactttgtacacatagagtacttgttgaggagagggaagaagcagcttgagcagctcaagaatcctgatattactggactcgctacccttgtagtaaagaaatgaggtccattcattgccagaacaaagtatcatcatgataccggtgtttctaatgtgaagatttggaacctgccactgatggtgtccaaataaaataaatatgaccacagattacagatttgatatccagggactttctaatcagcctattagaatctgaagataaatcttgtagcacctgtccggtgacccatagtaatattattttactcttgctgtaagcagaggttaacactaaaaaaagtattgtgattggtctgaactttttgtgcggtataaagcatgtgattcagctcaacttgacttttccaactttaccgagcatatacaattgtgattaatatagaggctcttaaggtgtttaaatgtgctatttacaaaaaaaaatcgtagagtcgtctatgaatttatcgtctgttttatcgatctaatgttgtatatgtgtatttacttctgtatttattaatagattatatttatagacacg

SEQ ID NO: 2250 - DNA, 927 bp, Zea Mays
aagaggcattggtcggacccgcgtggttctcccgtgtcctctctctctagtgtcgacgagtgggcgaacgccgccaccgccttacgccagtcgccaggcgctcaggttttcatcttcgggcccttcaccggcgaccagcacccaacaggctttgatgattgctgtacaaggatgatatggcctcccgcccaaagctgtctggtattcagaagcaggttttggcgctgtacaggggattccttcggacagcacgccttaaggcccctgaagaacgccgcaggatcgagtctgttgtctttgcagagttccgtgacaacgcaaggagtgttgaccgtaggaactttgtacacatagagtacttgttgaggagagggaagaagcagcttgagcagctcaagaatcctgatattactggactcgctacccttgtagtaaagaaatgaggtccattcattgccagaacaaagtatcatcatgataccggtgtttctaatgtgaagatttggaacctgccactgatggtgtccaaataaaataaatatgaccacagattacagatttgatatccagggactttctaatcagcctattagaatctgaagataaatcttgtagcacctgtccggtgacccatagtaatattattttactcttgctgtaagcagaggttaacactaaaaaaagtattgtgattggtctgaactttttgtgcggtataaagcatgtgattcagctcaacttgacttttccaactttaccgagcatatacaattgtgattaatatagaggctcttaaggtgtttaaatgtgctatttacaaaaaaaaatcgtagagtcgtctatgaatttatcgtctgttttatcgatctaatgttgtatatgtgtatttacttctgtatttattaatagattatatttatagacacg

SEQ ID NO: 2251 - DNA, 928 bp, Zea Mays
cgtggttctcccgtgtcctctctctctagtgtcgacgagtgggcgaacgccgccaccgccttacgccagtcgccaggcgctcaggttttcatcttcgggcccttcaccggcgaccagcacccaacaggctttgatgattgctgtacaaggatgatatggcctcccgcccaaagctgtctggtattcagaagcaggttttggcgctgtacaggggattccttcggacagcacgccttaaggcccctgaagaacgccgcaggatcgagtctgttgtctttgcagagttccgtgacaacgcaaggagtgttgaccgtaggaactttgtacacatagagtacttgttgaggagagggaagaagcagcttgagcagctcaagaatcctgatattactggactcgctacccttgtagtaaagaaatgagcaacagttgtcgaaatttacaggtccattcattgccagaacaaagtatcatcatgataccggtgtttctaatgtgaagatttggaacctgccactgatggtgtccaaataaaataaatatgaccacagattacagatttgatatccagggactttctaatcagcctattagaatctgaagataaatcttgtagcacctgtccggtgacccatagtaatattattttactcttgctgtaagcagaggttaacactaaaaaaagtattgtgattggtctgaactttttgtgcggtataaagcatgtgattcagctcaacttgacttttccaactttaccgagcatatacaattgtgattaatatagaggctcttaaggtgtttaaatgtgctatttacaaaaaaaaatcgtagagtcgtctatgaatttatcgtctgttttatcgatctaatgttgtatatgtgtatttacttctgtatttattaatagattatatttatagacacg

SEQ ID NO: 2252 - DNA, 942 bp, Zea Mays
gtggttctcccgtgtcctctctctctagtgtcgacgagtgggcgaacgccgccaccgccttacgccagtcgccaggcgctcaggttttcatcttcgggcccttcaccggcgaccagcacccaacagttacatgtgcatcaggctttgatgattgctgtacaaggatgatatggcctcccgcccaaagctgtctggtattcagaagcaggttttggcgctgtacaggggattccttcggacagcacgccttaaggcccctgaagaacgccgcaggatcgagtctgttgtctttgcagagttccgtgacaacgcaaggagtgttgaccgtaggaactttgtacacatagagtacttgttgaggagagggaagaagcagcttgagcagctcaagaatcctgatattactggactcgctacccttgtagtaaagaaatgagcaacagttgtcgaaatttacaggtccattcattgccagaacaaagtatcatcatgataccggtgtttctaatgtgaagatttggaacctgccactgatggtgtccaaataaaataaatatgaccacagattacagatttgatatccagggactttctaatcagcctattagaatctgaagataaatcttgtagcacctgtccggtgacccatagtaatattattttactcttgctgtaagcagaggttaacactaaaaaaagtattgtgattggtctgaactttttgtgcggtataaagcatgtgattcagctcaacttgacttttccaactttaccgagcatatacaattgtgattaatatagaggctcttaaggtgtttaaatgtgctatttacaaaaaaaaatcgtagagtcgtctatgaatttatcgtctgttttatcgatctaatgttgtatatgtgtatttacttctgtatttattaatagattatatttatagacacg

SEQ ID NO: 2253 - DNA, 2825 bp, Zea Mays
tggcacctttgcagctgcacgcgcgcatgatgctgagccagaagagtctttttagaggcagagtatttgttgcagttcctgaggaaccgagggatgggaaatccatactgtcttgggttattgaccgtgtatctgacagcgcagagatcatcatcgtccacatagtaacatcgccagactttgaaagccggcagcaaattttggactgctacctggatcaatgctcaaggaaaaaggttagagctgagaaacgggtgtttctattcaccgatatcgatgagggccttattcatctgataaatttatatggggtcactgaacttgttattggtgcagctgcagacagacattacaggaggaaaatgaaagcaccacagtctaagacagcactgagcgtgatgcagaaagctcactcacactgcaatatgtggtttatttgcaaaggaaagctaatgtttttcagggaggcaaattactgcctgttaaccaagtcaagatcagcacggccaacttgtggtgttggcaatcgcaaaatggatcttcggagtttgcttcaacctaatttagaggctaaaagactggaatatatgtatactaaggatattgaaataaggaaagaaatagaggcagaaatctcgcaacagagagaagagacagaaactctgaagaaagcaactctgatgctccagaatgagctcgattggtacagataccaatggaataagaacgccaatgcattgcaacaggcaagcaagcagaagcgccttttggagcatcgcatatcagagttagactctgttgccagccacttaggagagagcatgagagcgtccgattccctcgtgctctcgctgaagttggagtacagtaaagtgaagcgggaacgggacgatgcggtcaaagaggccagggacatgcgcatggagaaagagctcacagaacctcgtgcctatggagcaatgagctctgagttctccttggcggagttggagcaggctacccaggcattcagcagctcgcttaacattggtgaaggcggatttggatctgtctacaagggtctcctccggagcaccacggtagctatcaagatcctcaacactgaaagcttgcgtgcccaatcacagttcaagcaagaggtggcaatactcagtagagtgaggcatccaaacctagtcaccctcatcggagcaagccctgaagcttcagccctcgtttacgagttcttacccaacgggagcctggaagaccgtctgaactgtgtcaacagcaccctgccactcagctggcaggtgcgcatccaaatcatagcggaggtttgctccgcgctgatcttcctccacaagcacaagcctcacccggttgtacacggagacctcaagccgggcaacatcctcctggatgcgaacttggtgagcaagctcagcgacttcggaatctcccgcctcttgctggagtccagtgccaccggcagcgaggcacacttcaccactcagccgatgggcacgccggcatacatggacccggagttcttcggcacgggggagctgacaccgcagtctgacacgtactcctttggcattacgatcctgcgcctcctgaccggaagggcgcctctacgcctcgcgagggtggtgcaacaggcgccgttgaggtagccggagccgactgtacgttgtagcttatggaccttgacgcggcagcggaagcagaggaggaggagcgcagactcgaggactttaatgaggctgaggatgctaggttcttcattggtctcgtggtcggcccggtacgttcaggcccaccgggcgaacgggccggcccggcacgatttatacatgtccgtgccgggtttggacatgcccctaggcacgtgggccagcccgacccggcccgaagcttcaacgggccgtgcctggcccggcactattcggtccgggccgaaacgggttcggaccgggtccgtgccgggtggcccgtttggacatctatagctgcgctgctcggagctcagcagggagaaacgccctgatcttgagctcgacgtgtggagggtggttcagcctatgaaaaaggaagctccttcgccgttgtcgcaatcttttcggtccatctccgatggaagcggtagagctgctgccacgccatcctacttcctctgtccgatctctcaggttgtcatgagagatcctcacatggcagcagatggcttcacctacgaagctgacgctcttagatactggctcgacagcgggcatgcaacatctccagtaacaaacagaagtctttcgaatcgtgataccatccccaatcacgcactgcgttcggccatccaagaatacctccggcagaacgagctgcaagagccattttcacagtggcaggaggattttggagttgtcaattgataatcctagagtcaaggttatattcaacagcttacttatcttcataatcatatttaggacgtgtttgttttcttctagattatataagttggattatgatggaatgttaggaggatataatattattttgtgactacaaataagttaaaataaactagcattgagtagtttatttcagtttatttgtgattccaaagtgattttttactcttctatctttccattataatccaacttatataatttagaagagaaataaacaggacgttaaactccacccgtacggtcatatgtgtatgctgtttggggtggtctctaaggcatgcaaaaaattatgttttttttcatgatgtgcgcatgatctattttggatccattcgctatttgaggagatttggcaccgcttcaggtttcggc

SEQ ID NO: 2254 - DNA, 1108 bp, Zea Mays
cacagctagacgactggtgctccgtgcggtgccggtgcgggtgcgtgattcccttcctgattcttctctgtctccggtccggtggtccgctgctctgcgccttgtatggtcactggctcactcctcactgcctcactggtgcagtagtgcccctgctggctgcttggacatctataattttattctgttttcattttcctcccattctcgtcctccttctaacctgtccggttgcctgactttctctggtgctcggctggtccttgcttgctgttgctggtcgatctgcgcctctggtgctccggcttcgaaagccgttgaggtagccggagccgactgtacgttgtagcttatggaccttgacgcggcagcggaagcagaggaggaggagcgcagactcgaggactttaatgaggctgaggatgctaggttcttcattggtctcgtggtcggcccggttgtcatgagagatcctcacatggcagcagatggcttcacctacgaagctgacgctcttagatactggctcgacagcgggcatgcaacatctccagtaacaaacagaagtctttcgaatcgtgataccatccccaatcacgcactgcgttcggccatccaagaatacctccggcagaacgagctgcaagagccattttcacagtggcaggaggattttggagttgtcaattgataatcctagagtcaaggttatattcaacagcttacttatcttcataatcatatttaggacgtgtttgttttcttctagattatataagttggattatgatggaatgttaggaggatataatattattttgtgactacaaataagttaaaataaactagcattgagtagtttatttcagtttatttgtgattccaaagtgattttttactcttctatctttccattataatccaacttatataatttagaagagaaataaacaggacgttaaactccacccgtacggtcatatgtgtatgctgtttggggtggtctctaaggcatgcaaaaaattatgttttttttcatgatgtgcgcatgatctattttggatccattcgctatttgaggagatttggcaccgcttcaggtttcggc

SEQ ID NO: 2255 - DNA, 1648 bp, Zea Mays
atcgatcattatccgtgcaaccagccaatgagccaaccacccattccaccaccctgcaattccagtccgatttggacattgtcttcgtctccttcatcccctgcccacctgttctgctctgccgccgccgccgctgccgctcccgctgccgcaggaaccctagaccacgctgagcaacccccggcctacacggcgtagctttgcaggaaatggaatacggcgccgtcctcgccgccgcgccgctcgtcgcacggccgaactggctcctcctctcgccgccgccactggcgccgtctattcagattcagaatcgtctttattcgatctcgtcattcccactaaaggctggacctgtaagggcatgcagagctttagcaagcaactacacgcaaacatctgaaacagttgatttggactgggagaacctgggttttgggattgtgcaaactgattatatgtatattgctaagtgcgggacagacgggaatttttctgagggtgaaatggtgccttttggacctatagcgctgagtccatcttctggagtcctaaattatggacagggattgtttgagggcctaaaggcgtataagaaaactgatggatccatcctattatttcgcccagaggaaaatgctgagaggatgcggacaggtgctgagaggatgtgcatgcctgcaccctctgtcgagcagtttattgatgcagtaaaacaaaccgttcttgcaaataagagatgggaaggtttagcaccaataaatttgatagttgaagacaagttccatcgtgctactcctggtggtactgggggtgtgaagaccataggaaattatgcttcggtgttgatggcacagaaaattgcaaaggaaaagggttattctgatgtcctctacttggacgctgttcacaagaagtaccttgaagaagtttcttcatgcaatgtttttgttgtcaaggacaatgttatttctaccccagcaataaaaggaacaatattacctggtatcacaaggaaaagtataattgacgttgctttgagtaaaggcttccaggttgaggagcggcttgtttcagtggatgaactgcttgatgctgatgaggtattctgcacaggaactgctgttgtggtgtctcctgttgggagcattacatatcaagggaaaagagtggaatacggccaccaaggtgttggcgttgtgtcccagcagctgtacacttcactgacgagtcttcagatgggtcaaaccgaggattggatgggctggactgtgcaactgaattagttggccgtggttcgtggatcattcccaacagatgatgggttcgcaagatccaaatctggaggatcacaaccatgtgtacctcttcggttacagttttgtagtgtcttatgcgatggcgtcctgctgtatatttcttagacggtatttaaaccataaaacagtattcgtctgtacgactgtacccttcagttctgtagcatctgccggagacgagtactagttttgttattttctttcttttacaaaccaagaacagttctatagttttattgtagacactggaccatcatatgatctcaatgggtagctttttcctttttatatttaaaaataaacagaattttaattttataaattttatattt

SEQ ID NO: 2256 - DNA, 2246 bp, Zea Mays
atcgatcattatccgtgcaaccagccaatgagccaaccacccattccaccaccctgcaattccagtccgatttggacattgtcttcgtctccttcatcccctgcccacctgttctgctctgccgccgccgccgctgccgctcccgctgccgcaggaaccctagaccacgctgagcaacccccggcctacacggcgtagctttgcaggaaatggaatacggcgccgtcctcgccgccgcgccgctcgtcgcacggccgaactggctcctcctctcgccgccgccactggcgccgtctattcagattcagaatcgtctttattcgatctcgtcattcccactaaaggctggacctgtaagggcatgcagagctttagcaagcaactacacgcaaacatctgaaacagttgatttggactgggagaacctgggttttgggattgtgcaaactgattatatgtatattgctaagtgcgggacagacgggaatttttctgagggtgaaatggtgccttttggacctatagcgctgagtccatcttctggagtcctaaattatggacagggattgtttgagggcctaaaggcgtataagaaaactgatggatccatcctattatttcgcccagaggaaaatgctgagaggatgcggacaggtgctgagaggatgtgcatgcctgcaccctctgtcgagcagtttattgatgcagtaaaacaaaccgttcttgcaaataagagatggattcctcctactggtaaaggttctctgtatattaggcccttacttatgggaagtggggctgttcttggtcttgcacctgctcctgagtatacattcattatatttgtctctcctgttggaaactactttaaggaaggtttagcaccaataaatttgatagttgaagacaagttccatcgtgctactcctggtggtactgggggtgtgaagaccataggaaattatgcttcggtgttgatggcacagaaaattgcaaaggaaaagggttattctgatgtcctctacttggacgctgttcacaagaagtaccttgaagaagtttcttcatgcaatgtttttgttgtcaaggacaatgttatttctaccccagcaataaaaggaacaatattacctggtatcacaaggaaaagtataattgacgttgctttgagtaaaggcttccaggttgaggagcggcttgtttcagtggatgaactgcttgatgctgatgaggtattctgcacaggaactgctgttgtggtgtctcctgttgggagcattacatatcaagggaaaaggttaaacattatctttgcttgagaactcagtttttaattgaaataataaacatgcaattaaatcaactttcttttgtttcatgcataaggtaactaacagtcattatcatgcaaacatgtggcaagccatgaaccatttgaagcgctacttgcttaatgtctctcttgatcatttgtgttagtggcatttgtcgaccttgtttttctgtgcactttctgccttcattgcaaaatgtcagtttttttatctgcattgtcgtcgatgactggtaaacatggtagtgttgggggcacgctttagcacctaggcaacaaggtgtgactaagacctcttggcatcatgcggtgtcatacattttttgtacataatatggctcttacaacttattctttcaaacaaatgttattctttttggagacttatttagcaatgatatcattacatgtaagggagttcactttgcagagtggaatacggccaccaaggtgttggcgttgtgtcccagcagctgtacacttcactgacgagtcttcagatgggtcaaaccgaggattggatgggctggactgtgcaactgaattagttggccgtggttcgtggatcattcccaacagatgatgggttcgcaagatccaaatctggaggatcacaaccatgtgtacctcttcggttacagttttgtagtgtcttatgcgatggcgtcctgctgtatatttcttagacggtatttaaaccataaaacagtattcgtctgtacgactgtacccttcagttctgtagcatctgccggagacgagtactagttttgttattttctttcttttacaaaccaagaacagttctatagttttattgtagacactggaccatcatatgatctcaatgggtagctttttcctttttatatttaaaaataaacagaattttaattttataaattttatattt

SEQ ID NO: 2257 - DNA, 1507 bp, Zea Mays
ggggaatctcggtacgaggggaatccgagattcagaatcgtctttattcgatctcgtcattcccactaaaggctggacctgtaagggcatgcagagctttagcaagcaactacacgcaaacatctgaaacagttgatttggactgggagaacctgggttttgggattgtgcaaactgattatatgtatattgctaagtgcgggacagacgggaatttttctgagggtgaaatggtgccttttggacctatagcgctgagtccatcttctggagtcctaaattatggacagggattgtttgagggcctaaaggcgtataagaaaactgatggatccatcctattatttcgcccagaggaaaatgctgagaggatgcggacaggtgctgagaggatgtgcatgcctgcaccctctgtcgagcagtttattgatgcagtaaaacaaaccgttcttgcaaataagagatggattcctcctactggtaaaggttctctgtatattaggcccttacttatgggaagtggggctgttcttggtcttgcacctgctcctgagtatacattcattatatttgtctctcctgttggaaactactttaaggaaggtttagcaccaataaatttgatagttgaagacaagttccatcgtgctactcctggtggtactgggggtgtgaagaccataggaaattatgcttcggtgttgatggcacagaaaattgcaaaggaaaagggttattctgatgtcctctacttggacgctgttcacaagaagtaccttgaagaagtttcttcatgcaatgtttttgttgtcaaggacaatgttatttctaccccagcaataaaaggaacaatattacctggtatcacaaggaaaagtataattgacgttgctttgagtaaaggcttccaggttgaggagcggcttgtttcagtggatgaactgcttgatgctgatgaggtattctgcacaggaactgctgttgtggtgtctcctgttgggagcattacatatcaagggaaaagagtggaatacggccaccaaggtgttggcgttgtgtcccagcagctgtacacttcactgacgagtcttcagatgggtcaaaccgaggattggatgggctggactgtgcaactgaattagttggccgtggttcgtggatcattcccaacagatgatgggttcgcaagatccaaatctggaggatcacaaccatgtgtacctcttcggttacagttttgtagtgtcttatgcgatggcgtcctgctgtatatttcttagacggtatttaaaccataaaacagtattcgtctgtacgactgtacccttcagttctgtagcatctgccggagacgagtactagttttgttattttctttcttttacaaaccaagaacagttctatagttttattgtagacactggaccatcatatgatctcaatgggtagctttttcctttttatatttaaaaataaacagaattttaattttataaattttatattt

SEQ ID NO: 2258 - DNA, 624 bp, Zea Mays
ccaatgaactgagaaaatcatctaggaggttgaggagcggcttgtttcagtggatgaactgcttgatgctgatgaggtattctgcacaggaactgctgttgtggtgtctcctgttgggagcattacatatcaagggaaaagagtggaatacggccaccaaggtgttggcgttgtgtcccagcagctgtacacttcactgacgagtcttcagatgggtcaaaccgaggattggatgggctggactgtgcaactgaattagttggccgtggttcgtggatcattcccaacagatgatgggttcgcaagatccaaatctggaggatcacaaccatgtgtacctcttcggttacagttttgtagtgtcttatgcgatggcgtcctgctgtatatttcttagacggtatttaaaccataaaacagtattcgtctgtacgactgtacccttcagttctgtagcatctgccggagacgagtactagttttgttattttctttcttttacaaaccaagaacagttctatagttttattgtagacactggaccatcatatgatctcaatgggtagctttttcctttttatatttaaaaataaacagaattttaattttataaattttatattt

SEQ ID NO: 2259 - DNA, 5445 bp, Zea Mays
accgtccgcgcctgaccagagagcaccgccgctggttctcttgagtaattggcgcctccaaaaaggtgtcaacagaaagcaagggcaaaggtgaccgagacctggatttagttaggctagctaaccgcggaagaagaaaagcctccgattccttccctcctctcctcgccgaaagggagaaggatggacagctcagggctgcgggctccggcgccggttcacatggtcgggggatgctgcgaggactgaagactttggatgggtgttgcgtgtgctcatcccaccgagcgagagggagagacgagtcagaaaggcccgcccgtgaagctccatcccgttcttgcccagtgttcatcaggtgcagcttgcgcggatccccctcatgaactgagcaatcgatagaagaaacaaaaagggccatttccgctacagaaaataaatcatcaggaatgggaaaacgaggccacaggcggtctgcatcacaagacgacgacaatgtgggctgtgtgtggggcctcatgcgcatgctttacttccgccgagaccccaaacttttgctggatgcgaagcagttgagtgggaggcatgcgttccgggaggtcagcgggagggggcattcagcaaagaggccaaatgattttgacgggatagaagaagatggtaacatagaagatcgcactttgcagaaaccgacagtaaaaaaccttatggaggatgaattggaaaaattaatgctgctgaagaaatttccaaatgatgaggttcagagaagaaaagccgacctgggaattgatgtctctcttgatacgatttcagagcatacaaataaatcaacagataactcatatcaccaggtgaaatatatagttgtcacaatgaatgcccacacagtgattgcaagaacaagaatgaattgtgtccttcactgaagtccctaatccataaaaaggtcaatgaattgaataatcttccccacaatattggccgtgggcaatctcaagagggcagtgatgctaagccatctgaccaaaataatctttataacaccatggcagcccaatccaaacaattcaaggatgcattggaaatactgggttcgaacagtgaactttttgtgaagctgcttcagaagccaaatcaacatatagctgatagtatccaacagcatgaaaacagtaaggtgtctgctggattagagcctgacaaaattcatggacagaccaattttgttggaggaagaggaagctcaaaacagcatcctttggctacaaaagagcaggctaaagagagaaaatatatgttcttctggaggaagagtaaatcaaatagaaggcagatgcttgacgcaacagatggagctcagactgttagcaaaattgttattctgaagccaaatccagaaagagggattaatcagaaagcagctactgcaagaactttacatcaacagccatgtacatcgaatgctcctggatgcagtggaagggaaaactcaaagttttcaattaaggaagtcaagaaaagattcagatttgtgactggtgagagaagtgaaagaaatttgtcacctgcagaggaccttcaaggagacccacgtaagatcaaagattctgttgttgcaattaataaatattttagacatctccctgaagggagcttggcaaacaagtctgcatcagacattgagaatggcatcaaaccttttatcagcagtaagcaaaagaatcaaaatgggagcataactgaaatcagtggccatatagtagcaccaaaaggtgcatctgtattttatgaagaggccaggaggcatttatcagagatgctaaaaggtaatgactgttccataaactatccagaagttcaaatatcaaaatccttggaaggcatactttctcttcctcatggcaatgtgtcaaccactgggagtagcctgaggggaaaggattaccttgacccctcacctggagaaacagatgtttacgatgcatgtgaggttgagagagaagaatgcacacaagagagaagccaatcacaagaggattttggaagcattgctcactgtacttgcacaacagttgatgatcaggtgacagttcgagaaggatattacacgaatgaagcacaagaaggaccaagacatgctcatgatgagccagacactctgtatattgaaggacttgataaattcatttgccgcgaaaacattcgcaacgaagagtccagtccagcagaacaaagcagagacgatatacgtcaagagatactagaagaaataaatcagggaaaagagcatgttaaaatgtccctagcttctgttgagggcatagatgaaaagttggggcagcaagagccagaaacaccggaaccaagagcatcagccaaattaatctcagacggttctcctaatcaaagcgatgaaaagcaagagaggcccagtccagtatctgttcttgagtcatccttcgaagatattggcagtccagactgcataaacaagaaagagtgtgagctgcatggtctccaaaggaccctgtattttccagataatgaaccagacgttaatgtcctttgggaggacaagaatgtcaggttggactacataaagctggtgctagaactctcagaactgtgcgcagaacaaaatctagaggtatggtacctagaagacgagttgatcagcccctgcttgtttgaagaactacagagccagggtgatcagacggatgatcgaatgcttctgtttgactgtatctgtgaagctctaacagagatccaagagagatattttagactctcctcttggctaacttttctaaaacacgacatacggacacctccgacaggagagaacctaatcacagaagttgataggtacgttaacgggtatattatccagtacagtcttccaagtactctagagcagacaattaaaagggatctggaagttcagacgtggatgaacattagatcgaaaaccgaagggattattatggagatgtgggagtttgtattggatgagttgatagatgagactgtctccgatttgtggatttgaagttctgattaggcttcgtccatggtgcctctgtggcgagcatagtgagtaggatacaggagttctttcgtgctgaaaaataaccagttctatgcggcagaatagcatgggctaccgctagccaagtgtgtaactgcagtggagatcgttctcgtgtagtcgtgtggaggagaacagaagtctaggttcagcagatctccagagctgtgaagtttgcgtggatgaagttgggcacggtttgtctcacagccatgcctctgcacggcgaagtgtacagcagtctgaagcgcattgcgattttcctctttgcccgttgagatttgggagcttgtgtgtgcatgtgtgatgcgtgcacttttcagcgtgatcagatcgcgcttgtttttttataggtttgttttgtgtgtaaatgtgaaaaaaagagagaaagcaaacatacatgattaatcaaatgacatgttttatgtatgctttgttgaatggcgcaaggcacatctacccccatggggctgtgcatgtatttatagatcaaaagatacatgcagatatgtacaagcaaggcaacaacctgccgagaagggaggcgcagctccagccaagaataatgagatacgctaacagaataacaagatatcctaacaccctcttcaatctaaacatggtgcgactaagtttagattggcccggaatttactaaacgatgtcgttggaagagccttcgtcatgatatctgcaacttggtcctttgtcgagattggacgaacctctagttgatgtgtagcaacacgttctcgaacaaagtgatagtctacctccacatgttttgatcgtcgatgaaatactggattagcacacaagtatgtcgcaccaatattatcgcaccacatgacagcagcacgagatgaagatatgccaagttctcgcagcaatacttgaagccatattaattctgctgtaccatcagcaatggccttatattccgcctcagtgctagatcgcgagacagtaggctgtttgcgagacccccaagaaataaggttaggtccaatataaatagcataacccccagtactatgtcgatcatcaatatttccagcccaatccgcatcagaaaaagcacttagaagaaaggaattactcttggtgaaacagagacccatgttgatagttccatgtagatatctcaaaatccgcttgaccgccatccaatgatcagcagtaggtgcaaccatgaattggcacacccggttgaccgagaaagcaatatctggccgagtgagaagaagatactgcagggccccaatggcactccgatatctggttgcgtcttcagcagagagtggtgcgccaccctggatttgcaatttatcagctggtagcattggcgtagcaaccggtttggatgtcagcatgttggtccgagtgagaagatcatgaatatatttttgctgagacagtatgagcccatgcgtggtgtgctgacattcaatgcccaaaaaatatgccaaaggaccaagatctttgactgcaaaatcattacggagttgactaaggagtctatccacggtagctgacgacgagctaataatgattatgtcatctacataaatcaacatatatatctgaacaccacccttattaagtatgaagagagagacatcagcctttgatggtgaaaacccaagatcaattaatttcttgctgagacgagaaaaccacgcacgaggtgcttgttttaatccatacagagatttatccaatttgcaaagataatctggatgagtagaatcagcaaaacctggtggttgtttcatatagacgtcttcattaagaaaaccgtggagaaatgcattttgaatgtcaatctgacgaatagcccaatctcgtgagactgctagggaaagaagcagacgaatagtagttggtttaacaaccggactaaaggtctcgtcataattaataccatattgttgcttaaatccttttgccaccagccgggctttatagcgatcaatagagccatcagctttttgcttgagtttaaatacccatttgcaatcaattacattaagacccggtctaggcggaataaggtgccaggtcttgtttttgagaagggcatgaaattcatcattcatagcttggcgccatagagggtgtttcatagcagcaatatgggaagtaggttcacttgatgaagaacgaatagctgaataggtcactgtaccatccgtccgtacctttggttgacgcagattgtggcgaagtctggtgccatatggatgagcatggcctgtgttagcatcagatggcatagatgatggaaccatatcatcctctatacgtggagatgtagctggtgcatgcatgttctcagtccacgttggctg

SEQ ID NO: 2260 - DNA, 5818 bp, Zea Mays
agaagaaaagcctccgattccttccctcctctcctcgccgaaagggagaaggatggacagctcagggctgcgggctccggcgccggttcacatggtcgggggatgctgcgaggactgaagactttggatgggtgttgcgtgtgctcatcccaccgagcgagagggagagacgagtcagaaaggcccgcccgtgaagctccatcccgttcttgcccagtgttcatcaggtgcagcttgcgcggatccccctcatgaactgagcaatcgatagaagaaacaaaaagggccatttccgctacagaaaataaatcatcaggaatgggaaaacgaggccacaggcggtctgcatcacaagacgacgacaatgtgggctgtgtgtggggcctcatgcgcatgctttacttccgccgagaccccaaacttttgctggatgcgaagcagttgagtgggaggcatgcgttccgggaggtcagcgggagggggcattcagcaaagaggccaaatgattttgacgggatagaagaagatggtgtaagttgcatgaacaaacaagtagttttttcgaggagcaaagaaaacccacctagtcatgtttttttagttaccataatctaatttacactgtatcactgtgatcttaacattgaactttggaaaccacatttttctaaccaagcaaagaaagtaagaagtttctctagtatatgaatggtgagacagtgaaccaccaattctgaatcaggctccttgtctaggacattattatgcctcagggacttcattctcagaattagctcaatgtccaatcaatatacaatttcttcaacatacacatgcatctgagcattttttaccgtttctcattcagaacatagaagatcgcactttgcagaaaccgacagtaaaaaaccttatggaggatgaattggaaaaattaatgctgctgaagaaatttccaaatgatgaggttcagagaagaaaagccgacctgggaattgatgtctctcttgatacgatttcagagcatacaaataaatcaacagataactcatatcaccaggcaggaatctctacgccttcaactccatcaatggattatggggttttgaattatactgaagaatataatcttgaatctgtgctggtgaattttctaggtgaaatatatagttgtcacaatgaatgcccacacagtgattgcaagaacaagaatgaattgtgtccttcactgaagtccctaatccataaaaaggtcaatgaattgaataatcttccccacaatattggccgtgggcaatctcaagagggcagtgatgctaagccatctgaccaaaataatctttataacaccatggcagcccaatccaaacaattcaaggatgcattggaaatactgggttcgaacagtgaactttttgtgaagctgcttcagaagccaaatcaacatatagctgatagtatccaacagcatgaaaacagtaaggtgtctgctggattagagcctgacaaaattcatggacagaccaattttgttggaggaagaggaagctcaaaacagcatcctttggctacaaaagagcaggctaaagagagaaaatatatgttcttctggaggaagagtaaatcaaatagaaggcagatgcttgacgcaacagatggagctcagactgttagcaaaattgttattctgaagccaaatccagaaagagggattaatcagaaagcagctactgcaagaactttacatcaacagccatgtacatcgaatgctcctggatgcagtggaagggaaaactcaaagttttcaattaaggaagtcaagaaaagattcagatttgtgactggtgagagaagtgaaagaaatttgtcacctgcagaggaccttcaaggagacccacgtaagatcaaagattctgttgttgcaattaataaatattttagacatctccctgaagggagcttggcaaacaagtctgcatcagacattgagaatggcatcaaaccttttatcagcagtaagcaaaagaatcaaaatgggagcataactgaaatcagtggccatatagtagcaccaaaaggtgcatctgtattttatgaagaggccaggaggcatttatcagagatgctaaaaggtaatgactgttccataaactatccagaagttcaaatatcaaaatccttggaaggcatactttctcttcctcatggcaatgtgtcaaccactgggagtagcctgaggggaaaggattaccttgacccctcacctggagaaacagatgtttacgatgcatgtgaggttgagagagaagaatgcacacaagagagaagccaatcacaagaggattttggaagcattgctcactgtacttgcacaacagttgatgatcaggtgacagttcgagaaggatattacacgaatgaagcacaagaaggaccaagacatgctcatgatgagccagacactctgtatattgaaggacttgataaattcatttgccgcgaaaacattcgcaacgaagagtccagtccagcagaacaaagcagagacgatatacgtcaagtaagcttaaataaatgcatatttttctttcttgtgattaatttttctaaatgtcccatgtttcataaaggagatactagaagaaataaatcagggaaaagagcatgttaaaatgtccctagcttctgttgagggcatagatgaaaagttggggcagcaagagccagaaacaccggaaccaagagcatcagccaaattaatctcagacggttctcctaatcaaagcgatgaaaagcaagagaggcccagtccagtatctgttcttgagtcatccttcgaagatattggcagtccagactgcataaacaagaaagagtgtgagctgcatggtctccaaaggaccctgtattttccagataatgaaccagacgttaatgtcctttgggaggacaagaatgtcaggttggactacataaagctggtgctagaactctcagaactgtgcgcagaacaaaatctagaggtatggtacctagaagacgagttgatcagcccctgcttgtttgaagaactacagagccagggtgatcagacggatgatcgaatgcttctgtttgactgtatctgtgaagctctaacagagatccaagagagatattttagactctcctcttggctaacttttctaaaacacgacatacggacacctccgacaggagagaacctaatcacagaagttgataggtacgttaacgggtatattatccagtacagtcttccaagtactctagagcagacaattaaaagggatctggaagttcagacgtggatgaacattagatcgaaaaccgaagggattattatggagatgtgggagtttgtattggatgagttgatagatgagactgtctccgatttgtggatttgaagttctgattaggcttcgtccatggtgcctctgtggcgagcatagtgagtaggatacaggagttctttcgtgctgaaaaataaccagttctatgcggcagaatagcatgggctaccgctagccaagtgtgtaactgcagtggagatcgttctcgtgtagtcgtgtggaggagaacagaagtctaggttcagcagatctccagagctgtgaagtttgcgtggatgaagttgggcacggtttgtctcacagccatgcctctgcacggcgaagtgtacagcagtctgaagcgcattgcgattttcctctttgcccgttgagatttgggagcttgtgtgtgcatgtgtgatgcgtgcacttttcagcgtgatcagatcgcgcttgtttttttataggtttgttttgtgtgtaaatgtgaaaaaaagagagaaagcaaacatacatgattaatcaaatgacatgttttatgtatgctttgttgaatggcgcaaggcacatctacccccatggggctgtgcatgtatttatagatcaaaagatacatgcagatatgtacaagcaaggcaacaacctgccgagaagggaggcgcagctccagccaagaataatgagatacgctaacagaataacaagatatcctaacaccctcttcaatctaaacatggtgcgactaagtttagattggcccggaatttactaaacgatgtcgttggaagagccttcgtcatgatatctgcaacttggtcctttgtcgagattggacgaacctctagttgatgtgtagcaacacgttctcgaacaaagtgatagtctacctccacatgttttgatcgtcgatgaaatactggattagcacacaagtatgtcgcaccaatattatcgcaccacatgacagcagcacgagatgaagatatgccaagttctcgcagcaatacttgaagccatattaattctgctgtaccatcagcaatggccttatattccgcctcagtgctagatcgcgagacagtaggctgtttgcgagacccccaagaaataaggttaggtccaatataaatagcataacccccagtactatgtcgatcatcaatatttccagcccaatccgcatcagaaaaagcacttagaagaaaggaattactcttggtgaaacagagacccatgttgatagttccatgtagatatctcaaaatccgcttgaccgccatccaatgatcagcagtaggtgcaaccatgaattggcacacccggttgaccgagaaagcaatatctggccgagtgagaagaagatactgcagggccccaatggcactccgatatctggttgcgtcttcagcagagagtggtgcgccaccctggatttgcaatttatcagctggtagcattggcgtagcaaccggtttggatgtcagcatgttggtccgagtgagaagatcatgaatatatttttgctgagacagtatgagcccatgcgtggtgtgctgacattcaatgcccaaaaaatatgccaaaggaccaagatctttgactgcaaaatcattacggagttgactaaggagtctatccacggtagctgacgacgagctaataatgattatgtcatctacataaatcaacatatatatctgaacaccacccttattaagtatgaagagagagacatcagcctttgatggtgaaaacccaagatcaattaatttcttgctgagacgagaaaaccacgcacgaggtgcttgttttaatccatacagagatttatccaatttgcaaagataatctggatgagtagaatcagcaaaacctggtggttgtttcatatagacgtcttcattaagaaaaccgtggagaaatgcattttgaatgtcaatctgacgaatagcccaatctcgtgagactgctagggaaagaagcagacgaatagtagttggtttaacaaccggactaaaggtctcgtcataattaataccatattgttgcttaaatccttttgccaccagccgggctttatagcgatcaatagagccatcagctttttgcttgagtttaaatacccatttgcaatcaattacattaagacccggtctaggcggaataaggtgccaggtcttgtttttgagaagggcatgaaattcatcattcatagcttggcgccatagagggtgtttcatagcagcaatatgggaagtaggttcacttgatgaagaacgaatagctgaataggtcactgtaccatccgtccgtacctttggttgacgcagattgtggcgaagtctggtgccatatggatgagcatggcctgtgttagcatcagatggcatagatgatggaaccatatcatcctctatacgtggagatgtagctggtgcatgcatgttctcagtccacgttggctg

SEQ ID NO: 2261 - DNA, 1668 bp, Zea Mays
cttatttaagtgctgctcctgtaatctttgttgtcctagagctcgagtgatctccttggctcttgtagcctatgtttcccccggagttcatcccctccctgtatcttggtccatctgcccggagcttgatgtaccattccctaggggtgaccaaacccacccgttcttcacctccccgtggacaaggtttcccacaagtattcttggccgtgtattacttgttccatgctcggcaaagagctcccaaaacaaagagtgaagattcaagatgaagtggttgctaaagaggagtctactcaagtgtcttatcatcaagaggatggagctatctaattgatggttgggtagagggatctagaacctcttcactgcaaaaaggcaagccccggtgcatgcaaccccttccttgtgtttttaaatacttttcgcacacttaagtctagtgaaatgtgcattaggtttataggagttgcttgaaaccctttgatgcattgccttccttgatatccatacctttatagatacttctggtgaagtatcaaaatttgatttacaaaaatgcttagccctgcttagatcttgtggatagaggttgtcttttgcaatactgcctagctcaggggttatcctgaggaaagatggcttctacctgcaagaatactttcattgagagcgtggtgggatcttactgcaaagctccctgtgatgctcttttcatcctaaggaacaaaaacaatcctaaggatggaagtacttaaatcgagacttgggttaggaacaggtgatgttctacccaggttgattaaggattggatgcgtatgtaggcctgctagcgcaaggactatcttagctagccgcataccctggaaatgggacagggtaagctttgcctcgggcagactaaggccagaataagataacacgaaatgggcgtggagcggtggcgggagtagcgtgtaccctccgtggcaagaggctggacggtggtgtatctgtgctctcggtttgcgtgaacctgatctggtcttaagaaccctggggtcgagttgacatatgcaaggattaagtgctacatatgtcgtgtggttagagatcctcagctgagtaaatcgattcggatcgccgttatatccccggagagtggagacttgatcactgacctacaacctaagtcaggatgtgaacttcatgaataaaaatgatgttgtattgatgagatgatgaaattagactagaggcaaacagagtctattaatatttaatctggcgttaaaatgttgaaagtaaggactcactttagtaagctatttctgtaaaagtatctaagttgattcttgctaaagcctcttcttgattcctatttatccagcatacccttgagagtcttttccttagtcgggtaagacttgctgagtaattccatactcagggttttattccctgttgtttttcaggtcatagctttgtgctgctgatgatggtgttaagtgccggtgggctcggccttcttattagtctaagtaacccttctatacttcttattgaggatgatcatttgagctagcatatatttcaaacttatacttttgtaaccactccgataaaataatataaaatttttgtaacttgtaaaatttggtaatagtatttccgctgcaaaaatattg

SEQ ID NO: 2262 - DNA, 307 bp, Zea Mays
atcagcgtcgtcagccgagtccgctgcgatctcgcgcgcgcccatgccgccatgcggcccgctagctgtctcttcccgtcctcgctgcgctccgacagagctgactcacggcgcgtctctcttgaatcctcctctctctctctctctcccttcctctcccgcctgattttccagctcatttccgatttcttgacggtttcccccaagctctccgtacgtggtggcctaggccttgctataaaagaggagcagagtccgcttcctccaatcttggactccgcttcctcgaggaccttcacgaaaacag

SEQ ID NO: 2263 - DNA, 995 bp, Zea Mays
ttttgcacggtctgctggtcactacctaaacatgtcctctccatgctttctgggactctccgttctacccttccactgctcggcgctcgcacaccaggttccataacaccgaccagatgttccgtgtccgtatgatcgtattcgtatcacacgcaacgatgaaccagactccgcgacatcggttttgctaacggcactctagccgctctctcgctgcagttccgtgccgcggaggctcacaacacgtttgaagaaatgcgcaggagccatggggtcatcgtcccagtggtgatgggtcatgattcttgcggtaacctggctcactcaggctcttcatcggtgacgctcgtgcgatcccggcaatttgcaacggccgtggcctcgtcactgtcgccgcctgtcagtcgaagcactcctcgccgccacgcgcgcggaggggagcccgcgcggatatttgggttaaatagcacctcatacggcgggtttatcaagatagcggaagctccatcgcgaggtcgaggcagatggggtgcgccgaggggttgatgccttgaggggctgattgattgattcagattgaagttgtgggaatcaacgatgggtagagtgcgatggatgtctagtccatggacagtgtgatagtccggatgagtaaaggtgggcgccagagtcctgtggaggaaacattgaacatgtgttgagggatgaaggtaataatgtattggacaagtctgatttcctgcacgttgatcccaatgcatacttaagacggtcggcaacggtaaagtcgttgtttatgcacatcccaatagtttgtcggccgagggaaaagcgtgctagagttttcagtactacaatcggattcgagtttggccaaggtaagtgtgtgattcttttagacatatgccgctaagtatactgcacgtaatctcacacttgtgttatttcggctacaaagcaatctgcccggtggcttagcaaatgtgattgccaag

SEQ ID NO: 2264 - DNA, 1497 bp, Zea Mays
atgaaggatgacaatcaagatgatatacgcaatataaagacatgtacggcaacaatctctccaacgcctctggcgagtttggtggatgttggctgtgacagtgagggtgccatggtgcagagtccagtggtggtggacatgaatccatgtgtggaggatgctgggaatgctgccccgcgtgctgcggcagagcacacaccaagatggagcggacactggactggtggcaatatgtgttggcagcctcgggtcaggccaggggttcgaggtgtgacgactgacgatggtggcagattgtgcaagctaagtgtgggggtggcaaagggccaaaggcatgactaggatcagagggggcggaccagcctgctcgctgacagacagctattatcgtacctatccactgctccgggctatccgtgtgctcgtgtacaccgtgatgtggtcggcagtgaaggacctggatgccagcatcagtgtttttaaggcgtaaggcaaggcaaggcgttggaccgccgcctggacgcctaggcgagcaaggcgcccaggatttctgggcgttggcccaccacctcgacgcctaggcgacaccttaaaaacattggccaccatgatggtggcagtggctttcaccacgaactgaaactctcatcttgcagttggtctgaaccagattccacaccatcacctgttatctcaaattattagcccgtgctttagtttatttttattttttttttttctcgaaaacgcaggaaaactacgccccattatatattaagcagaaaaaggggtggtcttaagaagaccaatacaagaggcctccctacggaggccagtagcaagcatacataagaaaatccatcaaaataggacagctaccaaaggaaaccaaaaaggcctccttaattctcagctaatggtgctgccaaatgggaaaggcccttggcaccagcaatctcccattttttttctttcctcatcagcagctctaagactcatgataacattagggctgtagccatcaaagacgcatttatttctatggttccacaaaatccaggctcccaggatgataagggagcaagtccttttttggtgagtccattaacaacagcccccacctcttcccaccaaaccagatatgagccaacattcggttgtggagcaagagaatgcagaccaaatttccttagtagcagataccagaattccctcgagaaagaacaggtaacaaggagatggtctaaagtttcatcctcttgatcacaaagggggcacttctcaggatggttcagccctcttttagcaagcctatctactgtccagactcttttgagcagccaaccaaatgaaaaaacgacattttggcaaggcccaagttttccaaattctcttgtaatgaggaaaagccacagaccccagaaacaacccttcataagcagacttagctgaataggtgccgcttggagcaatactgaaaacatgtctatcctcaac

SEQ ID NO: 2265 - DNA, 1457 bp, Zea Mays
cacatgtgcaaaccctagccgccgccttcctcatacctagttgtgagaccctcgctgcgcgcgcggtgctagcaaatcggcgcacgatgttcctttcccatacgtgtggactacgtggaggcgcagccgcgactgcagcactaacagtttgcggaggagtagacggtcgtgatcagctacttcctctccatcgacgtgcgcctacattggatcgctgctacaactcgtctttcattatgttgcgcgactagtgaggcgttttgggtggcctgccgattacaagacaaaccctaggatccccgggaggccagatctaggtgccgtcggcaaatgccgccgtctctgcgcacacgcggaccgtcctgctcggcgcagagaagactccgctcctaccataggtcgtggactgtccggctctaggtcgtggaccgtccgcgctgccgcagagaacaccatctccgatacacctcgcagtgattggtgcctaaatcggtacctacactatccaaaataaaatgagcattgaacaatgttttctaaggtctttgaatgaatccttctataagatcttttctttgctgtggaaaaatggtccgagttgttgaaggagggcgatgccgaattcatggaagaaattatcaagacagtggagtggttacaagacttctcgcggcaaactgaagacatggaggtggaaggattcctctgagtttggcgtggtggtgttgctttccgaagtcgctagatttgttttctgatggtctttagaatgttgtagttttcttagttttgtatccttgtgttgcgtgttgatccttttggagtgtcagatttgtctgtcatcaatggtcgttcgttttcacgttgttttgtaagctggcatccccatcatgttattgttttgctgcctataaaagtagggttttatcagcgtcaaaaacatgtttgcgtagaatgaagacagagaaacggaagcgtgaattgctgcgatgaagtcacgttcttgccgattgctgacaaccaatatatggtcaaagagtagtctaagctgaactggaaaataacatccaaacaaaaggtatcaaatttagtttgtattgagcaaagttttcaaatattctgaataaacgacccaggcggtttgtggtagtgtgcattaaaaaccggctcagagcctcagactccttttaggagccgatagcccgagttataaatcatgttttttaaagaaaaaaagtcatctgatctcttggaaagtttataagttgcatgtagaataagttttttgttggtataagatcataccctttatttatacgagaaagtcacgaccaattgatgaatcaattgaatcaatcaataaaaaattatctactttattttttatcttctatcttgttgtttcaactatcctgttgtccagcccttctcgcgaagagatttatagatagttttgt

SEQ ID NO: 2266 - DNA, 1095 bp, Zea Mays
caaaccctagccgccgccttcctcatacctagttgtgagaccctcgctgcgcgcgcggtgctagcaaatcggcgcacgatgttcctttcccatacgtgtggactacgtggaggcgcagccgcgactgcagcactaacagtttgcggaggagtagacggtcgtgatcagctacttcctctccatcgacgtgcgcctacattggatcgctgctacaactcgtctttcattatgttgcgcgactagtggagggcgatgccgaattcatggaagaaattatcaagacagtggagtggttacaagacttctcgcggcaaactgaagacatggaggtggaaggattcctctgagtttggcgtggtggtgttgctttccgaagtcgctagatttgttttctgatggtctttagaatgttgtagttttcttagttttgtatccttgtgttgcgtgttgatccttttggagtgtcagatttgtctgtcatcaatggtcgttcgttttcacgttgttttgtaagctggcatccccatcatgttattgttttgctgcctataaaagtagggttttatcagcgtcaaaaacatgtttgcgtagaatgaagacagagaaacggaagcgtgaattgctgcgatgaagtcacgttcttgccgattgctgacaaccaatatatggtcaaagagtagtctaagctgaactggaaaataacatccaaacaaaaggtatcaaatttagtttgtattgagcaaagttttcaaatattctgaataaacgacccaggcggtttgtggtagtgtgcattaaaaaccggctcagagcctcagactccttttaggagccgatagcccgagttataaatcatgttttttaaagaaaaaaagtcatctgatctcttggaaagtttataagttgcatgtagaataagttttttgttggtataagatcataccctttatttatacgagaaagtcacgaccaattgatgaatcaattgaatcaatcaataaaaaattatctactttattttttatcttctatcttgttgtttcaactatcctgttgtccagcccttctcgcgaagagatttatagatagttttgt

SEQ ID NO: 2267 - DNA, 3563 bp, Zea Mays
gccagcgaacgcctcctaggccacgtccgcgcggccgaacaaccactccggcacgcatccaccggcacgcggggccacattgacgggcacgcacgcgcaggccaggcaggcagaggccacaggcggtggccttgtggcgcggcgcaggagcaggccttgccgcgccggcgctgccttgctcgcgaagacgccagttcccaactatttgcggagccgagagccggaggcggaggcgttaagcgtaaggcagcgagcataaagcgccctggcgcccgcccgcccgccgcagccgcaccaaagcctagccaccctcctctgccctcgagtccacgtctcgtctcctcgctccactcgccagtcgccacccaagccggagcgaacccgctgcccgaatagagtaatccgaggagccagccaaatggtggtggccgcgtgagtgtagggtccgggggatatagagagagagagactaggggccggccgcgatgcgggcgtgggagatgcacccgctctgctgcctcgccggtgagtggccggcctcgggcggcgggctcgcgcccggcgaccgctccccgccggcggaggacgcgggggcggcgccggcggtggcgggggtcctgtacaagtggaccaacatcggcaaggggtggcgcccgcgctggttcgcgatccgcggcggcgtgctcgcctactccaagatccggcgccgcgtcgcggcggagccgcgtcccgaggccgcgggcggcgtccggctgatcggggtggcgcgcggcgccgcgggcgccgctgagcgccccatcggattcgtgcctctcaagatatcatcatttagtgaaagtaaatcagatgataaacggttttatataattactccgaccaaaacacttcaactgaggactggttgtgctaatgaccgggcgacttggattgaagcgcttgtcactgcaagaagcgaatattcttttaatggggatttatcaggtgatcagaatgatgcatcattttccacagaaaagctcagaaatcgcttgaatgctgaaggcgttggcgaggccgttattaaagactgtgagcagattattcattcagaattttcgcagtaccaaacacagatgaagcaacgttgtgaagagtatttaagctttattggcactcttccacaggatgttgaggtagttaattcagtagattcaactgtccctgagaagccacggctagagctgttcaagcatgactgctccagctctggaaaataatatagcaacacagaatcttctgatgatgttggcaagcaagagattagtgaactatcagacggagatgaatttcatttctatgacacaaggcaaagtttcagtgaatttgcttctagtcctgctgacccgagaaagggatgtttaaacaacggaaatgaagatcataaatctgttgaatcattgacggttgacaaggctgagaaatatatgctatcacattcaaaaaggcgcttacagttgcctgaaccaatagaaaaggagaaaggagttagcctttggtcaatgatcaaagacaatgttggaaaggatctaacaagagtttgtcttcctgtttactttaatgagcctttatcttctctccagaagtgctttgaagagttggagtattcttatttgttggatcgtgcatatgaatgtggtttaagggtatgtctgtttctctaccttcctgttttccttgacccatacattttcttttgaatgcgaatctggtccaaacatctacattgaattacttaaatctgctggaaactactgttgggggaattatccaatagtagggaataaacgacccatgaagagaaactggttaacacaatggccggcatgaaatacatttttttcaacccaatgacataggataatattttaaattaggaaatttgcactttcagtctttaaaaaacagcactggatattggactcaatttttgactgatggagttatacttcatttaagtcagtgtttttttctaaaaaacaaatcaaccatgtggcattcccttagctttgttttgaaatagttactggaacttaagtggtcagaaagatcgctgaaccagttcacaaggaggtaggcaggtagctacattttgtgagcacctaggtttcaaggtttgagcctgggtgggtggcctcgatgggagactctaccgaccaagttatcactcagttctcagactaatggtgtttcttatttatctataaattgatttaacaataccataataattttgcttctgcattcaggggaatggtctgatgagaattctttatgttgctgcatttgcggtctctggatatgcatccacagattcccggccttgcaaacctttcaatccattgcttggggaaacctatgaagctgattaccctgaaaaggggatccgttttttctctgaaaaggtcagtcatcatcctatggtcatggcatgtcactgtgaggggaaaggttggaaattttggggagacagcaatctgaagagcaaattctggggacaatccattcaattggatcctaatggtgtgctaactttagagtttgatgatggagaaattttccaatggagcaaggttacaacaacaattaacaaccttatccttggtcgagtatattgccatcaccatggcacaatgaacataagtgggaatagacgatattcatgcaagctgacttttaaggagcagtctttccttgatcggaatcctcgccaggagtcgtcaaggatgctggtggaagcaaggttgcaacattgacggggaagtgggatgaaagtgtgcattgtgtcatcaacaatgatgcctctaaggtgaactctcatggtccacatcagagttctggttccactttgctatgggagaaaaatgagcctccagtcaatcctacccgctacaacttgtccgcatttgcaataacactaaatgagttaacaccagagctcgaggagaagctgccaccgacggattcaaggctgagaccagatcaacggcacctggagaatggggagtacgagaaggccaatgctgaaaaactgcgcctcgagacacagcaacggatggcaaggaagatgcaggagagtggctggaaaccaagatggttccaaagggacagcgaggatggaacgtaccgctacgtcggaggttactgggaggcaagggagcagagaacatgggtcggctgcaatgacatatttggtaacttgtctagcagccagaagctcccaccatccgctctctacacgagctgaagtatataggggtgggtaaggccggaagggcatgttcagtagttgttgacatcgcattaaccagagggtttttctctcgtttctgttgtgttaagctgtgagctaacatgtttttcttgtcaattgtcacattgaagccaaggacatccaagcataacccaaccttttgtcgatactaggatacttatgagagatcttgtggacattattgcgaaaagaattgtcgatgatactattttcttctttgcattccgcaaggacgtgtctgcatttggccctt

SEQ ID NO: 2268 - DNA, 3776 bp, Zea Mays
gccagcgaacgcctcctaggccacgtccgcgcggccgaacaaccactccggcacgcatccaccggcacgcggggccacattgacgggcacgcacgcgcaggccaggcaggcagaggccacaggcggtggccttgtggcgcggcgcaggagcaggccttgccgcgccggcgctgccttgctcgcgaagacgccagttcccaactatttgcggagccgagagccggaggcggaggcgttaagcgtaaggcagcgagcataaagcgccctggcgcccgcccgcccgccgcagccgcaccaaagcctagccaccctcctctgccctcgagtccacgtctcgtctcctcgctccactcgccagtcgccacccaagccggagcgaacccgctgcccgaatagagtaatccgaggagccagccaaatggtggtggccgcgtgagtgtagggtccgggggatatagagagagagagactaggggccggccgcgatgcgggcgtgggagatgcacccgctctgctgcctcgccggtgagtggccggcctcgggcggcgggctcgcgcccggcgaccgctccccgccggcggaggacgcgggggcggcgccggcggtggcgggggtcctgtacaagtggaccaacatcggcaaggggtggcgcccgcgctggttcgcgatccgcggcggcgtgctcgcctactccaagatccggcgccgcgtcgcggcggagccgcgtcccgaggccgcgggcggcgtccggctgatcggggtggcgcgcggcgccgcgggcgccgctgagcgccccatcggattcgtgcctctcaagatatcatcatttagtgaaagtaaatcagatgataaacggttttatataattactccgaccaaaacacttcaactgaggactggttgtgctaatgaccgggcgacttggattgaagcgcttgtcactgcaagaagcgaatattcttttaatggggatttatcaggtgatcagaatgatgcatcattttccacagaaaagctcagaaatcgcttgaatgctgaaggcgttggcgaggccgttattaaagactgtgagcagattattcattcagaattttcgcagtaccaaacacagatgaagcaacgttgtgaagagtatttaagctttattggcactcttccacaggatgttgaggtagttaattcagtagattcaactgtccctgagaagccacggctagagctgttcaagcatgactgctccagctctggaaaatgtagtgaatatagcaacacagaatcttctgatgatgttggcaagcaagagattagtgaactatcagacggagatgaatttcatttctatgacacaaggcaaagtttcagtgaatttgcttctagtcctgctgacccgagaaagggatgtttaaacaacggaaatgaagatcataaatctgttgaatcattgacggttgacaaggctgagaaatatatgctatcacattcaaaaaggcgcttacagttgcctgaaccaatagaaaaggagaaaggagttagcctttggtcaatgatcaaagacaatgttggaaaggatctaacaagagtttgtcttcctgtttactttaatgagcctttatcttctctccagaagtgctttgaagagttggagtattcttatttgttggatcgtgcatatgaatgtggtttaagggtatgtctgtttctctaccttcctgttttccttgacccatacattttcttttgaatgcgaatctggtccaaacatctacattgaattacttaaatctgctggaaactactgttgggggaattatccaatagtagggaataaacgacccatgaagagaaactggttaacacaatggccggcatgaaatacatttttttcaacccaatgacataggataatattttaaattaggaaatttgcactttcagtctttaaaaaacagcactggatattggactcaatttttgactgatggagttatacttcatttaagtcagtgtttttttctaaaaaacaaatcaaccatgtggcattcccttagctttgttttgaaatagttactggaacttaagtggtcagaaagatcgctgaaccagttcacaaggaggtaggcaggtagctacattttgtgagcacctaggtttcaaggtttgagcctgggtgggtggcctcgatgggagactctaccgaccaagttatcactcagttctcagactaatggtgtttcttatttatctataaattgatttaacaataccataataattttgcttctgcattcaggggaatggtctgatgagaattctttatgttgctgcatttgcggtctctggatatgcatccacagattcccggccttgcaaacctttcaatccattgcttggggaaacctatgaagctgattaccctgaaaaggggatccgttttttctctgaaaaggtcagtttggcacccaacacatataagtttagctaattatcaattattgtttggtcacttaacaaatcattctgaatataggcctgaaagaggaatcactaaaaacatcacgtacaaggatccaccactggagtattactaaaattttattatatatgagaacacacttgactaaatgtttttgtttattcttgcaccaggtcagtcatcatcctatggtcatggcatgtcactgtgaggggaaaggttggaaattttggggagacagcaatctgaagagcaaattctggggacaatccattcaattggatcctaatggtgtgctaactttagagtttgatgatggagaaattttccaatggagcaaggttacaacaacaattaacaaccttatccttggtcgagtatattgccatcaccatggcacaatgaacataagtgggaatagacgatattcatgcaagctgacttttaaggagcagtctttccttgatcggaatcctcgccaggttcaaggagtcgtcaaggatgctggtggaagcaaggttgcaacattgacggggaagtgggatgaaagtgtgcattgtgtcatcaacaatgatgcctctaaggtgaactctcatggtccacatcagagttctggttccactttgctatgggagaaaaatgagcctccagtcaatcctacccgctacaacttgtccgcatttgcaataacactaaatgagttaacaccagagctcgaggagaagctgccaccgacggattcaaggctgagaccagatcaacggcacctggagaatggggagtacgagaaggccaatgctgaaaaactgcgcctcgagacacagcaacggatggcaaggaagatgcaggagagtggctggaaaccaagatggttccaaagggacagcgaggatggaacgtaccgctacgtcggaggttactgggaggcaagggagcagagaacatgggtcggctgcaatgacatatttggtaacttgtctagcagccagaagctcccaccatccgctctctacacgagctgaagtatataggggtgggtaaggccggaagggcatgttcagtagttgttgacatcgcattaaccagagggtttttctctcgtttctgttgtgttaagctgtgagctaacatgtttttcttgtcaattgtcacattgaagccaaggacatccaagcataacccaaccttttgtcgatactaggatacttatgagagatcttgtggacattattgcgaaaagaattgtcgatgatactattttcttctttgcattccgcaaggacgtgtctgcatttggccctt

SEQ ID NO: 2269 - DNA, 2902 bp, Zea Mays
gccagcgaacgcctcctaggccacgtccgcgcggccgaacaaccactccggcacgcatccaccggcacgcggggccacattgacgggcacgcacgcgcaggccaggcaggcagaggccacaggcggtggccttgtggcgcggcgcaggagcaggccttgccgcgccggcgctgccttgctcgcgaagacgccagttcccaactatttgcggagccgagagccggaggcggaggcgttaagcgtaaggcagcgagcataaagcgccctggcgcccgcccgcccgccgcagccgcaccaaagcctagccaccctcctctgccctcgagtccacgtctcgtctcctcgctccactcgccagtcgccacccaagccggagcgaacccgctgcccgaatagagtaatccgaggagccagccaaatggtggtggccgcgtgagtgtagggtccgggggatatagagagagagagactaggggccggccgcgatgcgggcgtgggagatgcacccgctctgctgcctcgccggtgagtggccggcctcgggcggcgggctcgcgcccggcgaccgctccccgccggcggaggacgcgggggcggcgccggcggtggcgggggtcctgtacaagtggaccaacatcggcaaggggtggcgcccgcgctggttcgcgatccgcggcggcgtgctcgcctactccaagatccggcgccgcgtcgcggcggagccgcgtcccgaggccgcgggcggcgtccggctgatcggggtggcgcgcggcgccgcgggcgccgctgagcgccccatcggattcgtgcctctcaagatatcatcatttagtgaaagtaaatcagatgataaacggttttatataattactccgaccaaaacacttcaactgaggactggttgtgctaatgaccgggcgacttggattgaagcgcttgtcactgcaagaagcgaatattcttttaatggggatttatcaggtgatcagaatgatgcatcattttccacagaaaagctcagaaatcgcttgaatgctgaaggcgttggcgaggccgttattaaagactgtgagcagattattcattcagaattttcgcagtaccaaacacagatgaagcaacgttgtgaagagtatttaagctttattggcactcttccacaggatgttgaggtagttaattcagtagattcaactgtccctgagaagccacggctagagctgttcaagcatgactgctccagctctggaaaatgtagtgaatatagcaacacagaatcttctgatgatgttggcaagcaagagattagtgaactatcagacggagatgaatttcatttctatgacacaaggcaaagtttcagtgaatttgcttctagtcctgctgacccgagaaagggatgtttaaacaacggaaatgaagatcataaatctgttgaatcattgacggttgacaaggctgagaaatatatgctatcacattcaaaaaggcgcttacagttgcctgaaccaatagaaaaggagaaaggagttagcctttggtcaatgatcaaagacaatgttggaaaggatctaacaagagtttgtcttcctgtttactttaatgagcctttatcttctctccagaagtgctttgaagagttggagtattcttatttgttggatcgtgcatatgaatgtggtttaaggattcccggccttgcaaacctttcaatccattgcttggggaaacctatgaagctgattaccctgaaaaggggatccgttttttctctgaaaaggtcagtcatcatcctatggtcatggcatgtcactgtgaggggaaaggttggaaattttggggagacagcaatctgaagagcaaattctggggacaatccattcaattggatcctaatggtgtgctaactttagagtttgatgatggagaaattttccaatggagcaaggttacaacaacaattaacaaccttatccttggtcgagtatattgccatcaccatggcacaatgaacataagtgggaatagacgatattcatgcaagctgacttttaaggagcagtctttccttgatcggaatcctcgccaggagtcgtcaaggatgctggtggaagcaaggttgcaacattgacggggaagtgggatgaaagtgtgcattgtgtcatcaacaatgatgcctctaaggtgaactctcatggtccacatcagagttctggttccactttgctatgggagaaaaatgagcctccagtcaatcctacccgctacaacttgtccgcatttgcaataacactaaatgagttaacaccagagctcgaggagaagctgccaccgacggattcaaggctgagaccagatcaacggcacctggagaatggggagtacgagaaggccaatgctgaaaaactgcgcctcgagacacagcaacggatggcaaggaagatgcaggagagtggctggaaaccaagatggttccaaagggacagcgaggatggaacgtaccgctacgtcggaggttactgggaggcaagggagcagagaacatgggtcggctgcaatgacatatttggtaacttgtctagcagccagaagctcccaccatccgctctctacacgagctgaagtatataggggtgggtaaggccggaagggcatgttcagtagttgttgacatcgcattaaccagagggtttttctctcgtttctgttgtgttaagctgtgagctaacatgtttttcttgtcaattgtcacattgaagccaaggacatccaagcataacccaaccttttgtcgatactaggatacttatgagagatcttgtggacattattgcgaaaagaattgtcgatgatactattttcttctttgcattccgcaaggacgtgtctgcatttggccctt

SEQ ID NO: 2270 - DNA, 2973 bp, Zea Mays
gccagcgaacgcctcctaggccacgtccgcgcggccgaacaaccactccggcacgcatccaccggcacgcggggccacattgacgggcacgcacgcgcaggccaggcaggcagaggccacaggcggtggccttgtggcgcggcgcaggagcaggccttgccgcgccggcgctgccttgctcgcgaagacgccagttcccaactatttgcggagccgagagccggaggcggaggcgttaagcgtaaggcagcgagcataaagcgccctggcgcccgcccgcccgccgcagccgcaccaaagcctagccaccctcctctgccctcgagtccacgtctcgtctcctcgctccactcgccagtcgccacccaagccggagcgaacccgctgcccgaatagagtaatccgaggagccagccaaatggtggtggccgcgtgagtgtagggtccgggggatatagagagagagagactaggggccggccgcgatgcgggcgtgggagatgcacccgctctgctgcctcgccggtgagtggccggcctcgggcggcgggctcgcgcccggcgaccgctccccgccggcggaggacgcgggggcggcgccggcggtggcgggggtcctgtacaagtggaccaacatcggcaaggggtggcgcccgcgctggttcgcgatccgcggcggcgtgctcgcctactccaagatccggcgccgcgtcgcggcggagccgcgtcccgaggccgcgggcggcgtccggctgatcggggtggcgcgcggcgccgcgggcgccgctgagcgccccatcggattcgtgcctctcaagatatcatcatttagtgaaagtaaatcagatgataaacggttttatataattactccgaccaaaacacttcaactgaggactggttgtgctaatgaccgggcgacttggattgaagcgcttgtcactgcaagaagcgaatattcttttaatggggatttatcaggtgatcagaatgatgcatcattttccacagaaaagctcagaaatcgcttgaatgctgaaggcgttggcgaggccgttattaaagactgtgagcagattattcattcagaattttcgcagtaccaaacacagatgaagcaacgttgtgaagagtatttaagctttattggcactcttccacaggatgttgaggtagttaattcagtagattcaactgtccctgagaagccacggctagagctgttcaagcatgactgctccagctctggaaaatgtagtgaatatagcaacacagaatcttctgatgatgttggcaagcaagagattagtgaactatcagacggagatgaatttcatttctatgacacaaggcaaagtttcagtgaatttgcttctagtcctgctgacccgagaaagggatgtttaaacaacggaaatgaagatcataaatctgttgaatcattgacggttgacaaggctgagaaatatatgctatcacattcaaaaaggcgcttacagttgcctgaaccaatagaaaaggagaaaggagttagcctttggtcaatgatcaaagacaatgttggaaaggatctaacaagagtttgtcttcctgtttactttaatgagcctttatcttctctccagaagtgctttgaagagttggagtattcttatttgttggatcgtgcatatgaatgtggtttaagggggaatggtctgatgagaattctttatgttgctgcatttgcggtctctggatatgcatccacagattcccggccttgcaaacctttcaatccattgcttggggaaacctatgaagctgattaccctgaaaaggggatccgttttttctctgaaaaggtcagtcatcatcctatggtcatggcatgtcactgtgaggggaaaggttggaaattttggggagacagcaatctgaagagcaaattctggggacaatccattcaattggatcctaatggtgtgctaactttagagtttgatgatggagaaattttccaatggagcaaggttacaacaacaattaacaaccttatccttggtcgagtatattgccatcaccatggcacaatgaacataagtgggaatagacgatattcatgcaagctgacttttaaggagcagtctttccttgatcggaatcctcgccaggttcaaggagtcgtcaaggatgctggtggaagcaaggttgcaacattgacggggaagtgggatgaaagtgtgcattgtgtcatcaacaatgatgcctctaaggtgaactctcatggtccacatcagagttctggttccactttgctatgggagaaaaatgagcctccagtcaatcctacccgctacaacttgtccgcatttgcaataacactaaatgagttaacaccagagctcgaggagaagctgccaccgacggattcaaggctgagaccagatcaacggcacctggagaatggggagtacgagaaggccaatgctgaaaaactgcgcctcgagacacagcaacggatggcaaggaagatgcaggagagtggctggaaaccaagatggttccaaagggacagcgaggatggaacgtaccgctacgtcggaggttactgggaggcaagggagcagagaacatgggtcggctgcaatgacatatttggtaacttgtctagcagccagaagctcccaccatccgctctctacacgagctgaagtatataggggtgggtaaggccggaagggcatgttcagtagttgttgacatcgcattaaccagagggtttttctctcgtttctgttgtgttaagctgtgagctaacatgtttttcttgtcaattgtcacattgaagccaaggacatccaagcataacccaaccttttgtcgatactaggatacttatgagagatcttgtggacattattgcgaaaagaattgtcgatgatactattttcttctttgcattccgcaaggacgtgtctgcatttggccctt

SEQ ID NO: 2271 - DNA, 3841 bp, Zea Mays
gtctcgattcgttgcctgattttttccccccgaatttttttatgccgccctccccgtttcgccatgaatggtctcgccattgtttagagcagcgacgcattgcagtgcgtcgattttatcctcaaaactggggaacaccgagcataataatcgttcgttaaatagtgctatcgatacgcatttcgtcgagcaaatcgacttcaaaatttctgctacagttagtggagctggtctcctgcgatccctctcttttccgcgtcgcgtcggatcgaaacagtccaacagaacagacgagcacaggaactccagtctccagctgtaaaagttacctcgtgccgtaccatcgtcacgatatgcggcggggatcgttttgcaaacgcaatagcactcatcatgctcacgctcacgctcctggtaaaggaaacgatggaaagttgctagtatatacactgctacaagaaattgctaatcccctgtcggaataaagcgatgccttgttttgattggagctcgccttttacagcgtcagcttagtgtgaaagaacagtctttgcatcgacttgcaacagtggtgtttcccgtgctccccagggaaggggccagcgacaggtgggggcaaccgggctcccagctggatcttgttcaaacgccctggtgtcttggcgcctccgttttgtgtcgcattggcattttggaagtgcatgggttagtgggaatgtgaggagatatcatcatttagtgaaagtaaatcagatgataaacggttttatataattactccgaccaaaacacttcaactgaggactggttgtgctaatgaccgggcgacttggattgaagcgcttgtcactgcaagaagcgaatattcttttaatggggatttatcaggtgatcagaatgatgcatcattttccacagaaaagctcagaaatcgcttgaatgctgaaggcgttggcgaggccgttattaaagactgtgagcagattattcattcagaattttcgcagtaccaaacacagatgaagcaacgttgtgaagagtatttaagctttattggcactcttccacaggatgttgaggtagttaattcagtagattcaactgtccctgagaagccacggctagagctgttcaagcatgactgctccagctctggaaaataatatagcaacacagaatcttctgatgatgttggcaagcaagagattagtgaactatcagacggagatgaatttcatttctatgacacaaggcaaagtttcagtgaatttgcttctagtcctgctgacccgagaaagggatgtttaaacaacggaaatgaagatcataaatctgttgaatcattgacggttgacaaggctgagaaatatatgctatcacattcaaaaaggcgcttacagttgcctgaaccaatagaaaaggagaaaggagttagcctttggtcaatgatcaaagacaatgttggaaaggatctaacaagagtttgtcttcctgtttactttaatgagcctttatcttctctccagaagtgctttgaagagttggagtattcttatttgttggatcgtgcatatgaatgtggtttaagggtatgtctgtttctctaccttcctgttttccttgacccatacattttcttttgaatgcgaatctggtccaaacatctacattgaattacttaaatctgctggaaactactgttgggggaattatccaatagtagggaataaacgacccatgaagagaaactggttaacacaatggccggcatgaaatacatttttttcaacccaatgacataggataatattttaaattaggaaatttgcactttcagtctttaaaaaacagcactggatattggactcaatttttgactgatggagttatacttcatttaagtcagtgtttttttctaaaaaacaaatcaaccatgtggcattcccttagctttgttttgaaatagttactggaacttaagtggtcagaaagatcgctgaaccagttcacaaggaggtaggcaggtagctacattttgtgagcacctaggtttcaaggtttgagcctgggtgggtggcctcgatgggagactctaccgaccaagttatcactcagttctcagactaatggtgtttcttatttatctataaattgatttaacaataccataataattttgcttctgcattcaggggaatggtctgatgagaattctttatgttgctgcatttgcggtctctggatatgcatccacagattcccggccttgcaaacctttcaatccattgcttggggaaacctatgaagctgattaccctgaaaaggggatccgttttttctctgaaaaggtcagtcatcatcctatggtcatggcatgtcactgtgaggggaaaggttggaaattttggggagacagcaatctgaagagcaaattctggggacaatccattcaattggatcctaatggtgtgctaactttagagtttgatgatggagaaattttccaatggagcaaggttacaacaacaattaacaaccttatccttggtcgagtatattgccatcaccatggcacaatgaacataagtgggaatagacgatattcatgcaagctgacttttaaggagcagtctttccttgatcggaatcctcgccaggtaaagaaagacaaaaaaatcacccataagatttatatgggttgtgctaatatatggctctatggaaggttcaaggagtcgtcaaggatgctggtggaagcaaggttgcaacattgacggggaagtgggatgaaagtgtgcattgtgtcatcaacaatgatgcctctaaggtgaactctcatggtccacatcagagttctggttccactttgctatgggagaaaaatgagcctccagtcaatcctacccgctacaacttgtccgcatttgcaataacactaaatgagttaacaccagagctcgaggtacacatggaacatacatatatcccataatctgagttctgttagctcttaacctaaaaggctacgacacatcttttacgctcttgttaaggagaagctgccaccgacggattcaaggctgagaccagatcaacggcacctggagaatggggagtacgagaaggccaatgctgaaaaactgcgcctcgagacacagcaacggatggttgtacacattttacattgctatactttttttttctcatgaaagctacatcatgatcactgatcgactccatttctacattgtttgggcactgcttgcaccttgagatcttgcatgtacatggtggactgatttcccatcatgggatgtttaatgcatttttttattttgccttaactgaagtcttgtatgtcttggtctgcaggcaaggaagatgcaggagagtggctggaaaccaagatggttccaaagggacagcgaggatggaacgtaccgctacgtcggaggttactgggaggcaagggagcagagaacatgggtcggctgcaatgacatatttggtaacttgtctagcagccagaagctcccaccatccgctctctacacgagctgaagtatataggggtgggtaaggccggaagggcatgttcagtagttgttgacatcgcattaaccagagggtttttctctcgtttctgttgtgttaagctgtgagctaacatgtttttcttgtcaattgtcacattgaagccaaggacatccaagcataacccaaccttttgtcgatactaggatacttatgagagatcttgtggacattattgcgaaaagaattgtcgatgatactattttcttctttgcattccgcaaggacgtgtctgcatttggccctt

SEQ ID NO: 2272 - DNA, 2458 bp, Zea Mays
ccctggtgtcttggcgcctccgttttgtgtcgcattggcattttggaagtgcatgggttagtgggaatgtgaggagatatcatcatttagtgaaagtaaatcagatgataaacggttttatataattactccgaccaaaacacttcaactgaggactggttgtgctaatgaccgggcgacttggattgaagcgcttgtcactgcaagaagcgaatattcttttaatggggatttatcaggtgatcagaatgatgcatcattttccacagaaaagctcagaaatcgcttgaatgctgaaggcgttggcgaggccgttattaaagactgtgagcagattattcattcagaattttcgcagtaccaaacacagatgaagcaacgttgtgaagagtatttaagctttattggcactcttccacaggatgttgaggtaattttttctcgtaattgaataggtaaaataagccatttatagagttgcagttcatattacaatatcttattggttctaccatgtcataactaatgctggttttcctttagaatcatatacctgagtgttatattttttcttggattgggtgctggatgtgtctataatttatggattaattgctgtatattcagcaggttacaatcatgctatatgtttttttggtagttaattcagtagattcaactgtccctgagaagccacggctagagctgttcaagcatgactgctccagctctggaaaatgtagtgaatatagcaacacagaatcttctgatgatgttggcaagcaagagattagtgaactatcagacggagatgaatttcatttctatgacacaaggcaaagtttcagtgaatttgcttctagtcctgctgacccgagaaagggatgtttaaacaacggaaatgaagatcataaatctgttgaatcattgacggttgacaaggctgagaaatatatgctatcacattcaaaaaggcgcttacagttgcctgaaccaatagaaaaggagaaaggagttagcctttggtcaatgatcaaagacaatgttggaaaggatctaacaagagtttgtcttcctgtttactttaatgagcctttatcttctctccagaagtgctttgaagagttggagtattcttatttgttggatcgtgcatatgaatgtggtttaagggggaatggtctgatgagaattctttatgttgctgcatttgcggtctctggatatgcatccacagattcccggccttgcaaacctttcaatccattgcttggggaaacctatgaagctgattaccctgaaaaggggatccgttttttctctgaaaaggtcagtcatcatcctatggtcatggcatgtcactgtgaggggaaaggttggaaattttggggagacagcaatctgaagagcaaattctggggacaatccattcaattggatcctaatggtgtgctaactttagagtttgatgatggagaaattttccaatggagcaaggttacaacaacaattaacaaccttatccttggtcgagtatattgccatcaccatggcacaatgaacataagtgggaatagacgatattcatgcaagctgacttttaaggagcagtctttccttgatcggaatcctcgccaggttcaaggagtcgtcaaggatgctggtggaagcaaggttgcaacattgacggggaagtgggatgaaagtgtgcattgtgtcatcaacaatgatgcctctaaggtgaactctcatggtccacatcagagttctggttccactttgctatgggagaaaaatgagcctccagtcaatcctacccgctacaacttgtccgcatttgcaataacactaaatgagttaacaccagagctcgaggagaagctgccaccgacggattcaaggctgagaccagatcaacggcacctggagaatggggagtacgagaaggccaatgctgaaaaactgcgcctcgagacacagcaacggatggcaaggaagatgcaggagagtggctggaaaccaagatggttccaaagggacagcgaggatggaacgtaccgctacgtcggaggttactgggaggcaagggagcagagaacatgggtcggctgcaatgacatatttggtaacttgtctagcagccagaagctcccaccatccgctctctacacgagctgaagtatataggggtgggtaaggccggaagggcatgttcagtagttgttgacatcgcattaaccagagggtttttctctcgtttctgttgtgttaagctgtgagctaacatgtttttcttgtcaattgtcacattgaagccaaggacatccaagcataacccaaccttttgtcgatactaggatacttatgagagatcttgtggacattattgcgaaaagaattgtcgatgatactattttcttctttgcattccgcaaggacgtgtctgcatttggccctt

SEQ ID NO: 2273 - DNA, 2218 bp, Zea Mays
ccctggtgtcttggcgcctccgttttgtgtcgcattggcattttggaagtgcatgggttagtgggaatgtgaggagatatcatcatttagtgaaagtaaatcagatgataaacggttttatataattactccgaccaaaacacttcaactgaggactggttgtgctaatgaccgggcgacttggattgaagcgcttgtcactgcaagaagcgaatattcttttaatggggatttatcaggtgatcagaatgatgcatcattttccacagaaaagctcagaaatcgcttgaatgctgaaggcgttggcgaggccgttattaaagactgtgagcagattattcattcagaattttcgcagtaccaaacacagatgaagcaacgttgtgaagagtatttaagctttattggcactcttccacaggatgttgaggtagttaattcagtagattcaactgtccctgagaagccacggctagagctgttcaagcatgactgctccagctctggaaaataatatagcaacacagaatcttctgatgatgttggcaagcaagagattagtgaactatcagacggagatgaatttcatttctatgacacaaggcaaagtttcagtgaatttgcttctagtcctgctgacccgagaaagggatgtttaaacaacggaaatgaagatcataaatctgttgaatcattgacggttgacaaggctgagaaatatatgctatcacattcaaaaaggcgcttacagttgcctgaaccaatagaaaaggagaaaggagttagcctttggtcaatgatcaaagacaatgttggaaaggatctaacaagagtttgtcttcctgtttactttaatgagcctttatcttctctccagaagtgctttgaagagttggagtattcttatttgttggatcgtgcatatgaatgtggtttaagggggaatggtctgatgagaattctttatgttgctgcatttgcggtctctggatatgcatccacagattcccggccttgcaaacctttcaatccattgcttggggaaacctatgaagctgattaccctgaaaaggggatccgttttttctctgaaaaggtcagtcatcatcctatggtcatggcatgtcactgtgaggggaaaggttggaaattttggggagacagcaatctgaagagcaaattctggggacaatccattcaattggatcctaatggtgtgctaactttagagtttgatgatggagaaattttccaatggagcaaggttacaacaacaattaacaaccttatccttggtcgagtatattgccatcaccatggcacaatgaacataagtgggaatagacgatattcatgcaagctgacttttaaggagcagtctttccttgatcggaatcctcgccaggagtcgtcaaggatgctggtggaagcaaggttgcaacattgacggggaagtgggatgaaagtgtgcattgtgtcatcaacaatgatgcctctaaggtgaactctcatggtccacatcagagttctggttccactttgctatgggagaaaaatgagcctccagtcaatcctacccgctacaacttgtccgcatttgcaataacactaaatgagttaacaccagagctcgaggagaagctgccaccgacggattcaaggctgagaccagatcaacggcacctggagaatggggagtacgagaaggccaatgctgaaaaactgcgcctcgagacacagcaacggatggcaaggaagatgcaggagagtggctggaaaccaagatggttccaaagggacagcgaggatggaacgtaccgctacgtcggaggttactgggaggcaagggagcagagaacatgggtcggctgcaatgacatatttggtaacttgtctagcagccagaagctcccaccatccgctctctacacgagctgaagtatataggggtgggtaaggccggaagggcatgttcagtagttgttgacatcgcattaaccagagggtttttctctcgtttctgttgtgttaagctgtgagctaacatgtttttcttgtcaattgtcacattgaagccaaggacatccaagcataacccaaccttttgtcgatactaggatacttatgagagatcttgtggacattattgcgaaaagaattgtcgatgatactattttcttctttgcattccgcaaggacgtgtctgcatttggccctt

SEQ ID NO: 2274 - DNA, 2520 bp, Zea Mays
ccctggtgtcttggcgcctccgttttgtgtcgcattggcattttggaagtgcatgggttagtgggaatgtgaggagatatcatcatttagtgaaagtaaatcagatgataaacggttttatataattactccgaccaaaacacttcaactgaggactggttgtgctaatgaccgggcgacttggattgaagcgcttgtcactgcaagaagcgaatattcttttaatggggatttatcaggtgatcagaatgatgcatcattttccacagaaaagctcagaaatcgcttgaatgctgaaggcgttggcgaggccgttattaaagactgtgagcagattattcattcagaattttcgcagtaccaaacacagatgaagcaacgttgtgaagagtatttaagctttattggcactcttccacaggatgttgaggtagttaattcagtagattcaactgtccctgagaagccacggctagagctgttcaagcatgactgctccagctctggaaaatgtagtgaatatagcaacacagaatcttctgatgatgttggcaagcaagagattagtgaactatcagacggagatgaatttcatttctatgacacaaggcaaagtttcagtgaatttgcttctagtcctgctgacccgagaaagggatgtttaaacaacggaaatgaagatcataaatctgttgaatcattgacggttgacaaggctgagaaatatatgctatcacattcaaaaaggcgcttacagttgcctgaaccaatagaaaaggagaaaggagttagcctttggtcaatgatcaaagacaatgttggaaaggatctaacaagagtttgtcttcctgtttactttaatgagcctttatcttctctccagaagtgctttgaagagttggagtattcttatttgttggatcgtgcatatgaatgtggtttaagggggaatggtctgatgagaattctttatgttgctgcatttgcggtctctggatatgcatccacagattcccggccttgcaaacctttcaatccattgcttggggaaacctatgaagctgattaccctgaaaaggggatccgttttttctctgaaaaggtcagtcatcatcctatggtcatggcatgtcactgtgaggggaaaggttggaaattttggggagacagcaatctgaagagcaaattctggggacaatccattcaattggatcctaatggtgtgctaactttagagtttgatgatggagaaattttccaatggagcaaggttacaacaacaattaacaaccttatccttggtcgagtatattgccatcaccatggcacaatgaacataagtgggaatagacgatattcatgcaagctgacttttaaggagcagtctttccttgatcggaatcctcgccaggagtcgtcaaggatgctggtggaagcaaggttgcaacattgacggggaagtgggatgaaagtgtgcattgtgtcatcaacaatgatgcctctaaggtgaactctcatggtccacatcagagttctggttccactttgctatgggagaaaaatgagcctccagtcaatcctacccgctacaacttgtccgcatttgcaataacactaaatgagttaacaccagagctcgaggtacacatggaacatacatatatcccataatctgagttctgttagctcttaacctaaaaggctacgacacatcttttacgctcttgttaaggagaagctgccaccgacggattcaaggctgagaccagatcaacggcacctggagaatggggagtacgagaaggccaatgctgaaaaactgcgcctcgagacacagcaacggatggttgtacacattttacattgctatactttttttttctcatgaaagctacatcatgatcactgatcgactccatttctacattgtttgggcactgcttgcaccttgagatcttgcatgtacatggtggactgatttcccatcatgggatgtttaatgcatttttttattttgccttaactgaagtcttgtatgtcttggtctgcaggcaaggaagatgcaggagagtggctggaaaccaagatggttccaaagggacagcgaggatggaacgtaccgctacgtcggaggttactgggaggcaagggagcagagaacatgggtcggctgcaatgacatatttggtaacttgtctagcagccagaagctcccaccatccgctctctacacgagctgaagtatataggggtgggtaaggccggaagggcatgttcagtagttgttgacatcgcattaaccagagggtttttctctcgtttctgttgtgttaagctgtgagctaacatgtttttcttgtcaattgtcacattgaagccaaggacatccaagcataacccaaccttttgtcgatactaggatacttatgagagatcttgtggacattattgcgaaaagaattgtcgatgatactattttcttctttgcattccgcaaggacgtgtctgcatttggccctt

SEQ ID NO: 2275 - DNA, 2225 bp, Zea Mays
ccctggtgtcttggcgcctccgttttgtgtcgcattggcattttggaagtgcatgggttagtgggaatgtgaggagatatcatcatttagtgaaagtaaatcagatgataaacggttttatataattactccgaccaaaacacttcaactgaggactggttgtgctaatgaccgggcgacttggattgaagcgcttgtcactgcaagaagcgaatattcttttaatggggatttatcaggtgatcagaatgatgcatcattttccacagaaaagctcagaaatcgcttgaatgctgaaggcgttggcgaggccgttattaaagactgtgagcagattattcattcagaattttcgcagtaccaaacacagatgaagcaacgttgtgaagagtatttaagctttattggcactcttccacaggatgttgaggtagttaattcagtagattcaactgtccctgagaagccacggctagagctgttcaagcatgactgctccagctctggaaaatgtagtgaatatagcaacacagaatcttctgatgatgttggcaagcaagagattagtgaactatcagacggagatgaatttcatttctatgacacaaggcaaagtttcagtgaatttgcttctagtcctgctgacccgagaaagggatgtttaaacaacggaaatgaagatcataaatctgttgaatcattgacggttgacaaggctgagaaatatatgctatcacattcaaaaaggcgcttacagttgcctgaaccaatagaaaaggagaaaggagttagcctttggtcaatgatcaaagacaatgttggaaaggatctaacaagagtttgtcttcctgtttactttaatgagcctttatcttctctccagaagtgctttgaagagttggagtattcttatttgttggatcgtgcatatgaatgtggtttaagggggaatggtctgatgagaattctttatgttgctgcatttgcggtctctggatatgcatccacagattcccggccttgcaaacctttcaatccattgcttggggaaacctatgaagctgattaccctgaaaaggggatccgttttttctctgaaaaggtcagtcatcatcctatggtcatggcatgtcactgtgaggggaaaggttggaaattttggggagacagcaatctgaagagcaaattctggggacaatccattcaattggatcctaatggtgtgctaactttagagtttgatgatggagaaattttccaatggagcaaggttacaacaacaattaacaaccttatccttggtcgagtatattgccatcaccatggcacaatgaacataagtgggaatagacgatattcatgcaagctgacttttaaggagcagtctttccttgatcggaatcctcgccaggttcaaggagtcgtcaaggatgctggtggaagcaaggttgcaacattgacggggaagtgggatgaaagtgtgcattgtgtcatcaacaatgatgcctctaaggtgaactctcatggtccacatcagagttctggttccactttgctatgggagaaaaatgagcctccagtcaatcctacccgctacaacttgtccgcatttgcaataacactaaatgagttaacaccagagctcgagctgccaccgacggattcaaggctgagaccagatcaacggcacctggagaatggggagtacgagaaggccaatgctgaaaaactgcgcctcgagacacagcaacggatggcaaggaagatgcaggagagtggctggaaaccaagatggttccaaagggacagcgaggatggaacgtaccgctacgtcggaggttactgggaggcaagggagcagagaacatgggtcggctgcaatgacatatttggtaacttgtctagcagccagaagctcccaccatccgctctctacacgagctgaagtatataggggtgggtaaggccggaagggcatgttcagtagttgttgacatcgcattaaccagagggtttttctctcgtttctgttgtgttaagctgtgagctaacatgtttttcttgtcaattgtcacattgaagccaaggacatccaagcataacccaaccttttgtcgatactaggatacttatgagagatcttgtggacattattgcgaaaagaattgtcgatgatactattttcttctttgcattccgcaaggacgtgtctgcatttggccctt

SEQ ID NO: 2276 - DNA, 2225 bp, Zea Mays
ccctggtgtcttggcgcctccgttttgtgtcgcattggcattttggaagtgcatgggttagtgggaatgtgaggagatatcatcatttagtgaaagtaaatcagatgataaacggttttatataattactccgaccaaaacacttcaactgaggactggttgtgctaatgaccgggcgacttggattgaagcgcttgtcactgcaagaagcgaatattcttttaatggggatttatcaggtgatcagaatgatgcatcattttccacagaaaagctcagaaatcgcttgaatgctgaaggcgttggcgaggccgttattaaagactgtgagcagattattcattcagaattttcgcagtaccaaacacagatgaagcaacgttgtgaagagtatttaagctttattggcactcttccacaggatgttgaggtagttaattcagtagattcaactgtccctgagaagccacggctagagctgttcaagcatgactgctccagctctggaaaataatatagcaacacagaatcttctgatgatgttggcaagcaagagattagtgaactatcagacggagatgaatttcatttctatgacacaaggcaaagtttcagtgaatttgcttctagtcctgctgacccgagaaagggatgtttaaacaacggaaatgaagatcataaatctgttgaatcattgacggttgacaaggctgagaaatatatgctatcacattcaaaaaggcgcttacagttgcctgaaccaatagaaaaggagaaaggagttagcctttggtcaatgatcaaagacaatgttggaaaggatctaacaagagtttgtcttcctgtttactttaatgagcctttatcttctctccagaagtgctttgaagagttggagtattcttatttgttggatcgtgcatatgaatgtggtttaagggggaatggtctgatgagaattctttatgttgctgcatttgcggtctctggatatgcatccacagattcccggccttgcaaacctttcaatccattgcttggggaaacctatgaagctgattaccctgaaaaggggatccgttttttctctgaaaaggtcagtcatcatcctatggtcatggcatgtcactgtgaggggaaaggttggaaattttggggagacagcaatctgaagagcaaattctggggacaatccattcaattggatcctaatggtgtgctaactttagagtttgatgatggagaaattttccaatggagcaaggttacaacaacaattaacaaccttatccttggtcgagtatattgccatcaccatggcacaatgaacataagtgggaatagacgatattcatgcaagctgacttttaaggagcagtctttccttgatcggaatcctcgccaggttcaaggagtcgtcaaggatgctggtggaagcaaggttgcaacattgacggggaagtgggatgaaagtgtgcattgtgtcatcaacaatgatgcctctaaggtgaactctcatggtccacatcagagttctggttccactttgctatgggagaaaaatgagcctccagtcaatcctacccgctacaacttgtccgcatttgcaataacactaaatgagttaacaccagagctcgaggagaagctgccaccgacggattcaaggctgagaccagatcaacggcacctggagaatggggagtacgagaaggccaatgctgaaaaactgcgcctcgagacacagcaacggatggcaaggaagatgcaggagagtggctggaaaccaagatggttccaaagggacagcgaggatggaacgtaccgctacgtcggaggttactgggaggcaagggagcagagaacatgggtcggctgcaatgacatatttggtaacttgtctagcagccagaagctcccaccatccgctctctacacgagctgaagtatataggggtgggtaaggccggaagggcatgttcagtagttgttgacatcgcattaaccagagggtttttctctcgtttctgttgtgttaagctgtgagctaacatgtttttcttgtcaattgtcacattgaagccaaggacatccaagcataacccaaccttttgtcgatactaggatacttatgagagatcttgtggacattattgcgaaaagaattgtcgatgatactattttcttctttgcattccgcaaggacgtgtctgcatttggccctt

SEQ ID NO: 2277 - DNA, 2167 bp, Zea Mays
ccctggtgtcttggcgcctccgttttgtgtcgcattggcattttggaagtgcatgggttagtgggaatgtgaggagatatcatcatttagtgaaagtaaatcagatgataaacggttttatataattactccgaccaaaacacttcaactgaggactggttgtgctaatgaccgggcgacttggattgaagcgcttgtcactgcaagaagcgaatattcttttaatggggatttatcaggtgatcagaatgatgcatcattttccacagaaaagctcagaaatcgcttgaatgctgaaggcgttggcgaggccgttattaaagactgtgagcagattattcattcagaattttcgcagtaccaaacacagatgaagcaacgttgtgaagagtatttaagctttattggcactcttccacaggatgttgaggtagttaattcagtagattcaactgtccctgagaagccacggctagagctgttcaagcatgactgctccagctctggaaaatgtagtgaatatagcaacacagaatcttctgatgatgttggcaagcaagagattagtgaactatcagacggagatgaatttcatttctatgacacaaggcaaagtttcagtgaatttgcttctagtcctgctgacccgagaaagggatgtttaaacaacggaaatgaagatcataaatctgttgaatcattgacggttgacaaggctgagaaatatatgctatcacattcaaaaaggcgcttacagttgcctgaaccaatagaaaaggagaaaggagttagcctttggtcaatgatcaaagacaatgttggaaaggatctaacaagagtttgtcttcctgtttactttaatgagcctttatcttctctccagaagtgctttgaagagttggagtattcttatttgttggatcgtgcatatgaatgtggtttaaggattcccggccttgcaaacctttcaatccattgcttggggaaacctatgaagctgattaccctgaaaaggggatccgttttttctctgaaaaggtcagtcatcatcctatggtcatggcatgtcactgtgaggggaaaggttggaaattttggggagacagcaatctgaagagcaaattctggggacaatccattcaattggatcctaatggtgtgctaactttagagtttgatgatggagaaattttccaatggagcaaggttacaacaacaattaacaaccttatccttggtcgagtatattgccatcaccatggcacaatgaacataagtgggaatagacgatattcatgcaagctgacttttaaggagcagtctttccttgatcggaatcctcgccaggttcaaggagtcgtcaaggatgctggtggaagcaaggttgcaacattgacggggaagtgggatgaaagtgtgcattgtgtcatcaacaatgatgcctctaaggtgaactctcatggtccacatcagagttctggttccactttgctatgggagaaaaatgagcctccagtcaatcctacccgctacaacttgtccgcatttgcaataacactaaatgagttaacaccagagctcgaggagaagctgccaccgacggattcaaggctgagaccagatcaacggcacctggagaatggggagtacgagaaggccaatgctgaaaaactgcgcctcgagacacagcaacggatggcaaggaagatgcaggagagtggctggaaaccaagatggttccaaagggacagcgaggatggaacgtaccgctacgtcggaggttactgggaggcaagggagcagagaacatgggtcggctgcaatgacatatttggtaacttgtctagcagccagaagctcccaccatccgctctctacacgagctgaagtatataggggtgggtaaggccggaagggcatgttcagtagttgttgacatcgcattaaccagagggtttttctctcgtttctgttgtgttaagctgtgagctaacatgtttttcttgtcaattgtcacattgaagccaaggacatccaagcataacccaaccttttgtcgatactaggatacttatgagagatcttgtggacattattgcgaaaagaattgtcgatgatactattttcttctttgcattccgcaaggacgtgtctgcatttggccctt

SEQ ID NO: 2278 - DNA, 992 bp, Zea Mays
gtcacgtcaagcggattggtcttgggcatcattttcaggttacaacaacaattaacaaccttatccttggtcgagtatattgccatcaccatggcacaatgaacataagtgggaatagacgatattcatgcaagctgacttttaaggagcagtctttccttgatcggaatcctcgccaggagtcgtcaaggatgctggtggaagcaaggttgcaacattgacggggaagtgggatgaaagtgtgcattgtgtcatcaacaatgatgcctctaaggtgaactctcatggtccacatcagagttctggttccactttgctatgggagaaaaatgagcctccagtcaatcctacccgctacaacttgtccgcatttgcaataacactaaatgagttaacaccagagctcgaggagaagctgccaccgacggattcaaggctgagaccagatcaacggcacctggagaatggggagtacgagaaggccaatgctgaaaaactgcgcctcgagacacagcaacggatggcaaggaagatgcaggagagtggctggaaaccaagatggttccaaagggacagcgaggatggaacgtaccgctacgtcggaggttactgggaggcaagggagcagagaacatgggtcggctgcaatgacatatttggtaacttgtctagcagccagaagctcccaccatccgctctctacacgagctgaagtatataggggtgggtaaggccggaagggcatgttcagtagttgttgacatcgcattaaccagagggtttttctctcgtttctgttgtgttaagctgtgagctaacatgtttttcttgtcaattgtcacattgaagccaaggacatccaagcataacccaaccttttgtcgatactaggatacttatgagagatcttgtggacattattgcgaaaagaattgtcgatgatactattttcttctttgcattccgcaaggacgtgtctgcatttggccctt

SEQ ID NO: 2279 - DNA, 1394 bp, Zea Mays
cggcacgcgcgtacttattcttctcccccgccctagttctctccctctcttctcctccacacaccaagcctgccccgccgatcgagcacgtcatcattcgctcgcccagctcgcgggaggagcaggagctaggaagaagcaaacaagcaggccgggggccggggggagagacagagttcacaaaccacacagggaagagtggtggaaggaggaggaagaggggtacgtcaagagagcgagttcattattcatacgtgcggcggcgacatcgtcgcgcgcacgcaggatgtcggcagcgtcgagcgccacgtgccgcgtatgcggtggcgcaggggagtgcgcgtgccgccacggccacgggatcggcggcgcgcggtgcggcggggtcgtcgctgtcgccgacctcaaccgcgggtttcctgcgttgtggcaccagccggaggaggaacccagtggcgctggcgcggcgccggggctgcacgagttccagttcttcggccacgacgaggaccacgacagcgtcacgtggctgttcaccgacccgtctccccacctgcaccgcgggccggcggccgccgaggtcgggaacggggtggccgaggctgagcagcggaggccgccgccggtgttcgacggcgggtacgcgcacgcacagtacggggagctgccgggtcacggcctcacgttcgacgtgccgctgagcggccgacgcggcggcgaggtggcctccgtggcgccggttctggaggcagggctggggctaggcggtggcggtggcggcgatctggccacgtcctccagcgccacaatcatgtccttctgcgggaccacgttcacagacgcggcgagcgccgtcccgggcgacgcggccgcagcggcgcccaacggcagcgcaagcggtgccgccgacccggcagtggaccgggaggcgaaggtgatgcggtacaaggagaagcggaagaggaggcgctacgagaagcagattcggtacgcctcccgcaaggcctatgcagagatgcggccgcgcgtcaagggccgcttcgccaaggtgcccgacggtgaggctccgtcgccaccggcgccggccgcagcatgctacgaaccaggccggctcgacctcggatggttccgttcatagcaaagaggccactggttaaattcttttttttagagtgtgtaacgtacagataaactacaagcttgatagggtgtttgatttgaggaataaattaatttattatcttctcatttctcattatttttatttggtttgtgacatatgaccttatagttagttactactaacatgagaaatagggtaatcctaccaaatttaaagaataaacttatgatacaccacttcatataggatagagtgattcctcaaacaaaac

SEQ ID NO: 2280 - DNA, 2376 bp, Zea Mays
cgcgtacttattcttctcccccgccctagttctctccctctcttctcctccacacaccaagcctgccccgccgatcgagcacgtcatcattcgctcgcccagctcgcgggaggagcaggagctaggaagaagcaaacaagcaggccgggggccggggggagagacagagttcacaaaccacacagggaagagtggtggaaggaggaggaagaggggtacgtcaagagagcgagttcattattcatacgtgcggcggcgacatcgtcgcgcgcacgcaggatgtcggcagcgtcgagcgccacgtgccgcgtatgcggtggcgcaggggagtgcgcgtgccgccacggccacgggatcggcggcgcgcggtgcggcggggtcgtcgctgtcgccgacctcaaccgcgggtttcctgcgttgtggcaccagccggaggaggaacccagtggcgctggcgcggcgccggggctgcacgagttccagttcttcggccacgacgaggaccacgacagcgtcacgtggctgttcaccgacccgtctccccacctgcaccgcgggccggcggccgccgaggtcgggaacggggtggccgaggctgagcagcggaggccgccgccggtgttcgacggcgggtacgcgcacgcacagtacggggagctgccgggtcacggcctcacgttcgacgtgccgctgagcggccgacgcggcggcgaggtggcctccgtggcgccggttctggaggcagggctggggctaggcggtggcggtggcggcgatctggccacgtcctccagcgccacaatcgtgagtgcttgcgcttcggttccaaaatctctttcctgaatcatgatcgcccctggacaagtctaataatttcaagatgatgtgcatgcggtttgtgttcgtatgtgcacgctgaattaaccgctgacgatcgatgtgtccctccaggcttgccagccacaccactgctcgtgctcggccatttcagtttcgagtaaacatgcatgcatcttgacttggtgcaatcaatctatcgcgctagcttcctgtaaagattccgctagcgcacgtacatgattccgctagctagcttaatttgcatctttatatttatctagctgtttggcccgattaaaagtgactgaaaaatagtgacaaaagccgctgtcaatttgtggtccagcgctccaactagtaaaggactacggaggaatagctagtccaaaacatgaaccatcatgtgactaagttttcctgttcgtctctacctatccaataggatgaagccacattattatcaaagcttgactgtgttatttatctaagaagaaggtacagaaactgcaaaccatgcatgcatacatactaatttatagtatataggcagatggatgggaacaatcatggagaacatcagttaattgcagatttacatttgattttatttgttcagaggctactgacttactgagaacactaaaaggacatttgattggatttacaaatgaactcgaacaaaggtccctgcccaaatgcaagtttttttcctgtctcttcacccttcagtatcgctatctttctgtcgacatgaaaaccacaacgcaattttctttcttgcttgcttgcaccgtctgtctataaacatgctcacgccggagtgtcttgaagataaccatggccaccaggcagatcaactctcatttcatgtgtggttctacaatattgatcccaacttctcgtgtttctatgttcgagtagtgttaatagtgtattcggcacgtccttttcagatgtccttctgcgggaccacgttcacagacgcggcgagcgccgtcccgggcgacgcggccgcagcggcgcccaacggcagcgcaagcggtgccgccgacccggcagtggaccgggaggcgaaggtgatgcggtacaaggagaagcggaagaggaggcgctacgagaagcagattcggtacgcctcccgcaaggcctatgcagagatgcggccgcgcgtcaagggccgcttcgccaaggtgcccgacggtgaggctccgtcgccaccggcgccggccgcagcatgctacgaaccaggccggctcgacctcggatggttccgttcatagcaaagaggccactggttaaattcttttttttagagtgtgtaacgtacagataaactacaagcttgatagggtgtttgatttgaggaataaattaatttattatcttctcatttctcattatttttatttggtttgtgacatatgaccttatagttagttactactaacatgagaaatagggtaatcctaccaaatttaaagaataaacttatgatacaccacttcatataggatagagtgattcctcaaacaaaac

SEQ ID NO: 2281 - DNA, 407 bp, Zea Mays
ctcgaatgcgggcgacagaattaacgcaacgcaactgctcagctccactccctcacgctccctccccacgacctccacttcgccccattcatcgcacaaccgaggatgataaatggtgaccatgcgacctccacttcgccccgttcacttcgctccctacctctgtgttcgagttcgcgtggacgccggagccacccgaagagagaggaggaagcagcgcgcggacgccagatccgaaggacggctcgccgctaggacgttccttttctgcctctatgttagagcgcacgcggacaccggagccggaagacgcatcgccgccaggacgcgcgggatagcgaggtccacgaggttccactacacgccgctaggtccgacgaccaagcgattgaggaactcgaagcacc

SEQ ID NO: 2282 - DNA, 798 bp, Zea Mays
gaattaacgcaacgcaactgctcagctccactccctcacgctccctccccacgacctccacttcgccccattcatcgcacaaccgaggatgataaatggtgaccatgcgacctccacttcgccccgttcacttcgctccctacctctgtgttcgagttcgcgtggacgccggagccacccgaagagagaggaggaagcagcgcgcggacgccagatccgaaggacggctcgccgctaggacgttccttttctgcctctatgttagagcgcacgcggacaccggagccggaagacgcatcgccgccaggacgcgcgggatagcgaggtccacgaggttccactacacgccgctaggtgaagagcaggtatccctggaggaggactactacgacgagcccgatgagatatagacgtcgtcttccagttaactgttggtgccaaggatatggttatattatttcggtttagttattatcagctattattttggtttagttattatctgtcttgaggacgtcccaaatttgtttggcactcttctacccttgcaccttgttgtactcctctcgacacatggaagcgaggagtatagaggtggcttgggaattgaagtgccttatttgggcggactcattggaatcgtaatcctcgtcgcccacctgtggtacctgcgctccatagtccatactcaacaatatcccatatgcttttgtggagtgaggttagatggtgccacattttatcactccacatgcaataatcttcaccatcaaaatatggtggtttgcctaggggaac

SEQ ID NO: 2283 - DNA, 723 bp, Zea Mays
aaccgaggatgataaatggtgaccatgcgacctccacttcgccccgttcacttcgctccctacctctgtgttcgagttcgcgtggacgccggagccacccgaagagagaggaggaagcagcgcgcggacgccagatccgaaggacggctcgccgctaggacgttccttttctgcctctatgttagagcgcacgcggacaccggagccggaagacgcatcgccgccaggacgcgcgggatagcgaggtccacgaggttccactacacgccgctaggtccggtgaagagcaggtatccctggaggaggactactacgacgagcccgatgagatatagacgtcgtcttccagttaactgttggtgccaaggatatggttatattatttcggtttagttattatcagctattattttggtttagttattatctgtcttgaggacgtcccaaatttgtttggcactcttctacccttgcaccttgttgtactcctctcgacacatggaagcgaggagtatagaggtggcttgggaattgaagtgccttatttgggcggactcattggaatcgtaatcctcgtcgcccacctgtggtacctgcgctccatagtccatactcaacaatatcccatatgcttttgtggagtgaggttagatggtgccacattttatcactccacatgcaataatcttcaccatcaaaatatggtggtttgcctaggggaac

SEQ ID NO: 2284 - DNA, 2338 bp, Zea Mays
ctcttctccttgggatcatccttctcgtccgaacccccacccccacccaccgcctcccggcagcgtagttactcccctccctcgccatcaatcctcctccccctgttcgctgtgcagtgctcagtgcatgccactcccgtttctccctccaccaccattcaccaccaccagtgccactgccactgccacacacccacaccgaattacgcggcggccctgcgcgcaggatgctctttgcctgcctgcctgcctgctactgctcatctctgcccatatagcgcgcggctagcagcttccggatggacgcgtgcgatgtagcagtggccagctactcggcagcagcgctcgctctctagacgcttgggcttggcacgccgtcgccgagatcatccatggccggcgcaggccaggaagaagaaaaggtggagcacgagggagaagaaatggtggccggccggcagcaaggatcgtcgcgcggcgccgtggagcaatgcggcggccaagcacagcctgccgtcaccgctccatgctcgtccaagacaaaggagctgatagcggagatcgaattgctcgaggaggaaatcgccaaccgcgagcagcacgttcttactctctacaggagcatcttcgaccagtgcatgtctgggccaccgtctgggcagagctctggcatctcgtcccccgcgcacgccaaaactatcaccgctaggacacgaaggcagccgagcataatatcgagtgcattttgctcgtccaagaagctcccgctccagcccttccacatcacagagtcactctccgagtcgggaagaaccaagaacacgctcaaggctaagatcaagcacccatctttttcaagcgaaacattggatagcagccattctacttccttcccaccggacccaaaaaagctaccttattctgggagtggcggctctcttgcccgcactctgaaagaccacctctaccaatgcccaagcaaaatatccgaagaaatggtcagatgcatggcatccatatactatcttctgcgcaccgaggcgccagcaggaaagcctgagaaggcccgctcgccattcttgtcaaggtcatcgacgaatgtcatccttcctcggcgggtgaacggagaggaaaacagcgcaccgaacaacaggtgcacggtggaaatagcttccatatcagttgacaagaaccagatgccagatgtctcttacgcgatcacccactacaggttgcttgtggaacagcttgaaagagttgatctgagcgtgtcggagaacagcgttaagttggccttctggattaacgtttacaattcgcttatcatgcatgcgtatctggcatatgggattccaaacagctctctgaaaagaatggcgctatttcacaaggctgcctacaatattggagggcatgccattaccgccaatgctatcgagcacgccttgctgtgcttcaggtctccacggatcggtcgttggttcgagtccatcctctcgacggctatgcggaagaaatgcccggacgagaagcagctggtccagctcaagttcggcctgcaggagtgccagcctctggccctcttcgccctgtgcaccggcgcttcgtctgaccccatgctgcgggtgtacacggcgaagaacgtgatggaggagctggagcgcgccaagcgagagttcctgcaggcgacggtggtggtgcgcaagtccacgaagaagctgttcctgccgcgcctggtggagcggtacgcgagggaggcgtgcgttggccccgacagcgtcctcccgtgggcgcagcgcgagggggccgtcgccgtcgtcgacgaccggccgcagcaggaggccgcccagcggggcgtggggagccggcgcaaggccgtgcaggccgtagagtggctgccgtacgccaccagattccgctatgccttcgccaggagcatggtcgacaagccacactgctagctgcttcgcctcgcacagtcgcactcctcgcatcgcagctgttgccgtctggccccgtttccgctggagaaagacatctgatcgctgtggcgcagccattctgatggctagatgtaaatgtctcgttgatgctgcgatgttgacggctagatagtactgctccgttccgtagtgaacaagtggcaaggatgggacgaagggtttgactaattttgcacaaggtgtacagaagctagttgatcgctattatttcaggtttcagcagcagtctgttggagaccatttgaattcattcgaattgtttatctacttggtcgtttgtatttccattggtgtgagcaacttgtccgatttgggacagcttcagctctagaaaa

SEQ ID NO: 2285 - DNA, 50 bp, Zea Mays
cctagttttgaattttgagagggtagcagggtgcgcaagacgtatctgag

SEQ ID NO: 2286 - DNA, 1639 bp, Zea Mays
atcaataaaaatctgggtcagtttaaaaatccgacacctttcctcactaaaacatgcttgatcgtacccgagttttgttttttatcacttgtcgatccgaacgagcgaagcccgagaaactgcacctaaaaccatcagccggtgttctgcttcttggtgcccagtttgtctccggattagccgtcaaacccgtctctgaactctgctgccatgtactaccttctaacgacgcatgaagtcgctggtcttcgcggacgcctttggcacgcctggttgaactgaattgtgacccgtcgtttacgtgtcgaagaacgcctttggagtctggccaggagacgacgaggtcagccgatggccaaccggggcgccatcgtctgacccgcttcccctatccgcaccgcagccttttagtttcgtctcgtgcggcgagcacaaaattctttgccgcctccgcgacaactaggccggcctgcaacgggaataaccgcccgccccgcgcatagcctaacggggcagcttgcttggctctgatgctgccatgtcgcgcgcgcctcgtatcgtatcggtgctgttcctgttgcttggccccctccccgtctccttggtccacgtgaccgccgacgggcccgtgacggcgacggttcaccggcaggacggcaccgcgtggcgctcgttcaagcagctgctggacgcgcggcgaggcagccacgttgagggcctcggcgagctcaagcgctacctggcgaggttcgggtacatgcctggggcgggggcggagcacgagccgacgacggacgcgttcgacgcgcacatggaggccgccgtacggcggtaccagtccatgcttagcctgccggtcacggggcagctcgactccaccacgctggaccggatcatggccccgcgctgcggcgtcggcgacggcggccacgctgtgccggtatccctctcggggtcggcggcggcgagcccggacggcgccgtcagccggttcacgttcttcaagggtgagccgcggtggacgcagccggacccgctcgtgctcacgtacgccatctcgccgaccgccaccgtcgactacctgcctgccgggaccgtgcgcgcggtgttccggcgcgcgttcgcgcggtgggcgcgggtcatccccgtgggcttcgtcgagaccgaagactacgaggcggccgacatcagggtgggcttctacgtgggcagccacggtgatgggatccccttcgacggaccgctcggcgtgctcggccatgccttctccccgaagaacgggcgcctccacctcgacgccgcagagaggtgggcggttgacatggacacggaaacggtgcactcggccgtcgacttggagtccgtggccacgcacgagattgggcacgtcctcgggctggggcactcgtcgtcacccaaggcggtcatgtacccgagcctcagcccgcgggaaaagaaggcggagctcaccgtcgacgacatcgaaggcgtccagtggctgtatgggtccaacccgggattcagcctcagctcgctttaccagcaggactcctccatggcgtcgggagggagcagttggcttcctgcctcggctagattagtttgtgcagttctggtcatgctagtgacgcacttgtag

SEQ ID NO: 2287 - DNA, 1543 bp, Zea Mays
cgccatcatataattgtttctctagaaatgttaattccacatccactcaacaatggtagcttaaagaatttctggaagcaattgaatgacagtgctaagaagaaaaatatcagatgaggtggaaacatactgctagcatcaaaagatgttgtgtttctccttggtgcgtaaaaacagtgcaagagactagtgcataaaaggattgcaaagcagcatggtcctcattatttgtcaacgaacatggcacagcataatgctcagagtactatattgaatttaggatttaggatatcaaagcaacagccacaagaataactagtgataagaaaagaatggccagtttactagtatcccttaactggcaagagactcttctgtaaacatatttacagatagaaagctagaagtacaagcaaagcatgcaacatgaaagcagtgtccgcaacaacctgaaggaaaaatttaggcaattgaccaattagctcattatacaagatgtagtcgcaaaaaccacatctaggtgaataagttgcacagctgaaaatatgcgaccagctaagaagtcaacatgctacctcaagataaaacatagagacattacaatggaacatcaaaacgaatagtcagtttgcaccagatccaaaagaacactatagaatccatgcagcatctcttttttgtgatgaaaaattcttgccttttgatgtcaaaactaaactattggttcataccacactgtgagttaagtgtcagaaaaggaaccagtgggcaaagtatttccttcgattggcacaacaacacgagttgatgtaggtgggcttactgaccatccacacagggagtgccaccaaagaggctgcggtgtgtggttggctaattagccaccaagtccaaaaacagacttaatcataaccttctatgtttttcagcagaatatatcggccatagacatcgttattgaaatatgcgattggataagaagtcagcatgctacctcaacataaaacatagagacattacaatggaacatcaaagcgaatagtcggtttgcaccagatcaaaacaacaatatataatccatacagcatcgctttttttaacgatgaaaatttctgccttttgatgtcaaaactaaactattggttattaccgagttgtgagttaaagtgtcagaaaaggaaccactaggcaaagtatttccttcgattggcacaacaacacgagttgatgtaggtgggcttactgaccatccacacagggagtgctgccattgaggctgcggtgtgtggttggctaattagccaccaagtcgagatacagacttaaccataaccttctacgttttttcagcagaatatgtcggccatggacatcggtattgaactgaagttaaaagtggcccgccattacaaatccaacaagcaacagatctagaaacttcgataatcaaatatatcatagcaagatgtttaccacgaaaataggagggggaaggggattacccagacgaaatccaccggtgaagtttttttcttcaatagga

SEQ ID NO: 2288 - DNA, 1130 bp, Zea Mays
ctccagtccataccctccaactctctctccccctcctcagtcctctctcacacacacactcactctcgtcaccgaagactagcaaggctagctactagctcgtactggaactagctcgtttcaaggaacttgccgcgtgccaattgcataaagcgaggaagctgccgagctggagtggctatccaagttcgtggacgactcctactcggacatgcccaattactcgtcggcggccgcgcacgccgcaatggcggcggcggcagcaggcaacggaggaggcggcacctcggccggccaagacagctgcgtcaccgcggcgccagctggccgcggcgcgcgtagcaagcggtcctcccgcgcgcccgcggcggcggcgtggcactccctcgtgtcgcgcccaccgtcgcagccgtcgccatcctcgtcgtcctgctcgtcttcggacttcccgtcgtcgtccaacaggccagcgcgcggcaggaagagcccggggcccggcggggacgcggtggcgggctcggacggcggcgtgcggcggtgcacgcactgcgcgtcggagaagacgccgcagtggaggacggggccgctgggccccaagaccctgtgcaacgcgtgcggcgtgcgcttcaagtccgggcggctcgtgcccgagtaccgccctgcggccagccccaccttcgtgctcacgcagcactccaactcgcaccgcaaggtcatggagctgcgccgccagaaggagctcatcctcatccgcggaagccaccgcgacgccgccgcggctgcaggagcaggatccgccgggccgaggccggagctcatgttccgcgactacggcgtgtgttagttagctgcggcactgaggaagctcgatcgcgtcgtgcttgtgcattgcatgcgtgggagcttctttagatccgcctcttgcgaaattctgccgcgtttcttttcctcctttctttcccttccgatccctgcgtattccagacattttcgttttttcttttgttaattattacattgttggtacgacctacctcctccctgcttcttctaagttctaatgagagagcaatgaattctgttggtacaaattgtggtcgttttgtgagtaatcatgctcctaaacccat

SEQ ID NO: 2289 - DNA, 2856 bp, Zea Mays
cgccaatctctcctccgtcctcatacacatcacaagagcggggcacacgatgcgttgcattgcatggctccgccacacacaccccttgcatgtaccccacccaccacggcggcataagtatctccgccggctacgcgcgatccaggcccggccgcgtgcgtgcgtgcgtgcgacgactgcacccatacacacatatacgcgctctggctggctgcctgcctggcttgcggagctccgtttcggccggccatctctcgctacgctacgagcgcgcgcggcccccgcgcccgtgtcttcccgctgtcgaccgtcgtgttgatcgtacatgcagctgctagtagcgaactatagttgcagaccgcatcagtgcgtgacaagaggatatatattatcagacacgcacgcgatcgcgcggagatgaaccagtgcgtgccgagctgggatctggtggacgacccgacggcggcggtagctggcggcggaggcggcctaaaccatcaggtctcgacgaccgggggcgcgcaccggggcctgctcctgcaggcgtcagctggaggagcaggcggcgggggcgcgttcgctcccgtcgtcgtgcccatgtcgaaccagtactacgaggtggcggagctgacgtgggagaagggcaacatctcctcccacggcctgctcaaccgcccggcgcacaataagtacccgcccgccgcggcgccgtcgtcggctcagctgcatgccatagcaggaggaggcggccgcggcggcgggtcgccatccggggaccgcgagacgctcgaggcggtggtcggcgaggcggccgcgcggtcgcacttcctctcgcagccggcgccgccgtggctgatcggcgccgacgccgtggcgcgggccgcggcggacgcgctagtgccgtgcgccgcaagggcgggcgagtccgctgcagacggcggagaagcgggcgcctcgaggaggaagcggccgcgcgtggtcggcgacgacagtctggtggtgtgcgccagccaggggagcaccgcgcctcgccgccgcggcgagagcgcgctgctcacgcagctggacgcctgcggcaccgaggccgacgacgtgtgcggcttcagaacgaccacaaccaacaactccacgtccatggaccgtgacgacaaaggctccccggatactgagaacaccagcatcggcggaggggccagtgattcgcgctgtttcagccgtcgctcacagagagacggcttatgcgacgacgacgaggagaacgtggtgatcaacggggacgacggggcgatgaggtcgtcgatttccaccaagaggagccgggctgctgcgacccataacgaatctgagcgtaaacgaagggacaggatcaaccagaagatgaaaacgctgcagaagctcgtcccgaactcgaacaagacagacaaggcgtcgatgctggacgaggtgatcgactacctgaagcagctgcaggcgcaggtgcagctgatgagccggatgggaagcatgatgatgcccatggcgatgccgcagctccagatgtcgatgatggcccagatggcacagatggcgcagatggcgcagatggcccagatgaacatgggctccctcggccagccgggctacgcaggcctcacgccgcccatgatgcacccgccccccttcgtccccgtgtcctgggacaccaccgccaccgccaccacctccctcgccccgcaggccggcagcggcacggtgccagcggacgccttctccgccttcctagcttgccaagcgcagcagaacgggcagcaaccgggtagcatggaggcgtacaatagaatggtggcgctgtaccagaagatgaaccaaacgcagcagagcgcgcccagcaacccgtccaagcagtgagcatgacattctttcctctcaattgatgaggcctggaactgtgtaacagagtctatgacagctggggcccgcgagcaggaggtggcgcatgcagtcttctgcagagaggagagagaaatcgtggaaaaagggagtgcaggtacacggtgtctgttttgcggagacagatgtggaggctgctggagagcgaaatagtgactcagagcgtgtataatgcggatgcggagtgggatggggagtgtagctggagttggtcccagaagcaccggaagtcgaacaggtgatgaaggcgatgtcacgcaagtagtagtagtgtgtacggtactaaagactttatttatttctgctggcaaatgagtgcagattagataaatcaacccaagcacgattgaagaccattatctgattgcttaacttgtcaatcattaatcctacatctcaatttttagggaaccgtttgtctgcctagaatattgtcacacccggcttttagaagaaacacaatacatatgtatgtgttcccagtaaattactcacacatactacgacatcgttaatgataatattacactataccggcttactagagcatgcaaaacccacataaatgatatatatcttaagagatatcaagtgggtaagtgtaaaaaataccaaagacgtatcttggtgaaggaatgtctttataccttggtaaatgaacgtctctagcacggttttctaagtttatatacggttccatccttacaactcatataaatgaatagtatcgtgagaggttatagtgaataagataaaagacttagatacgttgggttgtatgaaggattcatctaatacttctagaatcgcaacatagtatctaggttgtacatatccttacttcatcaactttattacataaggatttacgcctctaattgaatctgatcattgacgtgtaagaaaatgtcactaacagaaccactt

SEQ ID NO: 2290 - DNA, 2587 bp, Zea Mays
gcacacgatgcgttgcattgcatggctccgccacacacaccccttgcatgtaccccacccaccacggcggcataagtatctccgccggctacgcgcgatccaggcccggccgcgtgcgtgcgtgcgtgcgacgactgcacccatacacacatatacgcgctctggctggctgcctgcctggcttgcggagctccgtttcggccggccatctctcgctacgctacgagcgcgcgcggcccccgcgcccgtgtcttcccgctgtcgaccgtcgtgttgatcgtacatgcagctgctagtagcgaactatagttgcagaccgcatcagtgcgtgacaagaggatatatattatcagacacgcacgcgatcgcgcggagatgaaccagtgcgtgccgagctgggatctggtggacgacccgacggcggcggtagctggcggcggaggcggcctaaaccatcaggtctcgacgaccgggggcgcgcaccggggcctgctcctgcaggcgtcagctggaggagcaggcggcgggggcgcgttcgctcccgtcgtcgtgcccatgtcgaaccagtactacgaggtggcggagctgacgtgggagaagggcaacatctcctcccacggcctgctcaaccgcccggcgcacaataagtacccgcccgccgcggcgccgtcgtcggctcagctgcatgccatagcaggaggaggcggccgcggcggcgggtcgccatccggggaccgcgagacgctcgaggcggtggtcggcgaggcggccgcgcggtcgcacttcctctcgcagccggcgccgccgtggctgatcggcgccgacgccgtggcgcgggccgcggcggacgcgctagtgccgtgcgccgcaagggcgggcgagtccgctgcagacggcggagaagcgggcgcctcgaggaggaagcggccgcgcgtggtcggcgacgacagtctggtggtgtgcgccagccaggggagcaccgcgcctcgccgccgcggcgagagcgcgctgctcacgcagctggacgcctgcggcaccgaggccgacgacgtgtgcggcttcagaacgaccacaaccaacaactccacgtccatggaccgtgacgacaaaggctccccggatactgagaacaccagcatcggcggaggggccagtgattcgcgctgtttcagccgtcgctcacagagagacggcttatgcgacgacgacgaggagaacgtggtgatcaacggggacgacggggcgatgaggtcgtcgatttccaccaagaggagccgggctgctgcgacccataacgaatctgagcgtaaacgaagggacaggatcaaccagaagatgaaaacgctgcagaagctcgtcccgaactcgaacaagcagacagacaaggcgtcgatgctggacgaggtgatcgactacctgaagcagctgcaggcgcaggtgcagctgatgagccggatgggaagcatgatgatgcccatggcgatgccgcagctccagatgtcgatgatggcccagatggcacagatggcgcagatggcgcagatggcccagatgaacatgggctccctcggccagccgggctacgcaggcctcacgccgcccatgatgcacccgccccccttcgtccccgtgtcctgggacaccaccgccaccgccaccacctccctcgccccgcaggccggcagcggcacggtgccagcggacgccttctccgccttcctagcttgccaagcgcagcagaacgggcagcaaccgggtagcatggaggcgtacaatagaatggtggcgctgtaccagaagatgaaccaaacgcagcagagcgcgcccagcaacccgtccaagcagtgagcatgacgtacgtacagctgctttcttgtacattgtttgttcagttttgtttagatttttttggctcattttatcgcatttgttcagattctttcctctcaattgatgaggcctggaactgtgtaacagagtctatgacagctggggcccgcgagcaggaggtggcgcatgcagtcttctgcagagaggagagagaaatcgtggaaaaagggagtgcagggaaccgtttgtctgcctagaatattgtcacacccggcttttagaagaaacacaatacatatgtatgtgttcccagtaaattactcacacatactacgacatcgttaatgataatattacactataccggcttactagagcatgcaaaacccacataaatgatatatatcttaagagatatcaagtgggtaagtgtaaaaaataccaaagacgtatcttggtgaaggaatgtctttataccttggtaaatgaacgtctctagcacggttttctaagtttatatacggttccatccttacaactcatataaatgaatagtatcgtgagaggttatagtgaataagataaaagacttagatacgttgggttgtatgaaggattcatctaatacttctagaatcgcaacatagtatctaggttgtacatatccttacttcatcaactttattacataaggatttacgcctctaattgaatctgatcattgacgtgtaagaaaatgtcactaacagaaccactt

SEQ ID NO: 2291 - DNA, 2574 bp, Zea Mays
gcacacgatgcgttgcattgcatggctccgccacacacaccccttgcatgtaccccacccaccacggcggcataagtatctccgccggctacgcgcgatccaggcccggccgcgtgcgtgcgtgcgtgcgacgactgcacccatacacacatatacgcgctctggctggctgcctgcctggcttgcggagctccgtttcggccggccatctctcgctacgctacgagcgcgcgcggcccccgcgcccgtgtcttcccgctgtcgaccgtcgtgttgatcgtacatgcagctgctagtagcgaactatagttgcagaccgcatcagtgcgtgacaagaggatatatattatcagacacgcacgcgatcgcgcggagatgaaccagtgcgtgccgagctgggatctggtggacgacccgacggcggcggtagctggcggcggaggcggcctaaaccatcaggtctcgacgaccgggggcgcgcaccggggcctgctcctgcaggcgtcagctggaggagcaggcggcgggggcgcgttcgctcccgtcgtcgtgcccatgtcgaaccagtactacgaggtggcggagctgacgtgggagaagggcaacatctcctcccacggcctgctcaaccgcccggcgcacaataagtacccgcccgccgcggcgccgtcgtcggctcagctgcatgccatagcaggaggaggcggccgcggcggcgggtcgccatccggggaccgcgagacgctcgaggcggtggtcggcgaggcggccgcgcggtcgcacttcctctcgcagccggcgccgccgtggctgatcggcgccgacgccgtggcgcgggccgcggcggacgcgctagtgccgtgcgccgcaagggcgggcgagtccgctgcagacggcggagaagcgggcgcctcgaggaggaagcggccgcgcgtggtcggcgacgacagtctggtggtgtgcgccagccaggggagcaccgcgcctcgccgccgcggcgagagcgcgctgctcacgcagctggacgcctgcggcaccgaggccgacgacgtgtgcggcttcagaacgaccacaaccaacaactccacgtccatggaccgtgacgacaaaggctccccggatactgagaacaccagcatcggcggaggggccagtgattcgcgctgtttcagccgtcgctcacagaaacgaagggacaggatcaaccagaagatgaaaacgctgcagaagctcgtcccgaactcgaacaaggcgcaggtgcagctgatgagccggatgggaagcatgatgatgcccatggcgatgccgcagctccagatgtcgatgatggcccagatggcacagatggcgcagatggcgcagatggcccagatgaacatgggctccctcggccagccgggctacgcaggcctcacgccgcccatgatgcacccgccccccttcgtccccgtgtcctgggacaccaccgccaccgccaccacctccctcgccccgcaggccggcagcggcacggtgccagcggacgccttctccgccttcctagcttgccaagcgcagcagaacgggcagttttgtttagatttttttggctcattttatcgcatttgttcagattctttcctctcaattgatgaggcctggaactgtgtaacagagtctatgacagctggggcccgcgagcaggaggtggcgcatgcagtcttctgcagagaggagagagaaatcgtggaaaaagggagtgcaggtacacggtgtctgttttgcggagacagatgtggaggctgctggagagcgaaatagtgactcagagcgtgtataatgcggatgcggagtgggatggggagtgtagctggagttggtcccagaagcaccggaagtcgaacaggtgatgaaggcgatgtcacgcaagtagtagtagtgtgtacggtactaaagactttatttatttctgctggcaaatgagtgcagattagataaatcaacccaagcacgattgaagaccattatctgattgcttaacttgtcaatcattaatcctacatctcaatttttagggaaccgtttgtctgcctagaatattgtcacacccggcttttagaagaaacacaatacatatgtatgtgttcccagtaaattactcacacatactacgacatcgttaatgataatattacactataccggcttactagagcatgcaaaacccacataaatgatatatatcttaagagatatcaagtgggtaagtgtaaaaaataccaaagacgtatcttggtgaaggaatgtctttataccttggtaaatgaacgtctctagcacggttttctaagtttatatacggttccatccttacaactcatataaatgaatagtatcgtgagaggttatagtgaataagataaaagacttagatacgttgggttgtatgaaggattcatctaatacttctagaatcgcaacatagtatctaggttgtacatatccttacttcatcaactttattacataaggatttacgcctctaattgaatctgatcattgacgtgtaagaaaatgtcactaacagaaccactt

SEQ ID NO: 2292 - DNA, 3036 bp, Zea Mays
acgatgcgttgcattgcatggctccgccacacacaccccttgcatgtaccccacccaccacggcggcataagtatctccgccggctacgcgcgatccaggcccggccgcgtgcgtgcgtgcgtgcgacgactgcacccatacacacatatacgcgctctggctggctgcctgcctggcttgcggagctccgtttcggccggccatctctcgctacgctacgagcgcgcgcggcccccgcgcccgtgtcttcccgctgtcgaccgtcgtgttgatcgtacatgcagctgctagtagcgaactatagttgcagaccgcatcagtgcgtgacaagaggatatatattatcagacacgcacgcgatcgcgcggagatgaaccagtgcgtgccgagctgggatctggtggacgacccgacggcggcggtagctggcggcggaggcggcctaaaccatcaggtctcgacgaccgggggcgcgcaccggggcctgctcctgcaggcgtcagctggaggagcaggcggcgggggcgcgttcgctcccgtcgtcgtgcccatgtcgaaccagtactacgaggtggcggagctgacgtgggagaagggcaacatctcctcccacggcctgctcaaccgcccggcgcacaataagtacccgcccgccgcggcgccgtcgtcggctcagctgcatgccatagcaggaggaggcggccgcggcggcgggtcgccatccggggaccgcgagacgctcgaggcggtggtcggcgaggcggccgcgcggtcgcacttcctctcgcagccggcgccgccgtggctgatcggcgccgacgccgtggcgcgggccgcggcggacgcgctagtgccgtgcgccgcaagggcgggcgagtccgctgcagacggcggagaagcgggcgcctcgaggaggaagcggccgcgcgtggtcggcgacgacagtctggtggtgtgcgccagccaggggagcaccgcgcctcgccgccgcggcgagagcgcgctgctcacgcagctggacgcctgcggcaccgaggccgacgacgtgtgcggcttcagaacgaccacaaccaacaactccacgtccatggaccgtgacgacaaaggctccccggatactgagaacaccagcatcggcggaggggccagtgattcgcgctgtttcagccgtcgctcacagagagacggcttatgcgacgacgacgaggagaacgtggtgatcaacggggacgacggggcgatgaggtcgtcgatttccaccaagaggagccgggctgctgcgacccataacgaatctgagcgtaaacgaagggacaggatcaaccagaagatgaaaacgctgcagaagctcgtcccgaactcgaacaagacagacaaggcgtcgatgctggacgaggtgatcgactacctgaagcagctgcaggcgcaggtgcagctgatgagccggatgggaagcatgatgatgcccatggcgatgccgcagctccagatgtcgatgatggcccagatggcacagatggcgcagatggcgcagatggcccagatgaacatgggctccctcggccagccgggctacgcaggcctcacgccgcccatgatgcacccgccccccttcgtccccgtgtcctgggacaccaccgccaccgccaccacctccctcgccccgcaggccggcagcggcacggtgccagcggacgccttctccgccttcctagcttgccaagcgcagcagaacgggcagcaaccgggtagcatggaggcgtacaatagaatggtggcgctgtaccagaagatgaaccaaacgcagcagagcgcgcccagcaacccgtccaagcagtgagcatgacattctttcctctcaattgatgaggcctggaactgtgtaacagaggtgtgaaacccgtcgacgcggtacctgtagcatcatgtatttgttttggttcttgaccactctatccttgtatataaggagaccagacgttgcgcaaccgttgagcggagaccaactccagcagactctctctccgtatccgtatttaggacggccaacagtttctctctcctctccgtatccgtctccgtttctagcagactccgtatttacactccgcatgcagtctatgacagctggggcccgcgagcaggaggtggcgcatgcagtcttctgcagagaggagagagaaatcgtggaaaaagggagtgcaggtacacggtgtctgttttgcggagacagatgtggaggctgctggagagcgaaatagtgactcagagcgtgtataatgcggatgcggagtgggatggggagtgtagctggagttggtcccagaagcaccggaagtcgaacaggtgatgaaggcgatgtcacgcaagtagtagtagtgtgtacggtactaaagactttatttatttctgctggcaaatgagtgcagattagataaatcaacccaagcacgattgaagaccattatctgattgcttaacttgtcaatcattaatcctacatctcaatttttagggaaccgtttgtctgcctagaatattgtcacacccggcttttagaagaaacacaatacatatgtatgtgttcccagtaaattactcacacatactacgacatcgttaatgataatattacactataccggcttactagagcatgcaaaacccacataaatgatatatatcttaagagatatcaagtgggtaagtgtaaaaaataccaaagacgtatcttggtgaaggaatgtctttataccttggtaaatgaacgtctctagcacggttttctaagtttatatacggttccatccttacaactcatataaatgaatagtatcgtgagaggttatagtgaataagataaaagacttagatacgttgggttgtatgaaggattcatctaatacttctagaatcgcaacatagtatctaggttgtacatatccttacttcatcaactttattacataaggatttacgcctctaattgaatctgatcattgacgtgtaagaaaatgtcactaacagaaccactt

SEQ ID NO: 2293 - DNA, 2779 bp, Zea Mays
ccaccacggcggcataagtatctccgccggctacgcgcgatccaggcccggccgcgtgcgtgcgtgcgtgcgacgactgcacccatacacacatatacgcgctctggctggctgcctgcctggcttgcggagctccgtttcggccggccatctctcgctacgctacgagcgcgcgcggcccccgcgcccgtgtcttcccgctgtcgaccgtcgtgttgatcgtacatgcagctgctagtagcgaactatagttgcagaccgcatcagtgcgtgacaagaggatatatattatcagacacgcacgcgatcgcgcggagatgaaccagtgcgtgccgagctgggatctggtggacgacccgacggcggcggtagctggcggcggaggcggcctaaaccatcaggtctcgacgaccgggggcgcgcaccggggcctgctcctgcaggcgtcagctggaggagcaggcggcgggggcgcgttcgctcccgtcgtcgtgcccatgtcgaaccagtactacgaggtggcggagctgacgtgggagaagggcaacatctcctcccacggcctgctcaaccgcccggcgcacaataagtacccgcccgccgcggcgccgtcgtcggctcagctgcatgccatagcaggaggaggcggccgcggcggcgggtcgccatccggggaccgcgagacgctcgaggcggtggtcggcgaggcggccgcgcggtcgcacttcctctcgcagccggcgccgccgtggctgatcggcgccgacgccgtggcgcgggccgcggcggacgcgctagtgccgtgcgccgcaagggcgggcgagtccgctgcagacggcggagaagcgggcgcctcgaggaggaagcggccgcgcgtggtcggcgacgacagtctggtggtgtgcgccagccaggggagcaccgcgcctcgccgccgcggcgagagcgcgctgctcacgcagctggacgcctgcggcaccgaggccgacgacgtgtgcggcttcagaacgaccacaaccaacaactccacgtccatggaccgtgacgacaaaggctccccggatactgagaacaccagcatcggcggaggggccagtgattcgcgctgtttcagccgtcgctcacagagagacggcttatgcgacgacgacgaggagaacgtggtgatcaacggggacgacggggcgatgaggtcgtcgatttccaccaagaggagccgggctgctgcgacccataacgaatctgagcgttcatcagaaaggaatcgccaaaggtttcgaagcatcccagcgatcgagacgacaacggctatagctgttgttgactgcggactccaaataagatgcaatactacaccaaacgaagggacaggatcaaccagaagatgaaaacgctgcagaagctcgtcccgaactcgaacaagacagacaaggcgtcgatgctggacgaggtgatcgactacctgaagcagctgcaggcgcaggtgcagctgatgagccggatgggaagcatgatgatgcccatggcgatgccgcagctccagatgtcgatgatggcccagatggcacagatggcgcagatggcgcagatggcccagatgaacatgggctccctcggccagccgggctacgcaggcctcacgccgcccatgatgcacccgccccccttcgtccccgtgtcctgggacaccaccgccaccgccaccacctccctcgccccgcaggccggcagcggcacggtgccagcggacgccttctccgccttcctagcttgccaagcgcagcagaacgggcagcaaccgggtagcatggaggcgtacaatagaatggtggcgctgtaccagaagatgaaccaaacgcagcagagcgcgcccagcaacccgtccaagcagtgagcatgacattctttcctctcaattgatgaggcctggaactgtgtaacagaggtgtgaaacccgtcgacgcggtacctgtagcatcatgtatttgttttggttcttgaccactctatccttgtatataaggagaccagacgttgcgcaaccgttgagcggagaccaactccagcagactctctctccgtatccgtatttaggacggccaacagtttctctctcctctccgtatccgtctccgtttctagcagactccgtatttacactccgcatgcagtctatgacagctggggcccgcgagcaggaggtggcgcatgcagtcttctgcagagaggagagagaaatcgtggaaaaagggagtgcagggaaccgtttgtctgcctagaatattgtcacacccggcttttagaagaaacacaatacatatgtatgtgttcccagtaaattactcacacatactacgacatcgttaatgataatattacactataccggcttactagagcatgcaaaacccacataaatgatatatatcttaagagatatcaagtgggtaagtgtaaaaaataccaaagacgtatcttggtgaaggaatgtctttataccttggtaaatgaacgtctctagcacggttttctaagtttatatacggttccatccttacaactcatataaatgaatagtatcgtgagaggttatagtgaataagataaaagacttagatacgttgggttgtatgaaggattcatctaatacttctagaatcgcaacatagtatctaggttgtacatatccttacttcatcaactttattacataaggatttacgcctctaattgaatctgatcattgacgtgtaagaaaatgtcactaacagaaccactt

SEQ ID NO: 2294 - DNA, 1512 bp, Zea Mays
agatgcaatactacaccgacgctccaactctcagcttggcatacggcttttatatgggccctatataggccggaaaccaatgcgccaaaacgaagggacaggatcaaccagaagatgaaaacgctgcagaagctcgtcccgaactcgaacaagcagacagacaaggcgtcgatgctggacgaggtgatcgactacctgaagcagctgcaggcgcaggtgcagctgatgagccggatgggaagcatgatgatgcccatggcgatgccgcagctccagatgtcgatgatggcccagatggcacagatggcgcagatggcgcagatggcccagatgaacatgggctccctcggccagccgggctacgcaggcctcacgccgcccatgatgcacccgccccccttcgtccccgtgtcctgggacaccaccgccaccgccaccacctccctcgccccgcaggccggcagcggcacggtgccagcggacgccttctccgccttcctagcttgccaagcgcagcagaacgggcagcaaccgggtagcatggaggcgtacaatagaatggtggcgctgtaccagaagatgaaccaaacgcagcagagcgcgcccagcaacccgtccaagcagtgagcatgacattctttcctctcaattgatgaggcctggaactgtgtaacagaggtgtgaaacccgtcgacgcggtacctgtagcatcatgtatttgttttggttcttgaccactctatccttgtatataaggagaccagacgttgcgcaaccgttgagcggagaccaactccagcagactctctctccgtatccgtatttaggacggccaacagtttctctctcctctccgtatccgtctccgtttctagcagactccgtatttacactccgcatgcagtctatgacagctggggcccgcgagcaggaggtggcgcatgcagtcttctgcagagaggagagagaaatcgtggaaaaagggagtgcagggaaccgtttgtctgcctagaatattgtcacacccggcttttagaagaaacacaatacatatgtatgtgttcccagtaaattactcacacatactacgacatcgttaatgataatattacactataccggcttactagagcatgcaaaacccacataaatgatatatatcttaagagatatcaagtgggtaagtgtaaaaaataccaaagacgtatcttggtgaaggaatgtctttataccttggtaaatgaacgtctctagcacggttttctaagtttatatacggttccatccttacaactcatataaatgaatagtatcgtgagaggttatagtgaataagataaaagacttagatacgttgggttgtatgaaggattcatctaatacttctagaatcgcaacatagtatctaggttgtacatatccttacttcatcaactttattacataaggatttacgcctctaattgaatctgatcattgacgtgtaagaaaatgtcactaacagaaccactt

SEQ ID NO: 2295 - DNA, 786 bp, Zea Mays
agaaaggttaaatgaatattaatatcacaaataaataacataattaatatacggcatatggagtttcctccccatatggcaccggacatgggatgggagatgtgggggtgtggtgtgcctatgggagttttctccccgtcagctcagcgatgctgaatgctcaagccaaccgtcgacattccatgtcattgtcacagaagaaaacattagtgacgaaagaacaattaacatgcagaagcctcaaccctgcacaggggtgtgaacagggtagctcagctccgggaaacaggaaatggtgtttatacattacaatatacttttcgattaatcaccgatcggaatggagaagaagaagatgatgatgatatagagattataaagcaacagtgggcgggagagcgtacattgtacgcctgcctcctccattttcccacacggctttgttggttttttcccccttgccggcttgcaatcagggttgcaacgactcaaaggaccatgacaacggtaacgatacggatgaccaagagacgcctcaacctttccaaggacgacggcggcggcggcaaccagccgttccgttccgccgtagtatttggtagcagaagcagtagtctagtgggtggtggtggtagtagtggtgggtggtggtgaccgagcggcccgagggcgcaaaccagctagctagctgtactggacgaaggagcggtagaaggtgttgggcctccagttggccgggatgacgttcctggcgacgagcgtcttgccggactccgccgccgcggc

SEQ ID NO: 2296 - DNA, 709 bp, Zea Mays
tggacaccgggtagtagttcatgtcggtgatgatcaccgtctccgtccgcccggagcaggacgggtccttcctgcaccgaatctgcgcccatccgcggcaaccgtcagctatgcatgtcagtccaagcaagagtcaatgcagggtaagagaaaaaaaaatacaaatggtactgtcacggagatcgagtgagagacgcgcacatgtacgcggggggccacatgcagctgctgtgctgaccggcctgcactgtactgtacggttggcgtgctactctaacagttactggtcctacaactcctactccctgttattagtgtataattttttttatggcgctcttgaaattttgctagaacgatttttttcctttctaaaacaagtggagaaccagtagaaaaaaatgtttccgctaaagaaaacatagatcatactgttatactactgatttttgatagaggtttctggtaaaaaaaagatccatatatactggctgtgtttcactgtaccttgtagcaggagccgcatcccttgccgtccttgaacaatggctggtttccgcaggagcccatggacatgaaggggtactggttggtgtgcttgaagccgcacgcaccacctagcacaggacacgttccgtgagccacattgccacgacggagggagagggaagaaggggggaagacggagctaagagagagagagagagag

SEQ ID NO: 2297 - DNA, 816 bp, Zea Mays
tgagaacctggtatgtggtaggagatataatgtcgttatttttcatgcgtgtgtgaggacattatatctcctaccacataccaggttctcgggtttgactttaaaaacatcggtttaccaattcatctgcattaccacctaaatgcaaaaaaagagaacctagagtttttttacacgcaacgcatgagtacataaacattttcagacggtcctattacagtttttatgcataagataagggaatgtggcacggtttttcttttatatgcattagtaggaacagttgttgtgacactctttatgagtctaacatgacctgttttgaacagaaacatctatttgtgcatatagaggtctcattttctgaagaataactaaccattatcttaaatatgggataataatcaattccaagagaggtcaatcaccgtgatagctatttaacattgcacactggcggatacgattccccttcatacaacaaaccacaacaaagagatgtcaaatgatacttagattgccaaaaagtacaattccttgaaaggcatatacaacagcagagcttgctaaataaatgaggtgggggcaggacgagctttttaatatcagaataaatattgaaacaaaaagaagattcagttcagtgcaatgtttactaaaagctacagttgtgagaagagaattgtcaccacgaatttaaaaatacacaacttcagaaaaaatcaaaccatcgtctcaaatgttttccaacgataaaaaagcatttagataactgtggtagcctacaacacagtaaaaaatatagcacaaaatgag

SEQ ID NO: 2298 - DNA, 4855 bp, Zea Mays
gggatagcttagtgaagtttgagatgtaattcacagcaattttttcgatcaaaaggctgggaaaaactgttgggccaaacaaaacccgcccaaaacctgtatttttattgtaaaaagaaaaaaaacaaacaaagaaaccctcacgattcactaggaattcttccagatccagcccttggctcgcagtacaccacaccacgcccagatctcaacgtgccccttctctcagatctcaattcccaaatgccctcgccgtcgtagctgcaccccgaccccgcgcgctcgctcggatccatgggcggggtcagggcagcatcgccatcaggcgcaggatccggagccgtcgcgggggcgggatccgatcacggggcgccgcgactggctatggcgtgtgtgctagcgtcagaggccgccacggtgctcgctgtcatgcgccgcaacgtccgctgggctggcgtccgctacggcggcggcgacggtggcgcgggcgacgacgagcaccttgaccacccgctcgttgcggggctcaaggttctccgccgccgcgctgccgcttggggccagggtagttgggcgggcgttgagccgctcctctacctccgacccttcctcgatatcgtctgctccgacgagactggggcgcccatcacgggtgctgcgctctcgtcgttgcacaagatcctcacccttgatgtcgtcgggcccggcgcaccaggcgccgccggggccatggccgccgtcgtcgacgccgtcacggcttgccgctttgaagtcaccgacccggcgtccgaggaggccgtcctggcaagggtcctgcaagtgctgctagcctgcgtgcgcagccgtgcagcaccggcgcttgccaaccgccacgtctgcacgatcgtcaacacatgtttccgcgtcgtgcagcaggctggaaccaagggggagctactgcagcgtgtctcccgccagacaatgcaggaggttatacgaactgtctttgcccgcctgccggacatcaatgtcaccttgttgtccgacgagcagctctggcgatgaagtgggagacggttctggtgttatgcaagacaaagacttgatggagccctttggggttccttgtatggtagagatattgcaattcttgtgctccctcttgaacatagcagaagacattgagttgaacccaaggatgagtccaattgactttgatgaggatgtgccgctctttgctctggggttgattaattcggctattgagttttcggcttcgtctatacacagacatcaaaaacttttagcatttgtacaggatgaattgttccgcaatctaatgcattttggcttgtcaatgagccctctgatcctgtcgactgtgtgcagcattgtttttactctcttttaccatctgcgccatgaacttaagctgcaaatagaggctttcttctcatgtgttatcctaagattagcacagagtagatatggagcaagttatcagcagcaagaagttgccctagaggctctaattgatttttgctggcagaaagagtttatggctgagatgtatgcaaatatggactgtgatctacagtgctcaaatatttttgaagagttagctaaccttctgtctaagagcgcatttcctgtgaatagtcctttgtcagctttaaatgtgcttgctttggatggtttggttgctgtcattcaggcaatggcacagcggactgataatgcacctcaacatcatgatcaaacagttccagaaataagtgaatattttcctttctggcagttgaaatgtgagagcagtaatgatcctgaccagtgggttaaatttgttcaccagcaaaaaagcatcaagacaaagctaatgattggcgttgaacattttaatagggacaaaaagaagggttttgagtacctacaagctgttcatcttttgcctgaaaaacttgatccacacaatgttgctctgttcttcaggtacacacctggattggacaagaatcttcttggggactacctgggtaatcatgatgagttctctatccaggtccttcatgaatttgctagaacctttgacttcaaggatatgaatttggatgctgccttaaggctcttcttggaaactttccggttacctggtgagtcacagaagatacagagaattcttgaggccttttctgagcgatattatgaacagtcaccacaaatgtttgttaatagagatgcagctctggtgttatcatattctgtaatcatgctcaatactgatcagcacaatgtaagggttaagaagaagatgactgaggaagactttattaggaacaatcgccgtataaatggaggaaatgatctgccaagagaatttttgtcagagctttattattctatttgccggaatgagatcagaactattcctgagcaaggagctgggtgttctgagatgtctttcagtcgctgggttgatctaatgtggaggtcaaagagaacatcattgtacattgcttgtgactcctacccttttcttgatcatgacatgttttcccttatggccggaccaacagttgctgccgtgtctgtggtttttgacaatgttgagcatgaagaggttcttacaggatgcattgatggttttctatcggtggcgaaactggctgcattctatcatcttgatgatgttctgaatgatcttgttgtggcactatctaaattcactactttgttgaacacttcctacattgatgatcctgtaatagctttcggggaggataccaaagctaggatggcaacagaagctgttttcactatagcaactgcttatggtgatcacatacgcagtggatggaggaacataatagattgtattttaagattgcataagataggacttcttcctggtcgcctcactggcgatacaactgatgatcaggaatcctcttcagattcattacctggcaaacatacttcatcagctcctcaagttttgccaattagcactcctcggaaaacttatggactgatggggaggttcagccaactactgtacttagatgctgacgaaccaaggtcccgaccaactgaggagcaacttgctgctcagaggaatgcttcagagactgtaaagaagtgccaaataggtatcatcttcactgagagcaaattcttgcaagctgattcactctcaaatctggcaagagctctcattcaggcagcaggcagacctcagaaaatcaccagctcacttgatgatgaaggcgtagctgccttgtgcttagagcttctaattactgtcacattaaacaacagagacaggattgttcttttgtggcaggatgtttttgagcacataacccatattgtccagtgcacggtgatgccctgcaacctagtggagaaggctgtttttgggctcctgcacatatgtcagaggttgcttccctataaggcgaacttggtagatgatttgctgaggtcattgcagctgattctaaaacttgatgcccgtgtagctgatgcttactgtgagaacattaccttggaggtcacacgtcttgtcaaggccaatgcgacccatatcaaatcccagatgggctggcggactatcatttccttgctctgcatcaccgcacgccatcctgatgcttctgatgcaggatttgaagccctggtttttatcatgtcagaaggtgtgcacctctcacctgccaacttcatcctttcagtggaggcatcaaggcagtttgcagaatctcggcttgggtctgcagaaagatctatccatgctttgaacctaatggcagactcagttaattgtcttgtgcgatggtcacaagaggttagagaagctggtggagaggcagatagaatattggaaggaattgcagagatgtggctgcggctggtgcaggctctacgcaaggtgtgcatggatcaaagagaagaagtgaggaaccatgcattgttatcgttgcatagatgcttggtagttgatggaatatcagttaagtcttcaacatggttgatggcatttgacattattttccagttgcttgacgaactgttggagattgctcagagctactcaccaaaggatttcagaaacatggaggtatctctcttgcatgctgtaaaactgttatgcaaggtgttcttgcagtcacttaaagacctctcaggacagcacagttttgataagctgtggttggaggttcttgacatgatagagaagttcatgaaagtcaaattgagaggcaggaggacagagaagctacaagaggctattccggagttagtcaagaacatactaatgatgatgaaagctagtgggatcctgtcaaaaacaggtgccagtgaaaacagtttctgggaagcaacatggcttcaagttaacaagattgcaccctctctacaattagaaatttttcctgacaatgaggatggcagcacaactcaagttgaagaaaacaaattggatacacaagtgcaatctgaccagaacaatgatcgataggacattatactttctcccatcctatcaagttagttgcagctggaacctttcaactttttgttccaaaaccatacacagatgcttggcagttctgtatgtgccattaggaagagtaagatggtatattgtaattttcttagtttacatatataattttgttgttgacaaggttgttgctttgtgctttactgttgcaacaccgaagttgtatgatatatatactgtgttactggcctgggagaatcaaagcttttggctgtttattgatgtggtccaggaacctgtgtactgtactgctgtggaaaattgcttatagcagtaggtgcgatggttttctcttgccattgtctggtgttt

SEQ ID NO: 2299 - DNA, 4945 bp, Zea Mays
gggatagcttagtgaagtttgagatgtaattcacagcaattttttcgatcaaaaggctgggaaaaactgttgggccaaacaaaacccgcccaaaacctgtatttttattgtaaaaagaaaaaaaacaaacaaagaaaccctcacgattcactaggaattcttccagatccagcccttggctcgcagtacaccacaccacgcccagatctcaacgtgccccttctctcagatctcaattcccaaatgccctcgccgtcgtagctgcaccccgaccccgcgcgctcgctcggatccatgggcggggtcagggcagcatcgccatcaggcgcaggatccggagccgtcgcgggggcgggatccgatcacggggcgccgcgactggctatggcgtgtgtgctagcgtcagaggccgccacggtgctcgctgtcatgcgccgcaacgtccgctgggctggcgtccgctacggcggcggcgacggtggcgcgggcgacgacgagcaccttgaccacccgctcgttgcggggctcaaggttctccgccgccgcgctgccgcttggggccagggtagttgggcgggcgttgagccgctcctctacctccgacccttcctcgatatcgtctgctccgacgagactggggcgcccatcacgggtgctgcgctctcgtcgttgcacaagatcctcacccttgatgtcgtcgggcccggcgcaccaggcgccgccggggccatggccgccgtcgtcgacgccgtcacggcttgccgctttgaagtcaccgacccggcgtccgaggaggccgtcctggcaagggtcctgcaagtgctgctagcctgcgtgcgcagccgtgcagcaccggcgcttgccaaccgccacgtctgcacgatcgtcaacacatgtttccgcgtcgtgcagcaggctggaaccaagggggagctactgcagcgtgtctcccgccagacaatgcaggaggttatacgaactgtctttgcccgcctgccggacatcaatgtcaccttgttgtccgacgagcagcattgttacgtaggttgctggttgcaagaacccatgtttgggtgctgaggagactgagaacgggaagagtgactacgtatgtttgaacagctctggcgatgaagtgggagacggttctggtgttatgcaagacaaagacttgatggagccctttggggttccttgtatggtagagatattgcaattcttgtgctccctcttgaacatagcagaagacattgagttgaacccaaggatgagtccaattgactttgatgaggatgtgccgctctttgctctggggttgattaattcggctattgagttttcggcttcgtctatacacagacatcaaaaacttttagcatttgtacaggatgaattgttccgcaatctaatgcattttggcttgtcaatgagccctctgatcctgtcgactgtgtgcagcattgtttttactctcttttaccatctgcgccatgaacttaagctgcaaatagaggctttcttctcatgtgttatcctaagattagcacagagtagatatggagcaagttatcagcagcaagaagttgccctagaggctctaattgatttttgctggcagaaagagtttatggctgagatgtatgcaaatatggactgtgatctacagtgctcaaatatttttgaagagttagctaaccttctgtctaagagcgcatttcctgtgaatagtcctttgtcagctttaaatgtgcttgctttggatggtttggttgctgtcattcaggcaatggcacagcggactgataatgcacctcaacatcatgatcaaacagttccagaaataagtgaatattttcctttctggcagttgaaatgtgagagcagtaatgatcctgaccagtgggttaaatttgttcaccagcaaaaaagcatcaagacaaagctaatgattggcgttgaacattttaatagggacaaaaagaagggttttgagtacctacaagctgttcatcttttgcctgaaaaacttgatccacacaatgttgctctgttcttcaggtacacacctggattggacaagaatcttcttggggactacctgggtaatcatgatgagttctctatccaggtccttcatgaatttgctagaacctttgacttcaaggatatgaatttggatgctgccttaaggctcttcttggaaactttccggttacctggtgagtcacagaagatacagagaattcttgaggccttttctgagcgatattatgaacagtcaccacaaatgtttgttaatagagatgcagctctggtgttatcatattctgtaatcatgctcaatactgatcagcacaatgtaagggttaagaagaagatgactgaggaagactttattaggaacaatcgccgtataaatggaggaaatgatctgccaagagaatttttgtcagagctttattattctatttgccggaatgagatcagaactattcctgagcaaggagctgggtgttctgagatgtctttcagtcgctgggttgatctaatgtggaggtcaaagagaacatcattgtacattgcttgtgactcctacccttttcttgatcatgacatgttttcccttatggccggaccaacagttgctgccgtgtctgtggtttttgacaatgttgagcatgaagaggttcttacaggatgcattgatggttttctatcggtggcgaaactggctgcattctatcatcttgatgatgttctgaatgatcttgttgtggcactatctaaattcactactttgttgaacacttcctacattgatgatcctgtaatagctttcggggaggataccaaagctaggatggcaacagaagctgttttcactatagcaactgcttatggtgatcacatacgcagtggatggaggaacataatagattgtattttaagattgcataagataggacttcttcctggtcgcctcactggcgatacaactgatgatcaggaatcctcttcagattcattacctggcaaacatacttcatcagctcctcaagttttgccaattagcactcctcggaaaacttatggactgatggggaggttcagccaactactgtacttagatgctgacgaaccaaggtcccgaccaactgaggagcaacttgctgctcagaggaatgcttcagagactgtaaagaagtgccaaataggtatcatcttcactgagagcaaattcttgcaagctgattcactctcaaatctggcaagagctctcattcaggcagcaggcagacctcagaaaatcaccagctcacttgatgatgaaggcgtagctgccttgtgcttagagcttctaattactgtcacattaaacaacagagacaggattgttcttttgtggcaggatgtttttgagcacataacccatattgtccagtgcacggtgatgccctgcaacctagtggagaaggctgtttttgggctcctgcacatatgtcagaggttgcttccctataaggcgaacttggtagatgatttgctgaggtcattgcagctgattctaaaacttgatgcccgtgtagctgatgcttactgtgagaacattaccttggaggtcacacgtcttgtcaaggccaatgcgacccatatcaaatcccagatgggctggcggactatcatttccttgctctgcatcaccgcacgccatcctgatgcttctgatgcaggatttgaagccctggtttttatcatgtcagaaggtgtgcacctctcacctgccaacttcatcctttcagtggaggcatcaaggcagtttgcagaatctcggcttgggtctgcagaaagatctatccatgctttgaacctaatggcagactcagttaattgtcttgtgcgatggtcacaagaggttagagaagctggtggagaggcagatagaatattggaaggaattgcagagatgtggctgcggctggtgcaggctctacgcaaggtgtgcatggatcaaagagaagaagtgaggaaccatgcattgttatcgttgcatagatgcttggtagttgatggaatatcagttaagtcttcaacatggttgatggcatttgacattattttccagttgcttgacgaactgttggagattgctcagagctactcaccaaaggatttcagaaacatggaggtatctctcttgcatgctgtaaaactgttatgcaaggtgttcttgcagtcacttaaagacctctcaggacagcacagttttgataagctgtggttggaggttcttgacatgatagagaagttcatgaaagtcaaattgagaggcaggaggacagagaagctacaagaggctattccggagttagtcaagaacatactaatgatgatgaaagctagtgggatcctgtcaaaaacaggtgccagtgaaaacagtttctgggaagcaacatggcttcaagttaacaagattgcaccctctctacaattagaaatttttcctgacaatgaggatggcagcacaactcaagttgaagaaaacaaattggatacacaagtgcaatctgaccagaacaatgatcgataggacattatactttctcccatcctatcaagttagttgcagctggaacctttcaactttttgttccaaaaccatacacagatgcttggcagttctgtatgtgccattaggaagagtaagatggtatattgtaattttcttagtttacatatataattttgttgttgacaaggttgttgctttgtgctttactgttgcaacaccgaagttgtatgatatatatactgtgttactggcctgggagaatcaaagcttttggctgtttattgatgtggtccaggaacctgtgtactgtactgctgtggaaaattgcttatagcagtaggtgcgatggttttctcttgccattgtctggtgttt

SEQ ID NO: 2300 - DNA, 4806 bp, Zea Mays
gggatagcttagtgaagtttgagatgtaattcacagcaattttttcgatcaaaaggctgggaaaaactgttgggccaaacaaaacccgcccaaaacctgtatttttattgtaaaaagaaaaaaaacaaacaaagaaaccctcacgattcactaggaattcttccagatccagcccttggctcgcagtacaccacaccacgcccagatctcaacgtgccccttctctcagatctcaattcccaaatgccctcgccgtcgtagctgcaccccgaccccgcgcgctcgctcggatccatgggcggggtcagggcagcatcgccatcaggcgcaggatccggagccgtcgcgggggcgggatccgatcacggggcgccgcgactggctatggcgtgtgtgctagcgtcagaggccgccacggtgctcgctgtcatgcgccgcaacgtccgctgggctggcgtccgctacggcggcggcgacggtggcgcgggcgacgacgagcaccttgaccacccgctcgttgcggggctcaaggttctccgccgccgcgctgccgcttggggccagggtagttgggcgggcgttgagccgctcctctacctccgacccttcctcgatatcgtctgctccgacgagactggggcgcccatcacgggtgctgcgctctcgtcgttgcacaagatcctcacccttgatgtcgtcgggcccggcgcaccaggcgccgccggggccatggccgccgtcgtcgacgccgtcacggcttgccgctttgaagtcaccgacccggcgtccgaggaggccgtcctggcaagggtcctgcaagtgctgctagcctgcgtgcgcagccgtgcagcaccggcgcttgccaaccgccacgtctgcacgatcgtcaacacatgtttccgcgtcgtgcagcaggctggaaccaagggggagctactgcagcgtgtctcccgccagacaatgcaggaggttatacgaactgtctttgcccgcctgccggacatcaatgtcaccttgttgtccgacgagcaggttgctggttgcaagaacccatgtttgggtgctgaggagactgagaacgggaagagtgactacgtatgtttgaacagctctggcgatgaagtgggagacggttctggtgttatgcaagacaaagacttgatggagccctttggggttccttgtatggtagagatattgcaattcttgtgctccctcttgaacatagcagaagacattgagttgaacccaaggatgagtccaattgactttgatgaggatgtgccgctctttgctctggggttgattaattcggctattgagttttcggcttcgtctatacacagacatcaaaaacttttagcatttgtacaggatgaattgttccgcaatctaatgcattttggcttgtcaatgagccctctgatcctgtcgactgtgtgcagcattgtttttactctcttttaccatctgcgccatgaacttaagctgcaaatagaggctttcttctcatgtgttatcctaagattagcacagagtagatatggagcaagttatcagcagcaagaagttgccctagaggctctaattgatttttgctggcagaaagagtttatggctgagatgtatgcaaatatggactgtgatctacagtgctcaaatatttttgaagagttagctaaccttctgtctaagagcgcatttcctgtgaatagtcctttgtcagctttaaatgtgcttgctttggatggtttggttgctgtcattcaggcaatggcacagcggactgataatgcacctcaacatcatgatcaaacagttccagaaataagtgaatattttcctttctggcagttgaaatgtgagagcagtaatgatcctgaccagtgggttaaatttgttcaccagcaaaaaagcatcaagacaaagctaatgattggcgttgaacattttaatagggacaaaaagaagggttttgagtacctacaagctgttcatcttttgcctgaaaaacttgatccacacaatgttgctctgttcttcaggtacacacctggattggacaagaatcttcttggggactacctgggtaatcatgatgagttctctatccaggtccttcatgaatttgctagaacctttgacttcaaggatatgaatttggatgctgccttaaggctcttcttggaaactttccggttacctggtgagtcacagaagatacagagaattcttgaggccttttctgagcgatattatgaacagtcaccacaaatgtttgttaatagagatgcagctctggtgttatcatattctgtaatcatgctcaatactgatcagcacaatgtaagggttaagaagaagatgactgaggaagactttattaggaacaatcgccgtataaatggaggaaatgatctgccaagagaatttttgtcagagctttattattctatttgccggaatgagatcagaactattcctgagcaaggagctgggtgttctgagatgtctttcagtcgctgggttgatctaatgtggaggtcaaagagaacatcattgtacattgcttgtgactcctacccttttcttgatcatgacatgttttcccttatggccggaccaacagttgctgccgtgtctgtggtttttgacaatgttgagcatgaagaggttcttacaggatgcattgatggttttctatcggtggcgaaactggctgcattctatcatcttgatgatgttctgaatgatcttgttgtggcactatctaaattcactactttgttgaacacttcctacattgatgatcctgtaatagctttcggggaggataccaaagctaggatggcaacagaagctgttttcactatagcaactgcttatggtgatcacatacgcagtggatggaggaacataatagattgtattttaagattgcataagataggacttcttcctggtcgcctcactggcgatacaactgatgatcaggaatcctcttcagattcattacctggcaaacatacttcatcagctcctcaagttttgccaattagcactcctcggaaaacttatggactgatggggaggttcagccaactactgtacttagatgctgacgaaccaaggtcccgaccaactgaggagcaacttgctgctcagaggaatgcttcagagactgtaaagaagtgccaaataggtatcatcttcactgagagcaaattcttgcaagctgattcactctcaaatctggcaagagctctcattcaggcagcaggcagacctcagaaaatcaccagctcacttgatgatgaaggcgtagctgccttgtgcttagagcttctaattactgtcacattaaacaacagagacaggattgttcttttgtggcaggatgtttttgagcacataacccatattgtccagtgcacggtgatgccctgcaacctagtggagaaggctgtttttgggctcctgcacatatgtcagaggttgcttccctataaggcgaacttggtagatgatttgctgaggtcattgcagctgattctaaaacttgatgcccgtgtagctgatgcttactgtgagaacattaccttggaggtcacacgtcttgtcaaggccaatgcgacccatatcaaatcccagatgggctggcggactatcatttccttgctctgcatcaccgcacgccatcctgatgcttctgatgcaggatttgaagccctggtttttatcatgtcagaaggtgtgcacctctcacctgccaacttcatcctttcagtggaggcatcaaggcagtttgcagaatctcggcttgggtctgcagaaagatctatccatgctttgaacctaatggcagactcagttaattgtcttgtgcgatggtcacaagaggttagagaagctggtggagaggcagatagaatattggaaggaattgcagagatgtggctgcggctggtgcaggctctacgcaagttgcttgacgaactgttggagattgctcagagctactcaccaaaggatttcagaaacatggaggtatctctcttgcatgctgtaaaactgttatgcaaggtgttcttgcagtcacttaaagacctctcaggacagcacagttttgataagctgtggttggaggttcttgacatgatagagaagttcatgaaagtcaaattgagaggcaggaggacagagaagctacaagaggctattccggagttagtcaagaacatactaatgatgatgaaagctagtgggatcctgtcaaaaacaggtgccagtgaaaacagtttctgggaagcaacatggcttcaagttaacaagattgcaccctctctacaattagaaatttttcctgacaatgaggatggcagcacaactcaagttgaagaaaacaaattggatacacaagtgcaatctgaccagaacaatgatcgataggacattatactttctcccatcctatcaagttagttgcagctggaacctttcaactttttgttccaaaaccatacacagatgcttggcagttctgtatgtgccattaggaagagtaagatggtatattgtaattttcttagtttacatatataattttgttgttgacaaggttgttgctttgtgctttactgttgcaacaccgaagttgtatgatatatatactgtgttactggcctgggagaatcaaagcttttggctgtttattgatgtggtccaggaacctgtgtactgtactgctgtggaaaattgcttatagcagtaggtgcgatggttttctcttgccattgtctggtgttt

SEQ ID NO: 2301 - DNA, 258 bp, Zea Mays
tattggaaaccctaaccctaacaggggttgggcaatctattaaatagactggagtaactaggccaggcccattacagagtggcgagacagtaattacacggggagaaccccaaaccctaatcgggtattctaacataaaccataatccctatctgtaagaccttccacagaataaataggcccttcaaattctgcaaactgaatctgaaaagatatgcgatttccttaagtttgcagaccaaatctgatttgttccgg

SEQ ID NO: 2302 - DNA, 1954 bp, Zea Mays
ctccctctctcctcctctctcttgcttttgccaaccagaagcatcgtgccgaggcagccaagtatctcagcttctgattctcctcctccaaacaccatccgcgggcgtggcgtacatacccagtggtgccgacgactgccgagcaaggcaaaaaggccaagcagcgccccgggccgggccccagcgcggcgcctattggttcgctctgatcgccggggctagtcaacggccggtgatcagccgaccctcgcgcgggagtggggccgcggaacggcggcgatggcggggctgccgccggtcgccaggcggcgcccgctcgcgacggcgtcgtcgctgctgctgcttttgctgctgctcgtggtgaccgcggcggcgcgcgaggagcggggcctggcgcgtgtgcagggcccgccgccgcgccaccgccacgcgtacgccgcgatgatgtacatgggcacgccgcgggactacgagttctacgtcgccgtgcgcgtcatgatgcgctccctcccccgcgtccgcgccgacgccgaccgcgtcctcatcgcctccgccgacgtgccgcgcgactgggtccgcgcaatgacagaagaggatggcatgagggtgttgatagtggagaacctcaggaatccttacgagagcaacctaggagggaccaacaagaggttcaagctgacactgaacaagctttatgcctggaccctggtggactacgagcgtgtcgtcatgattgattccgataacatcttcctccagaacacagacgagctattccaatgtggacagttctgtgctgttttcatcaacccgtgctacttccacaccggtcttttcgtgctccagccttctattgatgtattcagaagcatgcttcatgacctggagactggccgtgaaaactctgatggtgctgaccaaggctttttggttgggtgctacccagacttgctcgacaaaccaatgtttcaccctcctgagaatggcacaaagctcaatgggacctatcgccttcctcttggctatcaaatggatgcgtcatactactatctcaagctacattggcatgtcccctgtgggccaaacagtgtcatcacattccccagcgcaccttggtttaaaccttggtactggtggtcctggccggtcttgccattaggtctttcctggcacaagcagcgctgggacgatcttgggtatgctgctgaaatgccagtgattctgatggagcttttgatgtacatagttatcatagcagtcaccagattggcaaggccagggatcaccaaactgtgctataaccgacggcctgagaagcaaagtgccctggtgcagtggctgatcaagctggctgcaattgcggctatggtggctgcatattccattccattctttgtggtcccacgcacagtccacccgatcatgggctggtccgtctacctatttggcgcgcttgccttgtcagtgctcgttatcaatgtttttctgctcccgccacttgatgtgcttacaacgtggcttgcaattgtgggcatgctcatcgttatggcattcccatggtaccatgatggtgttgtgagggctctggcggtctttggatatgcattttgctctgcgccaatcttgtgggcatccatggtgaggatgatggactcactgcagacgatgcttgagagggattcattcttcccccggattggtgaaccagcacaggagactgaattcagcaagctgtactgattcttttacgcacagatttgggatgcttcatcaccatatgaacagatgatccggatcagttaattctcgattgatgctggtggtttttgctcaggcattccattgtgtactcatagtaatgtataaacattgcctgcagcaaccatgatagatgcagatccaggaaagacagtacaattacaatatctcaaacaatcatctacatcacagcgga

SEQ ID NO: 2303 - DNA, 1492 bp, Zea Mays
gtccgctccgacgcgtctccgtcgaccaatagcgaaaccagagttcgaagccattccttgcaaagactttccaaggacagaagaggatggcatgagggtgttgatagtggagaacctcaggaatccttacgagagcaacctaggagggaccaacaagaggttcaagctgacactgaacaagctttatgcctggaccctggtggactacgagcgtgtcgtcatgattgattccgataacatcttcctccagaacacagacgagctattccaatgtggacagttctgtgctgttttcatcaacccgtgctacttccacaccggtcttttcgtgctccagccttctattgatgtattcagaagcatgcttcatgacctggagactggccgtgaaaactctgatggtgctgaccaaggctttttggttgggtgctacccagacttgctcgacaaaccaatgtttcaccctcctgagaatggcacaaagctcaatgggacctatcgccttcctcttggctatcaaatggatgcgtcatactactatctcaagctacattggcatgtcccctgtgggccaaacagtgtcatcacattccccagcgcaccttggtttaaaccttggtactggtggtcctggccggtcttgccattaggtctttcctggcacaagcagcgctgggacgatcttgggtatgctgctgaaatgccagtgattctgatggagcttttgatgtacatagttatcatagcagtcaccagattggcaaggccagggatcaccaaactgtgctataaccgacggcctgagaagcaaagtgccctggtgcagtggctgatcaagctggctgcaattgcggctatggtggctgcatattccattccattctttgtggtcccacgcacagtccacccgatcatgggctggtccgtctacctatttggcgcgcttgccttgtcagtgctcgttatcaatgtttttctgctcccgccacttgatgtgcttacaacgtggcttgcaattgtgggcatgctcatcgttatggcattcccatggtaccatgatggtgttgtgagggctctggcggtctttggatatgcattttgctctgcgccaatcttgtgggcatccatggtgaggatgatggactcactgcagacgatgcttgagagggattcattcttcccccggattggtgaaccagcacaggagactgaattcagcaagctgtactgattcttttacgcacagatttgggatgcttcatcaccatatgaacagatgatccggatcagttaattctcgattgatgctggtggtttttgctcaggcattccattgtgtactcatagtaatgtataaacattgcctgcagcaaccatgatagatgcagatccaggaaagacaggtcagttgtactgaattgaaaaaaagcatatttgctgcatgagacgggataggggattgttgtgaagtactacgtaccttatttcatgc

SEQ ID NO: 2304 - DNA, 1781 bp, Zea Mays
gccaatcatacgatggattggtggttggctcgccaatcatatgatgcattggagcaggcccgtcgaccgtcggtcgcacttcccagtgctccgagccgtcacgccaccaatccccgaccagagtccaaattacttcccgctccgaattccgatgccgcgcacggtggccgtggtcggcgcgggcgctgcagggctggtggccgcgcgccagctgctccgcgagggcctcgacgtcgcggtcttcgagaagtcggggcgcgcggggggcacctgggcgtacgaccctcgcgcagacgccgacccgctgagccgcgacccgggctcccccagcgctgtgcacggaagcctctacgcgtcgctgcgcacaaacctgacgcgcgacctcatgggcttctcggacttcccgatggccggctgggtgttcgcgggcgacgcgcgcgcgttcccgggccaccaggaggtgctcgcgttcctcgacgccttcgcggaagagtgcggcgtcgccgcccgcgtcaggctccgctccgaggtgctgcgcgtgcgggagcggtgggcggtctcgtggcgccgcgaggacggcgaggtggcggaggaggtgttcgacgccgtcgtggtctgcaacggccactgtacggtgcccagggtgcccggcattcgaggaattgacaattggagcgggaagcagattcacagccacaattatcgcacccctgaaccgtttcgggatcagaacgttgtcgttgtaggattctcgaccagtggaatcgacattgcttcagagatctcacgtctcgccaaggaagtgcacgtagcagacaggtactccagggacaggctgggaaagatggcgctgtaccagaatgtctggattcacgcagaggtggactgcatccaggatgacggcaaagtccgctttgctgaaggttccgtggtggatgcggacgttattctttactgcacagggtatcgctaccatttcccgtttctcgacctggatgggctcaccgtcgacgacaaccgtgtcgggccactgtacaagcacgtcttccccccaaagtacgcgccgaacctgtcattcgttggtctaccagtcaagaccatcgtcttccaggagctggagcaggaagccaagtgggtcgcggccgtgctgtcggggcgggccacgctgccaagcgaggaggacatgatggcgtccgtgaggagccattaccagctgatggaggaggccgggaggccgaagcgccacacgcacgcactggcagctcagtgggcagagcacatgaactggctcgcggaccaggtcggcgagcctccagtggagccgtggaagtgcgaggtgttcgataaggtacttgcgagcatcttggcgctcgacgaggcctaccgagatcgctgggaacaagaggaggacggtggctccagtgggcatcaggaaggcattaggatcagagcgagctccatcatgtaacggaacctgaacggttgcggcaacctgacgccgtcgtatcctgattttactctcgtgatacttcacttcgttgtgatcttcactgaaacaatttgccaccatacaacgggaataaaaaaactatttagggcttgttcggttagctctcaatccatatgaattgagtgggattggatgtgtttgaatcccgaataagtcaaacttattcttaattttttccaatctcatccaatccatgtgtatagggaataaccaaacaagaccttattatttttgtttaggagtgaataaaaccgtgtttgcaatggcctta

SEQ ID NO: 2305 - DNA, 1708 bp, Zea Mays
attggagcaggcccgtcgaccgtcggtcgcacttcccagtgctccgagccgtcacgccaccaatccccgaccagagtccaaattacttcccgctccgaattccgatgccgcgcacggtggccgtggtcggcgcgggcgctgcagggctggtggccgcgcgccagctgctccgcgagggcctcgacgtcgcggtcttcgagaagtcggggcgcgcggggggcacctgggcgtacgaccctcgcgcagacgccgacccgctgagccgcgacccgggctcccccagcgctgtgcacggaagcctctacgcgtcgctgcgcacaaacctgacgcgcgacctcatgggcttctcggacttcccgatggccggctgggtgttcgcgggcgacgcgcgcgcgttcccgggccaccaggaggtgctcgcgttcctcgacgccttcgcggaagagtgcggcgtcgccgcccgcgtcaggctccgctccgaggtgctgcgcgtgcgggagcggtgggcggtctcgtggcgccgcgaggacggcgaggtggcggaggaggtgttcgacgccgtcgtggtctgcaacggccactgtacggtgcccagggtgcccggcattcgagattcacagccacaattatcgcacccctgaaccgtttcgggatcagaacgttgtcgttgtaggattctcgaccagtggaatcgacattgcttcagagatctcacgtctcgccaaggaagtgcacgtagcagacaggtactccagggacaggctgggaaagatggcgctgtaccagaatgtctggattcacgcagaggtggactgcatccaggatgacggcaaagtccgctttgctgaaggttccgtggtggatgcggacgttattctttactgcacagggtatcgctaccatttcccgtttctcgacctggatgggctcaccgtcgacgacaaccgtgtcgggccactgtacaagcacgtcttccccccaaagtacgcgccgaacctgtcattcgttggtctaccagtcaagaccatcgtcttccaggagctggagcaggaagccaagtgggtcgcggccgtgctgtcggggcgggccacgctgccaagcgaggaggacatgatggcgtccgtgaggagccattaccagctgatggaggaggccgggaggccgaagcgccacacgcacgcactggcagctcagtgggcagagcacatgaactggctcgcggaccaggtcggcgagcctccagtggagccgtggaagtgcgaggtgttcgataaggtacttgcgagcatcttggcgctcgacgaggcctaccgagatcgctgggaacaagaggaggacggtggctccagtgggcatcaggaaggcattaggatcagagcgagctccatcatgtaacggaacctgaacggttgcggcaacctgacgccgtcgtatcctgattttactctcgtgatacttcacttcgttgtgatcttcactgaaacaatttgccaccatacaacgggaataaaaaaactatttagggcttgttcggttagctctcaatccatatgaattgagtgggattggatgtgtttgaatcccgaataagtcaaacttattcttaattttttccaatctcatccaatccatgtgtatagggaataaccaaacaagaccttattatttttgtttaggagtgaataaaaccgtgtttgcaatggcctta

SEQ ID NO: 2306 - DNA, 721 bp, Zea Mays
atggtacgttaattaatcacgtgatgtgaaggacaagagctggattaatcacaagacgatgttgatggacgaagctaaagtggacggatcaaccaagtgccagaatgggagatactcaccaagtgattatcatttaacaacactaacgtagtgttatcccagggttttattccctgttgttttcaggttataattttgttctgttgtggatggtgctaagtgtcggtgggctcggccttcttatataagtatatcccatctttagcttctttattgaggattgtcacttaagctagcatgtattttaaaacttataaatgttttatacattcaaattgtaatcttttgaatcaatttctcttgtaatcactccgatgatatattgtaatattgctataacttgtaaatgttgtaacttgtaatcattttgtaataaagaatttatttccgctgcaagtgtttgtatgtgagttgtgtttacttaatcctgcgatcttggcggtaagtcatttatccggggtcctcggggcacttggacagatcctgttaagttgtttggtgcacatgtatagccgtctgaggtctttgagacaaggactggtgcatgtgggcccgataacttgggaggttctacgacaattaacaaagatgaacttaaattgaatcgtcgcacgacgaagcgcgcgacacagcacatcgactaaactaaaattgaaaaagg

SEQ ID NO: 2307 - DNA, 1265 bp, Zea Mays
gttattttcagccttatccagccaccatccgtggcttatcctcacgtacgtagctcctggaattctcaagaagccaccgtaggtctctggtgcctatctcacatcgtgcttgactccccacgttcgaaccccatgaccagcgcagctcggccagggcgctggatcccgctggccatggcgctcatccctccctgctgttagatgcacagaacgtctctagctctccatagatggcagccagctgcgccctcacctcctcccatggtgacctcgcccatggcggctccccctgctcggcgtactcccctctgcaggagctcgcccagcccctctctgctggtgaccgagccatctccctggacacaccccttcccttgctacttcctatggttgccctagccgacctctcccatggcgtaggaaacagcagcacctccctccatggacgtcctaggtcctcgccatactctccgtcgacctcgtcatcaccacggccacaacctctcttccgtcgttgtggagaccccgtcagcctcgcgtgctgtccgatccttgcgtcgcgcccagggaggttacatggaagaagaagaaaagcccagagcgatgctccccatgtgctcgacgaaaagccagaacgggagatcatctgttttttttgtggaattcgcgtcgaatttattaacggatgtttgggtgaagaagaaggttacgccccctgttcctcctttccatggttccccacggcagcggcaggaaacatccccacaccagacgccgagatccatgccagtggctcgatcttcctcaacgttggctgcctctccgacctcgctgtggacctgctgctcaccgccgcgtgtgcactttttcctccgagcagcagccccggatctgcgcagccccggccttattatcgacctcagtggttttagccataatcaatgatattgtgttaaagttttgtaagtatcaagaacatgataatgggagaagctaaataggaactgaattaggcttcttgctattgggactgcatgaccagttttaattgcgcagctagttcaataaagtaaaccatgttttctgtagaaatattatatataaacgttgtagctcacttgtttatcttgcttgtgtaaaaatttcatgaccataggtctagtagtttaggagttatgtttttccaagtccagtttcagaatctgtccaaattctgtataggtttcggaaattggattgtttggctaagttaaaatgagaatcag

SEQ ID NO: 2308 - DNA, 1649 bp, Zea Mays
gttattttcagccttatccagccaccatccgtggcttatcctcacgtacgtagctcctggaattctcaagaagccaccgtaggtctctggtgcctatctcacatcgtgcttgactccccacgttcgaaccccatgaccagcgcagctcggccagggcgctggatcccgctggccatggcgctcatccctccctgctgttagatgcacagaacgtctctagctctccatagatggcagccagctgcgccctcacctcctcccatggtgacctcgcccatggcggctccccctgctcggcgtactcccctctgcaggagctcgcccagcccctctctgctggtgaccgagccatctccctggacacaccccttcccttgctacttcctatggttgccctagccgacctctcccatggcgtaggaaacagcagcacctccctccatggacgtcctaggtcctcgccatactctccgtcgacctcgtcatcaccacggccacaacctctcttccgtcgttgtggagaccccgtcagcctcgcgtgctgtccgatccttgcgtcgcgcccagggaggttacatggaagaagaagaaaagcccagagcgatgctccccatgtgctcgacgaaaagccagaacgggagatcatctgttttttttgtggaattcgcgtcgaatttattaacgaaatattaggatgtttgggtgaagaagaaggttacgccccctgttcctcctttccatggttccccacggcagcggcaggaaacatccccacaccagacgccgagatccatgccagtggctcgatcttcctcaacgttggctgcctctccgacctcgctgtggacctgctgctcaccgccgcgtgtgcactttttcctccgagcagcagccccggatctgcgcagccccggccttattatcgacctcagtacgttaattaatcacgtgatgtgaaggacaagagctggattaatcacaagacgatgttgatggacgaagctaaagtggacggatcaaccaagtgccagaatgggagatactcaccaagtgattatcatttaacaacactaacgtagtgttatcccagggttttattccctgttgttttcaggttataattttgttctgttgtggatggtgctaagtgtcggtgggctcggccttcttatataagtatatcccatctttagcttctttattgaggattgtcacttaagctagcatgtattttaaaacttataaatgttttatacattcaaattgtaatcttttgaatcaatttctcttgtaatcactccgatgatatattgtaatattgctataacttgtaaatgttgtaacttgtaatcattttgtaataaagaatttatttccgctgcaagtgtttgtatgtgagttgtgtttacttaatcctgcgatcttggcggtaagtcatttatccggggtcctcggggcacttggacagatcctgttaagttgtttggtgcacatgtatagccgtctgaggtctttgagacaaggactggtgcatgtgggcccgataacttgggaggttctacgacaattaacaaagatgaacttaaattgaatcgtcgcacgacgaagcgcgcgacacagcacatcgactaaactaaaattgaaaaagg

SEQ ID NO: 2309 - DNA, 2109 bp, Zea Mays
gtattgtccaaatgaaggccaagtgagttgaaccacgagtgagtcgtgtggtaggtgtaggtgtcgaggcgggattataagccaatgtaaccgaaggatgccttaacgaataacacgattcaaaatctttccccccttgttgcctgttgtgttcttccacgttctttgccaaattccggcttccttttccatgcccaagcatctcgttatccaagaccgtgacaagcaccacggcaccagtccgcgacaagtcaaccaaacgaaccaaaggcagagctgaacgcgaaagggagggagctcggatcggatgcggcggcgcgcggaggtggccgtggtgggcgcgggcgcggcggggctggtggccgcgcgcgagctgctccgcgagggccacaccgtgtccgtcttcgagaagtcaggccgcgtggggggcacctgggcgtacagtccgcgcgcggacgcggacccgctgggcagcgacccgggcgcccccggcgccgtgcacagcagcctgtatgcgtcgctgcgcaccaacctgccgcgcgagctcatgggcttctcgggcttcccgctggccgggcgggcgttcgccggcgatccgcgcacgttcccgggccaccgggaggtcctcgcctacctcgacgccttcgccgcggattccggcgtcgccccgcacgtcaggctccgagcccaagtgctgcgggtgaggccgctctgtccgggtcggggacagggggagaagtgggcggtggcgtggcgcggggaagacggcgacgtcgcggaggaggcattcgacgccgtcgtcgtctgcaatggccactgctcggtgcctctagtgcccaagatccgaggaattaacaagtggcggggaaagcaaatgcacagccacaattaccgcaccccggaaccattccaagatcagagtgttgtagtcgtaggattgggagccagcggaatcgacatcgctagagaaatctcacacgtggccaaggaggtgcacatctcagctagatactcggagggcaggctcggaaagattgaactctatcataacgcctggatgcacagcgagatagagtgcatccaagacgacggccaggtgcgctttgccgaaggctcatctgtggctgcagacaccattctttactgcacagggtaccgctaccattttccgttcctggacctggatgggttcaccgtcgacgacaaccgcgtcgggccactgtacaagcacgtcttcccacccaagcatgcacccaatctctgtttcgttgggctgccatacaagatttcttgcgtgtgcttcgcagagcatcatcttccaggcactagagctggaatccaagtgggtcgccgccgtcctgtcggggcgtgccgagctgccggtggaggaggacatgacggccgacgtggaagaggagtaccagcgcatggaggacgccgggaagccgaagcgccacacccacacgctgtggcctcggtgggtggagtacctgaactgggtggcggaccaggtcggcgaggcgcacctggagcctaggaagtgcgagatgtatgagaaggcgctcaagtgcgtctggtccctggacgagggctaccgtgatcgatgggaagaagaaagcattggcagtggctgaggctcccgaattttttgtttttgagtcctttttgtgtcaaaaatttccaattagacccccagaaaacttaaatgcaattttggacccatttctcggcgccatgagctatggcgccgagtttacacatctcggcgccatagatcttggcgccgagctacctgccgcgctgtcgtccacgagctcgaatatataaccacaaagcttgtctagctcagttggcaaagtgcaaggctcttaaccttaaggtcgtgggttcgagccccaccgtgaacatatttttttgtctttgtcactgatttgttttttattgtccagatttttttgtttatgccgctgatttgtccgtgcgttcaatattttttgtctttgttactgatttattttttattgtccagattttttttgtttatgccgctgatttgttcgtgctttttaattcgatgcttcccgcctcagactccactaattggtgcac

SEQ ID NO: 2310 - DNA, 1643 bp, Zea Mays
gtattgtccaaatgaaggccaagtgagttgaaccacgagtgagtcgtgtggtaggtgtaggtgtcgaggcgggattataagccaatgtaaccgaaggatgccttaacgaataacacgattcaaaatctttccccccttgttgcctgttgtgttcttccacgttctttgccaaattccggcttccttttccatgcccaagcatctcgttatccaagaccgtgacaagcaccacggcaccagtccgcgacaagtcaaccaaacgaaccaaaggcagagctgaacgcgaaagggagggagctcggatcggatgcggcggcgcgcggaggtggccgtggtgggcgcgggcgcggcggggctggtggccgcgcgcgagctgctccgcgagggccacaccgtgtccgtcttcgagaagtcaggccgcgtggggggcacctgggcgtacagtccgcgcgcggacgcggacccgctgggcagcgacccgggcgcccccggcgccgtgcacagcagcctgtatgcgtcgctgcgcaccaacctgccgcgcgagctcatgggcttctcgggcttcccgctggccgggcgggcgttcgccggcgatccgcgcacgttcccgggccaccgggaggtcctcgcctacctcgacgccttcgccgcggattccggcgtcgccccgcacgtcaggctccgagcccaagtgctgcgggtgaggccgctctgtccgggtcggggacagggggagaagtgggcggtggcgtggcgcggggaagacggcgacgtcgcggaggaggcattcgacgccgtcgtcgtctgcaatggccactgctcggtgcctctagtgcccaagatccgaggaattaacaagtggcggggaaagcaaatgcacagccacaattaccgcaccccggaaccattccaagatcagagtgttgtagtcgtaggattgggagccagcggaatcgacatcgctagagaaatctcacacgtggccaaggaggtgcacatctcagctagatactcggagggcaggctcggaaagattgaactctatcataacgcctggatgcacagcgagatagagtgcatccaagacgacggccaggtgcgctttgccgaaggctcatctgtggctgcagacaccattctttactgcacagggtaccgctaccattttccgttcctggacctggatgggttcaccgtcgacgacaaccgcgtcgggccactgtacaagcacgtcttcccacccaagcatgcacccaatctctgtttcgttgggctgccatacaagagcatcatcttccaggcactagagctggaatccaagtgggtcgccgccgtcctgtcggggcgtgccgagctgccggtggaggaggacatgacggccgacgtggaagaggagtaccagcgcatggaggacgccgggaagccgaagcgccacacccacacgctgtggcctcggtgggtggagtacctgaactgggtggcggaccaggtcggcgaggcgcacctggagcctaggaagtgcgagatgtatgagaaggcgctcaagtgcgtctggtccctggacgagggctaccgtgatcgatgggaagaagaaagcattggcagtggctgaggctcgccctaggatcaacaaatcaagcgta

SEQ ID NO: 2311 - DNA, 1580 bp, Zea Mays
cccacacctcacctcacctcaccgatactattatgataccttgacctttcgtccctccctgcactccacgtctccacccccacagagtatccccggccgtgcgcgtcctctttaaaagcaagaccctccccttcctcctcactgccacaccacatcgacagctccatcgattcatccaccgctatctctctctctctctctctctctctctctctctctctctttcaactgtaagggaaaccgagctcaaagtggcaaccatcaatggatattatggcgcttaatgcgagagacgaggagcagtacgggaacaaccatctcgggctcgggctgagcctcagcctcggcctcggcgtcgccaccgcggctccggtcgaggtcgagcccccgccaccgccgcggcagcagcagcagcgagctatcagcgtcgcgcccatcacctccctccccgcgccgcagtggtggaagtggaacggccccggtctcttcttcgggacgacaatggatcagcagcagcagccggcggccgcgcgccacggccacgagatgccgttcctgcggggggtggacgtgaaccgggcccctgccggggataccaggaggggtagctgcagcgaggacgacgaggagcctggcggcgcgtcgtcgtcgccaaacagcacgctctccagcagcctcagcgggaagcgcgcagctccggcgaggagcggcggagaggtggccgaccacaccccgagagccggaggcggcagcgacgacgaggactccggcggtgggtcgcgcaagaagctccgcctgtccaaggaccaggccgccgtcctcgaggagagcttcaaggagcataacacactcaaccccaaggcggcgctggcgaagcagctgaacctgaagccgcgtcaggtggaggtgtggttccagaaccgcagagccaggacgaagctgaagcagacggaggtggactgcgagttcctgaagcgctgctgcgagacgctgacggaggagaaccggcggctgcagcgggaggtggcggagctgcgcgtgctcaagctcgtggcgccgcaccactacgcgcgcatgccgccgcccaccacgctcaccatgtgcccctcctgcgagcgcctcgcctccgcgtccgcgtccgccgaccaggcgggccgtgcagggccctgctggggccctctccccgtgttcgtcgacggcccagcccggaggccgtgatccacgaccacgatatggcatgagatggatgcgcttgctaatcgctaccgctagctaagtagctagtgctaattagggctggatcttctttttttctttgtttggttcttattatactcgcaggctattacagcttagtagtgtttattagtccgatatgataaaaatcttcgttgtttggcagtgttttatttgctgaaaaatagataacgatgtcttatgtctttgtactcataagtgatgcaaaattgtcttactactactttgcatatataaggtttcagttgttaattgctccaagtctgaagtttctgacgtcgatgttttgagtccgaggacagacggaaccatcctgcttttcc

SEQ ID NO: 2312 - DNA, 3645 bp, Zea Mays
ccatcctttctcttagcaggaggtgaggaaaggggacggaagcacgcagaccgggtcggatccaccggcccgcggaacggatcgaggccaccggcatcctcggctcgcgtcgcgtcgcggcgccgagctcgaaatccccggatcggtgcagctgccccctgccgccgcccgataacgcggcgggagggtggtggcctgtcgatctcgcggcgggagctggttaactacctgccaatttgtggatttgtgtgcgtgcttgattttggtgcgtgtgtggtggtgttgagtcgccggcgtggggtgtcggagctagggtttgggcgttcaggatgacgcgccgggtgcggcggcggacatgcagggaacgggagggtaaggtggtgcggggcgcatcgcgtgttgtttcggctgggccggaaggcgaggaggatgcggcggcggtggaggtggactggagggcgctgccggacgacacggtgctgcagctctttgcgcggctgaactaccgcgaccgcgccagcatggcgtcagcgtgccgggcttggcgagcgctgggctcgtcaccctgcttgtggaggacgctcgacctccgcgcacatcgctatgacagggaggtggcgtcgtcgcttgcctcgcggtgcgggagcctgcgtcggatacgcttgcgcggccacgaggcggcagaggccgtcctgggcctccgtgcgcgtggtcttcgcgaggtggtggccgatggctgccgcggcctcacagatgccacgctcgctgtcctcgccgcgcggcacgaggacctccagagcctccagatcgggcccgatcctctcgagcgcatctctagcgacgccctccgccacgtcgcgctttgttgctcgcagctctgccgccttcgcctctcgggtctccgtgaagttgacgcggaggccgtcggagcgctcgcccggtgctgccccctcctcgaggatgtggctttcctcgattgtggcaccgtggatgaggccgcccttgctggtatccactctgtccgattcctctctgtagcaggatgccggaacctgaaatgggctactgcatccacctgctggacccagcttccctccctcattgcccttgacgtctcccgcactgatgttccgccaagtgctgtttcacgcctcatttcccatgccaaaaccctcaagctaatatgcacgctgaactgcatttctgttgaggaggaacagcttcacaatcctgctgtatttagtaactctaagggcaaggtcgtgctaacgattaacagcgatatcttcaaatcttttgagaccatgtttccagttgtggatgtgaaagagcatgagtttttcaatcaatgtaactggagtcacaaagacaagatacctggtgatacgatgacatggctcgaatggatcctgtcacagtcacttctccgaattgcagagtccaacccacaaggcatggatggtttctggctgcagaagggcactacactgctgcttagactgttgaagagtttacaggaggatgtgcaggagcgggcagctacgtcgcttgctacgtttgtagttatggatgatgagagtgcaaatgtggatcctgcaaggtcggaggcagtgatgcagaatgggggcattcgaatgttgctggaccttgcaaggtgctcaagggagagcgcacaatctgaagcagcaaaagctattgccaacttgtcagtgaataccaaggttgccaaggcagttgcagatgaaggcggcattacaatactcattaatttagccaagtcgatgaataggcttgttgccgaagaagctgctggtggcctttggaatctctctgtaggcgaggaccacaaggcggctattgcagtatctggtggcattaaggccctggtcgatctaatatttcgttggcctgctggaactgatggagttcttgaacgtgctgctggcgcgcttgcaaacctggctgctgatgacaagtgtagcttggaagttgcaaaggctggtggtgtccatgctttggttacacttgctagatcatgtaaacttgatggtgtcctagaacaggctgcaagaggtctggctaacttagctgcacatggggacaacaatgacaacaatgctgctgtaggtcaggaagcaggggctctggaggcactggtgcaactaacaagttctcaaaacgagggtgtaagacaagaagctgctggtgctttgtggaacctgtcatttgatgacagaaaccgtgaagccattgctgcagtgggtggcgttgaagctttggttgccctagtgcaacaatgtttgaatgcttcagaaggtcttcaggagagagctgctggtgcattgtggggattatctgtttcagaagctaatagcattgcaattgggcagggtggtggggttgcaccattgctcacattggcacgctcagaggttgaagatgttcacgagacagctgcaggggcactatggaatcttgcattttattctgaatggatgaagttgctttggttggagcatcctcagatagcagttccaagagtgttaatgttgagggagctagaagaatagcatttaagcatatagaaacctttgtgctcactttctcagatccacaaatgttctctatggctgctgcctcctcagccccagcagcgctgtctcatgttgctgaagcagtgtttatacacgaagctggacacctgagatgcagtcgctctgagattggtagatttgtttccatgcttcggaatccttcaccaattcttcgtgcttgtgctgcctttgcccttcttcaggaggtcggcatgcagtgcatcacgcaggtctcttgcaggaagcaggggcaggtcgggtgttgcgcgcagcagcggcagcgacaacagcttctattgaagctaaaatctttgccaggattgtactcaggaacttggagcaccatcagttagggatgtcaacatgaacacccagcagaggttcatcctccaataaacaaaggcctctgcatcgatgggctgcttggccaatgcagaatcaaacagtttggccttcggagccttttgacatcacaacagttttggtctgtgcagacagtgactgaaggagctccaccgaaggtataacccacaactgtgaagtgactgaatgaaaacataagtggcgacccttcgcgtattggacgtttaaggttgagtgtgcaattttctagagttcattttgcgtgtacaagtaaaacttttttagagtcgatgagaattataaactggcatatagcttaacttatggatatttattccttattcgttagcgttgaggtgtgtggcggcgtcatgtagaaagttaggttattcctcctaggatacatgtaactttataaatgtactgttatgtattttcttccttatgattgattctgtgcatttatggatcgagttgtagattaccacttaacgaaacaaaggtttaatttgttcatcaacatgcgcatcagtaagcttattgagtatgaatcctcgtttatttttttttctaaaaataaacttacaaaatttttagtaatgctcttagaaaaaagcttactcagagaattctcatattttttagattttagaaaagattcttaaatctccatttaaaaaataaaaaa

SEQ ID NO: 2313 - DNA, 2858 bp, Zea Mays
gtcacatctttactaatataataggagttctgtacaaaataaataaatgagtacattataaggagacaacggtccagcaacccaaagttgactgggagacgacggcctagacctctcacgaactcgtcacagcatcgtccatgcgcctcatcctgtggtacctgttcttgacctatggggggtgtgagacagcaagagtgagctcacatacgttcagcgctcaacaagttgtggggaataatgtaaatgaactcgccaaaggtgggagctcacgtgaagtgtaaggcttaccaaagaggatggctgaagctaagcattgcttttaaagatggtcaaaattttattagcaattactaagtataagtaaataccaacccaattaagtagtagaacaaaagtaacaataacatcacctgcgatgcaatgcatatgacaaattgaatttagttccataaattaatcatgtgagtgtctgagctgctcatgaccatgagcacggctagtataccggttttacgctctgcagaggttgcgcatctttacccacaagtcatgttacccatctgccaagagacggccaatcccatacacctctaccgaggaggcgaggcaaggtaacactacaaggcctttacaaagttccactagctttagaaaacccgctacagtttataggcagctccagtgtaggaatccctcgcctgaccgccatcgtagcaaaatcaaccaaggacctccctacactgaccactcctctactgcccttgcccctttcgggtaaggtagtcatccactagctttcctagttaatcagccaagggcgtcccattaaacccttgtggtagcactgttttcccgggtggttctccatgttcccattaacataatgatcttatcatgaacagtaaataatgaacagataataaaaagtgtaatcatgagtaatgaatatctctatacccagaaccccataaagcaatagcatgtactacccaaaattcagtggtgaacaaggtataaagatagtcaaactagggtaacctattgggtcccatcaaaattaacctatgcagatcattataattaatcaggacatgactgagtaataagaagtgatcaagggcacaacttgcctaccacttgagattccaggtaccaacttgctcttcagatgacacgtgacctcgcgctagtcgtagcaatacaaacaaacatagtatggacaaaattaacatcacaccaaacataagaataaattgcataataatgatctacgcgttgtaacgagattgtgggttcgagaaccactaaaatcggagtcaaggttaaggagttatggtttataaaagatctatgtgatttaaatgtcaaactatattataatttggttagtataaataatatgagaggttattccataaataattatttcaactttaatctaagttataaattgaccataaattatattctagtgaattataatgataagcagattaaccaacataagttaaatggagatctaattatataataataagacatggtataataaatggtgttatggcatagtacatacttatacgagactagcacaagttgaacggatcaaatcgaagttagaatggattttctatgaattaaataagtttctggatttatttttatattaacaattcattttatgatttaattatgaatttctctattaattctagaccgagaacactattttgacaaagtccagggtgctctgcacaagatttccgggccaaactgtaatagttttcaacaagcgagggatggcgggtttatttctgaaaatggcagggtctctttcgcataatccctggccgaaggggtacaagtgaacgcaaaccgctcagattagacccaacagtgcagattggatttgggcactttataaaccagtgcgcgagattaaccacacgatccagatcctatgcataggataagctcgagcgaaacgttacctcggccatatgatctgagccacgcatttcctgatcgacggcccaagagtcatcttcatcctcccctccgactaagccagatagtagcgcgcttgccaccatgatgaagctgcccgtcggagcaccactgcccgagaccccgggcccaactcccacacgggcaattccgcaggcattcaacgaagcatcccgagcatccatgcgccaaagcaacagcacaacaagctgcaccgcggcggagctttcttcccagctgtcgcgctgcggcgaggaggcccggtccaccaaacgccacaagcacaggaaagttcccgggcgcctatggtgctgcgaataccctaggactccgcaccataatcaatcgcgggggaaaccgagacgaccacggcggtggccatctactctatcctggcggtctctcttcgctctctcctataatggcccttgcatgaggatgcaaaaaacaacgtttttttggaagaactagggattgggagggatggctcggctgtcgtataaatacaccgaaggtgccgagtcctggccaagggggacgtcagttaggtggttacaactactcgggttgttacgatctctggagcttctattgatgtccgtttcgcagcatgagatgaatcacgacgtgagcaacaggagccccacgcgcactccgcaatgtgctggcctgaatttgcatgatgatgtccttgcatcagcatgacataagctccgtctaggtgaataaagaaagtggaaattcacgtctccaatgtggtacgtctggagtagtagttttatcttttttttctcattttccgatttcagttttaaatcccaacttcaaatttttattctatgttttag

SEQ ID NO: 2314 - DNA, 886 bp, Zea Mays
aaactctaccccctttaaaaataatctcgtcctcgagattagtaaggaaagggatgcaacaagtttggtttaaaatttagtttcccatatggtttagggaccaatagttttgtccaaagttcttaaatactagctagtagatgattaggaaaatatggacatagtatgcctagtcatcttattaggtcagatgagttacggttatagtaagtataggccgtggcaaggaagagtttaataagagaagactacatcctgaactatggatcttgattcctcttgaggttggatttgactcatctcctcccttgtcgaggttgagcactcttttcagaccttggtgtctttcttcccggataggaacatgtggttaagacagatttgtaggtgacaaataggtagagccgctagtttagtaggtgactaagagttaaatgggattggcctgacttagtttggttgtttgcttctagattggttggataagttatgtaacctattatgtaggtcaagtggttgtatatggccaaactagtcttagggcaccagtttaggttaacacctatttatatgaataaggtctaatctatttcactagtactaactaatctggtaattatattatttagattagatctggtcccccaagatcacattaacttagattggatctagattaaattgatatcactagattagactagataagatctacttaatttatttcggactagatcatgcttgttactttagaatgagataatcaaagtggttaggacaggttggaatgagaagatagaatccttttaaggtaagatgggtctataagatagatctattctttttcaatgggtgataatctatctttctaaatatatttttgtct

SEQ ID NO: 2315 - DNA, 2570 bp, Zea Mays
cactcacactcgctctctcactgaagtgaggaagaacagagagaaggggagggagatcgtagcagcggcgctgttcgagagctcgccgatctgctgcgggaatggggtgcacggcgtccaaggtggagcaggaggacacggtccggcgctgcaaggagcgccgccgccacatgaaggacgcggtagcggcgcgccagctgctggcatccgcgcacgccgactacctccgctctctccgcgtcaccgccgccgcgctctcgcgcttcgcgaagggccacccctcgctcgccgtttcgcaccacactacccccgtcctcctctccgctgccgcaccgccgcctgcccccagcgccgcccgtgcgctccccacaccggcgccgtccaccgccgcgtcgtcatcgctcccgcctccgacgccgctcgcccagcacccacacccgccgccgcagccgccggcggcgatggcggcgccgcaaccggcgccggcgagggcaccgcgtccgcggcggctcagggtgccccacatcctgtcggactccagcgtggccagccccgcgcggtcgtcgttccgcaagcagccgccggtgggcacgccgtcctcctcgtccgcgtgggactgggagaacttctacccgccgtcgccgccagactccgagttcttcgaccgccgcaaggccgaggtcgagcatgccagccgtctccgggagctcgaggaggaggagaaggcccgggcctacctccagcaccacacccagtacaacctcaaggaagaagacgaggccgccgaagacgacgacggcgaggtggaccatgaaccggaggggatgcattgcggcggatgggaggacgacgagcactacgcgtccacgaccacatcggagaccagatcggaggatgagggcgagatgggggacagatcagaatgcgggttcgcggccagatcggagtgcgggttcgtggccagatcggagtacggcgggacggcaccgtcagagtacgccgccgtcccattgcccctgaggagggatgagaggccagccgcgcacaactcgaccgcaacttccggcagctcaaaaagacggtgtaccattccaacagcgtgctatcagcattgtcgtcgacatggacatcaaaaccgccattggctgtacgatacaagttggacactaatgcactggagatggagtcgacggaagggaagagtcatggatccactctagagcggcttttggcttgggagaagaagctctacgaggaggtcaaggctagagagagtgtgaagattgagcatgagaaaaagctttctactctgcagagcctggagtacagaaggagggatagcgcaaagctggacaagaccaaggcctccataaacaggctgcaatccctgatcgtagttacgtcgcaggctgccacaaccacatcatcagccattgttagagtccgtgacaatgagcttgcaccacagcttgtccagctctgttttgcgctactgggcatgtggaggtcaatgaaccatttccacgagatacaaaacgagatcgttcagcaagtccgcggcctggtggacaactccatggccgagtcaacatccgacctccataggcttgcgactcgtgatctcgaggccgctgtcgcggcatggcactcgaacttcaaccgtctcatcaagtaccaacgcgactacatccgctctctgtacggctggttgaagctcacgctctgccaggtggacagcagcgtgccccaggaagtccatgcctcgatgatctcgcgcgagctcaccagcttctgcgacgagtggaagcaggcgctggaccgcctcccggacgccgtcgcctcggaggcgatcaagagcttcgtgaacgtggtccacgtcatcagtcctactccatggtcggcctcggcctccccggcagcgggcgcgatggcatcgaaagccacgctgcgtacgatgcccgcgaccctctcgcggagaagaagaccgagatcgcccagtgccgccggaaggtggaggacgagatgacgaggcacgccaaggccgtcgaggtcacgcggtccatgacgctgaacaacatacagaccggcctgccgggtatattccaagccatagctgggttctcggggacagtggtcgaagctcttgatgtggtctgccgccgagctgggtctgtgcggtagaagaagctctttcccatcaggattaccaagagaccatttgctgcctctctctctctctctctctttctgggtgattcagtagtttatttatatagggaaactgcaatatattatatatatagctcaaagtagagtggtcaagtatagaagatggttccccggatgttttgccctgtcacaggatggtttcagttgtagttgtagataatgtgattttgcccaggatttgttggtctcctttttctggggcgagtgcgaggggagagatttataatgtacagacattaaggttgccttgcactctagcctcatcatgatcaagcctgtgtttctgtttagcaaaagcgctggtgtcctactttctttatatatatatatatatatatata

SEQ ID NO: 2316 - DNA, 1529 bp, Zea Mays
ggcccatataaagttgcaatgtatctgcaatgagttcatctactccggggtgttctccgcacttctcaagaaagaaatagttggaaattccccggatcgtctgcgcttggcttggctagagagagtgtgaagattgagcatgagaaaaagctttctactctgcagagcctggagtacagaaggagggatagcgcaaagctggacaagaccaaggcctccataaacaggctgcaatccctgatcgtagttacgtcgcaggctgccacaaccacatcatcagccattgttagagtccgtgacaatgagcttgcaccacagcttgtccagctctgttttgcgctactgggcatgtggaggtcaatgaaccatttccacgagatacaaaacgagatcgttcagcaagtccgcggcctggtggacaactccatggccgagtcaacatccgacctccataggcttgcgactcgtgatctcgaggccgctgtcgcggcatggcactcgaacttcaaccgtctcatcaagtaccaacgcgactacatccgctctctgtacggctggttgaagctcacgctctgccaggtggacagcagcgtgccccaggaagtccatgcctcgatgatctcgcgcgagctcaccagcttctgcgacgagtggaagcaggcgctggaccgcctcccggacgccgtcgcctcggaggcgatcaagagcttcgtgaacgtggtccacgtcatctacaccaagcaggccgaggagatgaagatcaagaagcgggcggagacgtactccaaggagctggagaagaaggccaactcgctcaggtccatcgagaagaagtactaccagtcctactccatggtcggcctcggcctccccggcagcgggcgcgatggcatcgaaagccacgctgcgtacgatgcccgcgaccctctcgcggagaagaagaccgagatcgcccagtgccgccggaaggtggaggacgagatgacgaggcacgccaaggccgtcgaggtcacgcggtccatgacgctgaacaacatacagaccggcctgccgggtatattccaagccatagctgggttctcggggacagtggtcgaagctcttgatgtggtctgccgccgagctgggtctgtgcggtagaagaagctctttcccatcaggattaccaagagaccatttgctgcctctctctctctctctctctttctgggtgattcagtagtttatttatatagggaaactgcaatatattatatatatagctcaaagtagagtggtcaagtatagaagatggttccccggatgttttgccctgtcacaggatggtttcagttgtagttgtagataatgtgattttgcccaggatttgttggtctcctttttctggggcgagtgcgaggggagagatttataatgtacagacattaaggttgccttgcactctagcctcatcatgatcaagcctgtgtttctgtttagcaaaagcgctggtgtcctactttctttatatatatatatatatatatata

SEQ ID NO: 2317 - DNA, 1364 bp, Zea Mays
cctacacccacgatgccaagcacaggcacagccgaccaaaggagcggagactgatgaatgataaacagcctgctgctgcctacctgcctgcgtatgaaaagcgacgagcgacgaggatcatgaaccaccatgatggcggcgtcgagatcgggatccatatgcatgtgagagcaagacgtgaccatctcctaccttttacagctcacaaagacgaagctcggaggagctggtgaccagaccttggggccatgcatggatcactttcccaacccttgttatcgagtatagagtaggacgggcggataaaatactagatcccgagctcggaaaatatggcgtcggtgcaagtggaggccaatcatggccacggtgctgccggctctccaccttggaagctttatcacaacccccactacaccccgcggggcaggggcacccatctctcctcatcctgctgctcgccctctccttgccaagtccgcaggagtcccgagccccctcctatgatcattgcgctggacgacgaggaggtcgaccaagggtacgggtacggcgccatgtcgtcggagctggagctctgcgtggcacgcatcagggacctgagggcggagctggagttcgagcggcgcatgcggcgcaaggcggaggcgctgagcgaggcgctggccgcggagctggccgacgagcggcggcggagcgaggccgcggaggccgagtgccgggcgctgcgggaggaggccggcgccgcgcgcgcggaggcggagcgcgccctggagggcgtcgaggaggagcggcggatgctgcgcgtcgccgagctgtggcgcgaggagcgggtgcagatgaagctcgccgacgccagggccgcgctggacgagaagctgcgggagatcgacgacgccgtggcacagctccaggccactgccgacgccaacaagagcagctgctgcagcagccccaacggcagcaagtcggcgagccagcacggcgggcaacagagcccgcagcacggtaagccgcaccggcgagagcccggcggcggcggcgagaacccgcacatccggagggggatcaaggggttcgtggagttccccagggccgcgcgcctgcgcctgcgcccgcgcccgcgcgaggagcgggtggatctggtgtccaacctcgagtgccagcgggcgcagctgcgcgtgctcatgcggcacaggagccccgccgccggcatgggcctcatcggcgcagcagaaaacctggtcgtgtagtgcaccgtatactaacgtatagcgtatgtttattgaggtggtcggtaactctgtatcttcctctgttccacttcatattatgggacattcacattttggtacagtacagaa

SEQ ID NO: 2318 - DNA, 329 bp, Zea Mays
ctccggcttcagatctctgtagaccactccaagcatatgcaggtactccagcgcaaggagcacttctgcggcgtaaaacctggcagaaaagaaaaaaaaagagagagatcatacaccccagaattggcgaccattctgtttattcgaagtttcagactccggcaaagaatagttcaagaagcaatgatgaaaatgcgcaaacgatataggagtaataaacaatgtgtctatcctaatctaggaatcatgttctgcagcacgagacatgcattaaacattgcgtctatgctaatttaggcatcagtttgttaagcatgactagtagagac

SEQ ID NO: 2319 - DNA, 592 bp, Zea Mays
cttgtgagcactgtttcctgtaggagggcaatgatgttggaacacagtataggtcagggatatactactataacccagagcaggagaaggcggcaagagagtccctggagaagcagcagaagcttctgaaccggaagatcgtcaccgagatcgttccagcgaagaggttctatagagcagaagagtaccatcagcagtacctggagaagggcggccgcttcggcttcgggcaatctgcagccaagggctgcaatgaccccatccgatgctacggatgagccaaatggacctctacgtgcatggtgtgaatcgtaactgaataagggatgcatcaaagccagattttatactgctttcctaggtttgttttgccactattgaacggctgtaagagtttagctatatactaccatggtactccaatcatcgtgtacaaaaccatattgtattacatgcaagtgcgagtgagatttaagcgtaaacagattgttgtagaattcgtacgaattttacagagcagaaacaatgggatgcagggattgccagtgatgatggtggcatattttttttaaaatagtatattctacaaacc

SEQ ID NO: 2320 - DNA, 2094 bp, Zea Mays
aaaaaaataattttgtaagtaatctaatctaatattactttatatcataaatattaacattttttataaatttagcataacttaaaattttcaaaatacaagaattatattactttctatacaactatactatgtcactagtttaaactttacaaaactcactaaaccaaatcatctcactcaagctccactaaatccaccaaataaattgcacccagacttaacacactagattagatcattgtataaacccctccttactcgtgccccctactacccctccctcccggttccctcctcttccatcatagagttatcacaaactatatgctagttctataggcgagtggaatcaaataccgcaaaatgacaagcaataacatggcaaagaaagaaatttggtccattgaaataaggttccaagatacagatcataatcttttcgaaaacattgctaaagcacaaatggtgacatgcttcctctggctctcaaggtttgatgtgaaactttccatgtttacttctcgtagatccaggggtgctggctgctctgccaatcagcagggccctcggggaaccacagggcaatctccttattagcactctcaatgctgtcacttccatgaatgacattcctatagcacaaaacaaggtcatgagaacttggcatcatagtagaatctgataccacagacataatccgagaggctttaacactacatttaaaaaatgggttttctagattaaatcagaagtacaatacagcaaaaccctcatggacaactacgcagaataagatacagtacaccccaactattcatggctaaagacgagttaaatggatgattaaacagcaaccagagcaaccagtccccacaacaccaggaaagtacatcacttacatccactgatgtctaaatgttttgtggactccacatcagattcagaacaagtataagctcagatctggtaaacacatgccagaggatgtacctactggacccacgagttggatgtaacaggtcataatgccaacattaaaacagttgatctgcagcatggctgcaatcatgagatgaccacaaatgttcattaccccaagatacaaacaaactaatgaactgagagccaacatttggtcataatcatctacatgcattgtctcttaacatctaatttgactacacaaaataaataaccgtagctctacataaatccaatgctagtcagtcaagaattttagcatcactatggaaaagagcaaattttaggatatataactacgccgaactcaggagtgtgaacattttttacattggatgtatggcagtcccaattggattgagcagctttaacacattaagcatctaagcataaccaatgcatgaataacggtgactgaaaaccataagatacaaaaatcggactgagatctaacctgccaatgtcgacagcaaagtcgccacggatggtgccgggctcagaagccagggggttggtggcgccaatgatcttgcggccagttgtgacgacgctcttgccctcccagaccatggccaccacagggccagagatgatgtagtccacgaggccctggaagaagggcttggaggcgagatcggcgtagtgcttctcagcaaacgacctctccacgttcacaagcttcaaggctgcatttcgagttggcaggttatcaagcacgacttgttttacaaaccgtaatcagattacaaaaaacttagcagctatgcaccaaaatctttatcaacagatttaggaaaagtgacatcttatttgagcacaaactgttgaatttccgtctaaagccacatctttagtctttaaatggagaaattgaaggctgtttcggaacataatggaagtttgaatcaaaacatggacgctagattacccttgaggtagaagcccttcttctcaaaacggctgatgatctcaccaatctgaaaaaaccaagcagggaggcccctctggacgccgtcaggcttgatcatgatgaaggtgctctccattgcggcgactgcgagagggcgctggcacttgtttgatggtctggttttgtcggcgccgtcggag

SEQ ID NO: 2321 - DNA, 1678 bp, Zea Mays
tattactttctatacaactatactatgtcactagtttaaactttacaaaactcactaaaccaaatcatctcactcaagctccactaaatccaccaaataaattgcacccagacttaacacactagattagatcattgtataaacccctccttactcgtgccccctactacccctccctcccggttccctcctcttccatcatagagttatcacaaactatatgctagttctataggcgagtggaatcaaataccgcaaaatgacaagcaataacatggcaaagaaagaaatttggtccattgaaataaggttccaagatacagatcataatcttttcgaaaacattgctaaagcacaaatggtgacatgcttcctctggctctcaaggtttgatgtgaaactttccatgtttacttctcgtagatccaggggtgctggctgctctgccaatcagcagggccctcggggaaccacagggcaatctccttattagcactctcaatgctgtcacttccatgaatgacattcctatagcacaaaacaaggtcatgagaacttggcatcatagtagaatctgataccacagacataatccgagaggctttaacactacatttaaaaaatgggttttctagattaaatcagaagtacaatacagcaaaaccctcatggacaactacgcagaataagatacagtacaccccaactattcatggctaaagacgagttaaatggatgattaaacagcaaccagagcaaccagtccccacaacaccaggaaagtacatcacttacatccactgatgtctaaatgttttgtggactccacatcagattcagaacaagtataagctcagatctggtaaacacatgccagaggatgtacctactggacccacgagttggatgtaacaggtcataatgccaacattaaaacagttgatctgcagcatggctgcaatcatgagatgaccacaaatgttcattaccccaagatacaaacaaactaatgaactgagagccaacatttggtcataatcatctacatgcattgtctcttaacatctaatttgactacacaaaataaataaccgtagctctacataaatccaatgctagtcagtcaagaattttagcatcactatggaaaagagcaaattttaggatatataactacgccgaactcaggagtgtgaacattttttacattggatgtatggcagtcccaattggattgagcagctttaacacattaagcatctaagcataaccaatgcatgaataacggtgactgaaaaccataagatacaaaaatcggactgagatctaacctgccaatgtcgacagcaaagtcgccacggatggtgccgggctcagaagccagggggttggtggcgccaatgatcttgcggccagttgtgacgacgctcttgccctcccagaccatggccaccacagggccagagatgatgtagtccacgaggccctggaagaagggcttggaggcgagatcggcgtagtgcttctcagcaaacgacctctccacgttcacaagcttcaagggaggcccctctggacgccgtcaggcttgatcatgatgaaggtgctctccattgcggcgactgcgagagggcgctggcacttgtttgatggtctggttttgtcggcgccgtcggag

SEQ ID NO: 2322 - DNA, 1601 bp, Zea Mays
aagttgagcccgtgagaagccaaatcgcgaacccacccgggccaggggcaaacctcgtgctcccctccacttgccgaggaggccgatgccgccgcgatggaggaggccgcggcggtcgcgaagaggtggcccgggtggcccggggacagcgtgttccggctggtggtgccagtgctcaaggtcggaagcataatcgggcggaagggcgagctcattaagcgcctcgtcgaggagaccaaggccagggtccgcatcctcgagggacctgtcggcgccaccgagcgtatcgttttggtttctggaaaagaagatccagacttggagctacctccagccatggatgctctcatgagagtttttaagcgtgtcactgggataacagatggagctgctgagggcactcaggccgctgctactcctgatgtatgtgctgcccgattgttggttcctggagctcaggcaattaatctaattgggaagcaaggtgcaactatcaaagcaatccaggagagcacgagtgcaacaatacgggtaatatcagtagatgaacatgaacgaccattctatgtaactgacgatgaaaggatagttgagatacaaggcgatacagagaaagttctaaaagcactgcaagcagtttcaaatcatcttcggaagtttttggttgatcatagtgtacttccattatttgaaaagactaatactacagtgagccaagatcgcaatggtgatggttggagcgatatgtcacgtccttcaattggttctgcacaagtgaatcaactaccttcagtgttagatgactatattcttcaagtgaagagggatcctctgtaccttgaacgagaatctttggtagatcataacattcatcgctcaggcgtatcactttatgggcgtgatccagccttgtcaacactacgaccctctgcagtacatggtgctggctcactacttacacagataacccaaaccatgcaaatcccacttacctatgctgaagacattataggagttaaaggagcaaatattgcgtacatacgagctaatagtggggctgttgttacaattcaggagagtttgggtagtcctgatgatattactgttgaaataaaggggacatcttcacaggactcgttggctgcacaccgagaacctgtcaggagcagttatgtgggggcaggattagattcagtatataggtccagctactcacaatatggcagctcaatctatccctcgtcatcactgccgtcttattctagcatcgatgatgttagtagatacccgtcttcaggccttggtggctatggttcgagttaccggtactaatagcagtttgtcctcgggcttgaatgcttgatggcaccagtgatcattgtatcccagtacccagacttcagggtctgctttgttttgacaaacaattaattggttttatagattttcgccactcatggattcagaaattgtacatgtttgctggtgccttttttttttccttagcgctacaatttaggagctgtttggttggtctttttcagaccaccaatgatttccggcgtggatgtggatgtatgtatagtgctattttttgtttg

SEQ ID NO: 2323 - DNA, 1757 bp, Zea Mays
aagttgagcccgtgagaagccaaatcgcgaacccacccgggccaggggcaaacctcgtgctcccctccacttgccgaggaggctcgcgacccgcgacgccttccgcagccccgacccaaaccctagccccctccaccgtactgccaccgtcatggccgaatcatctgccgctgccgaggtcgggtcgccagcttcgttgccaccactggtcgccgaggaggccgatgccgccgcgatggaggaggccgcggcggtcgcgaagaggtggcccgggtggcccggggacagcgtgttccggctggtggtgccagtgctcaaggtcggaagcataatcgggcggaagggcgagctcattaagcgcctcgtcgaggagaccaaggccagggtccgcatcctcgagggacctgtcggcgccaccgagcgtatcgttttggtttctggaaaagaagatccagacttggagctacctccagccatggatgctctcatgagagtttttaagcgtgtcactgggataacagatggagctgctgagggcactcaggccgctgctactcctgatgtatgtgctgcccgattgttggttcctggagctcaggcaattaatctaattgggaagcaaggtgcaactatcaaagcaatccaggagagcacgagtgcaacaatacgggtaatatcagtagatgaacatgaacgaccattctatgtaactgacgatgaaaggatagttgagatacaaggcgatacagagaaagttctaaaagcactgcaagcagtttcaaatcatcttcggaagtttttggttgatcatagtgtacttccattatttgaaaagacttgagccaagatcgcaatggtgatggttggagcgatatgtcacgtccttcaattggttctgcacaagtgaatcaactaccttcagtgttagatgactatattcttcaagtgaagagggatcctctgtaccttgaacgagaatctttggtagatcataacattcatcgctcaggcgtatcactttatgggcgtgatccagccttgtcaacactacgaccctctgcagtacatggtgctggctcactacttacacagataacccaaaccatgcaaatcccacttacctatgctgaagacattataggagttaaaggagcaaatattgcgtacatacgagctaatagtggggctgttgttacaattcaggagagtttgggtagtcctgatgatattactgttgaaataaaggggacatcttcacaggtgcaagctgcacagcagctcatccaggactcgttggctgcacaccgagaacctgtcaggagcagttatgtgggggcaggattagattcagtatataggtccagctactcacaatatggcagctcaatctatccctcgtcatcactgccgtcttattctagcatcgatgatgttagtagatacccgtcttcaggccttggtggctatggttcgagttaccggtactaatagcagtttgtcctcgggcttgaatgcttgatggcaccagtgatcattgtatcccagtacccagacttcagggtctgctttgttttgacaaacaattaattggttttatagattttcgccactcatggattcagaaattgtacatgtttgctggtgccttttttttttccttagcgctacaatttaggagctgtttggttggtctttttcagaccaccaatgatttccggcgtggatgtggatgtatgtatagtgctattttttgtttg

SEQ ID NO: 2324 - DNA, 1274 bp, Zea Mays
cgcgcacatgcgcccgcgtggcagaggctgacccgaccccaaggccgaacgggggaagggcggcagccccagcctccgggtagcgcagcggggccaggagctcagctccccgcctcgtctgggtcggttcggccccgctccgacgcgtggtgggcgcgagcgcgaccagtctgcgacccccggcttcagtcagcgttagtgaggttgaggctctattcgagctgttcaagagcataagtggttcggtgattgatgatggcctgatcaacaaggaagaattccagctagcactatttaagaatcagaggaaagaaaatcttttcgccaatcggatatttgaccttttcgatgtcaagaaaaggggtgtcattgattttggtgactttgtccgagctctaaatgtgtttcatccaaatatcccaatggaagaaaaagtcgatttctcgttcaagctatacgatatggatggcacagggtttattgaacgaaaggaggttaagcagatgttaattgctctcctaggagaatcagaaatgaggctatctgatgagatcattgagacaatcctggataagacattttcagatgctgatgcaaatcaggatggaaaaatagatagaacagagtgggagaattttgtcacaagaaatccttccttgatgaagataatgactctgccatacctcaaggacataacaacaacattccctagctttgtgtttaactcggaagtcgacgatctcgtcacgtgaccaccactctctccgatgtatagttaataaggagttttttctcccctcaaccgcaaaaaggagaacctgtcgagggttacgagtggagatttccagctttctctggcaatgaatggagggtgcgtcaaattggctgccacaaatgtacgagacgacctgtagttttcactcagggcttgtttgggagcaagtggaatgaagggtattgataggactataatcccttgctatctaaaattgaatagtggaggattatatgccctccaattcactccattacctttactcccaaacaagccctcaatggtaatgatgatgcttttgtgttggtgatgattgagactgagttagtatgcagatgtgaacagtttccatttttaccagtgggaaggctgttttgtttgtgaaactgcgatgtgcttgtttgcacactgtactgatcaaacctgattcttgtcaaagtagtactgcattcttcttcaagtcccaaaacttgcatcgcatgtcatataggtctctgag

SEQ ID NO: 2325 - DNA, 1120 bp, Zea Mays
tcccattccttgccatacgcatacgagctactcgctcagcgttagtgaggttgaggctctattcgagctgttcaagagcataagtggttcggtgattgatgatggcctgatcaacaaggaagaattccagctagcactatttaagaatcagaggaaagaaaatcttttcgccaatcggatatttgaccttttcgatgtcaagaaaaggggtgtcattgattttggtgactttgtccgagctctaaatgtgtttcatccaaatatcccaatggaagaaaaagtcgatttctcgttcaagctatacgatatggatggcacagggtttattgaacgaaaggaggttaagcagatgttaattgctctcctaggagaatcagaaatgaggctatctgatgagatcattgagacaatcctggataagacattttcagatgctgatgcaaatcaggatggaaaaatagatagaacagagtgggagaattttgtcacaagaaatccttccttgatgaagataatgactctgccatacctcaaggacataacaacaacattccctagctttgtgtttaactcggaagtcgacgatctcgtcacgtgaccaccactctctccgatgtatagttaataaggagttttttctcccctcaaccgcaaaaaggagaacctgtcgagggttacgagtggagatttccagctttctctggcaatgaatggagggtgcgtcaaattggctgccacaaatgtacgagacgacctgtagttttcactcagggcttgtttgggagcaagtggaatgaagggtattgataggactataatcccttgctatctaaaattgaatagtggaggattatatgccctccaattcactccattacctttactcccaaacaagccctcaatggtaatgatgatgcttttgtgttggtgatgattgagactgagttagtatgcagatgtgaacagtttccatttttaccagtgggaaggctgttttgtttgtgaaactgcgatgtgcttgtttgcacactgtactgatcaaacctgattcttgtcaaagtagtactgcattcttcttcaagtcccaaaacttgcatcgcatgtcatataggtctctgag

SEQ ID NO: 2326 - DNA, 861 bp, Zea Mays
ccagccgctgcgccgcagaacgcgcggagctctcccggtcgcgcctgctaccgccgtcggccgtcctcagccgccctctaggttaagcagatgttaattgctctcctaggagaatcagaaatgaggctatctgatgagatcattgagacaatcctggataagacattttcagatgctgatgcaaatcaggatggaaaaatagatagaacagagtgggagaattttgtcacaagaaatccttccttgatgaagataatgactctgccatacctcaaggacataacaacaacattccctagctttgtgtttaactcggaagtcgacgatctcgtcacgtgaccaccactctctccgatgtatagttaataaggagttttttctcccctcaaccgcaaaaaggagaacctgtcgagggttacgagtggagatttccagctttctctggcaatgaatggagggtgcgtcaaattggctgccacaaatgtacgagacgacctgtagttttcactcagggcttgtttgggagcaagtggaatgaagggtattgataggactataatcccttgctatctaaaattgaatagtggaggattatatgccctccaattcactccattacctttactcccaaacaagccctcaatggtaatgatgatgcttttgtgttggtgatgattgagactgagttagtatgcagatgtgaacagtttccatttttaccagtgggaaggctgttttgtttgtgaaactgcgatgtgcttgtttgcacactgtactgatcaaacctgattcttgtcaaagtagtactgcattcttcttcaagtcccaaaacttgcatcgcatgtcatataggtctctgag

SEQ ID NO: 2327 - DNA, 792 bp, Zea Mays
gccgtcctcagccgccctctaggttaagcagatgttaattgctctcctaggagaatcagaaatgaggctatctgatgagatcattgagacaatcctggataagatgctgatgcaaatcaggatggaaaaatagatagaacagagtgggagaattttgtcacaagaaatccttccttgatgaagataatgactctgccatacctcaaggacataacaacaacattccctagctttgtgtttaactcggaagtcgacgatctcgtcacgtgaccaccactctctccgatgtatagttaataaggagttttttctcccctcaaccgcaaaaaggagaacctgtcgagggttacgagtggagatttccagctttctctggcaatgaatggagggtgcgtcaaattggctgccacaaatgtacgagacgacctgtagttttcactcagggcttgtttgggagcaagtggaatgaagggtattgataggactataatcccttgctatctaaaattgaatagtggaggattatatgccctccaattcactccattacctttactcccaaacaagccctcaatggtaatgatgatgcttttgtgttggtgatgattgagactgagttagtatgcagatgtgaacagtttccatttttaccagtgggaaggctgttttgtttgtgaaactgcgatgtgcttgtttgcacactgtactgatcaaacctgattcttgtcaaagtagtactgcattcttcttcaagtcccaaaacttgcatcgcatgtcatataggtctctgag

SEQ ID NO: 2328 - DNA, 1582 bp, Zea Mays
aaacccccggcacctgtccgaattccagccgcccacctcacgcaagcggcaagcccacgggcgctctctctccccctgcgcctcgtcgcctctccaatccctctcgtcctctcgctttctctctccatctcgtttcccccgcctgcgcagccagcgcaaaccctagccaacaagcgccgttctgcgaggctctcggcagcggataacttaacctgtcgcgcaaggatcgggggagagaaaccagcggcaacttacgtggatcggggttgtttggtgctgctgcggcggcgcagggatggaccggaagcgcatcaaggacgcgctcgagaagcacctggagaggtcgtcgccgtctacttccaggggcgtcgtgtccaaggagagggagcgcctcgctgccgggaagctgccgtcatcgcttggcaaggcggaggtgtctgatggtgaggaatttgaaactgacagtgaagattctgatgtgagtggttccgagggagaggacacgtcctggatttcatggttctgtacattgcgaggcaatgaattcttttgtgagatcgatgatgactatatacaggatgattttaacctgtgtggtctgagtaatcaggtgccatattatgattatgcacttgatctcatcttagacattgagtcttctaatggtgagattgtttttcctcaaggaagttaatgcatattggtttgcctttccggaatttatggtctataataacttatttttcgtgcattcatttttttatggtgataaatctcttaatcaatcccatcaactagtgcatgtggcctttgtattttgaaaccagaggtctagattaaccgtactgttgcactcatgagacagtaccatttatgtacagatgacgggtttaccgaggagcaaaatgaattaatcgagtcatctgcagagatgctgtacggtttaattcatgcacgatacattttaaccagcaagggtctagctgcaatgttggagaagttcaagaactacgactttggtagatgccccagggtgtactgctgtggccagccctgccttccagcagggcaatcagatgttcctagatcgagcactgtgaagatatattgtccgaaatgcgaagaacttaactatccaagatccaagtaccaaggcaacatcgatggatcatactttgggacgacattccctcatcttttcctgatgacttactcgcacttgaagccgcagaagccgtcacagcaatacactccaagggttttcggcttcaaacttcacaagccgtcatgacagagttgtagcttccgccagaagcacccctgtcacctaggttttagggagagcatcgtggccttcaaatactgttgtattattgatgtacgaattcgcgagcctgggcctcgctgtaaactattgtgaaattgtatctgttttccgatattattactgttgtgtaaccttggttctctctcactcgcttgatcgaagtgtgtcgtcaacatgcatggtttcagggcatttcacacgaaatattttccgccctatgtgttcgtgtcaatcaatatatgtggccaacatggg

SEQ ID NO: 2329 - DNA, 1360 bp, Zea Mays
cagcgcctttcggtgcagaagcattttgctgatcctctctttgatgcatgttattaattttggttgcatcaatgctggtacatgtggacctggccaacacatagtcacatttttccctctctgagcagaacacatgggaccagcgccactgaggcacactggccaaacaagaggaatttgaaactgacagtgaagattctgatgtgagtggttccgagggagaggacacgtcctggatttcatggttctgtacattgcgaggcaatgaattcttttgtgagatcgatgatgactatatacaggatgattttaacctgtgtggtctgagtaatcaggtgccatattatgattatgcacttgatctcatcttagacattgagtcttctaatgatgacgggtttaccgaggagcaaaatgaattaatcgagtcatctgcagagatgctgtacggtttaattcatgcacgatacattttaaccagcaagggtctagctgcaatgttggagaagttcaagaactacgactttggtagatgccccagggtgtactgctgtggccagccctgccttccagcagggcaatcagatgttcctagatcgagcactgtgaagatatattgtccgaaatgcgaagaacttaactatccaagatccaagtaccaaggcagtatccttttgatataatctccatacttccatttacatgtactggccgttttatgctatatccttcttaagcgatttatattttgaccaccctttggaactattgatttttttttgcaacatcgttttatgtgttctctggtctccatgccaacaccctggtgaaccacattgaacattccgtcagtcctgcttttctgtcgttgaactcttcctcggtaaataatggatatttgcaagctgccattacatgcccttaactttacccagacatcgatggatcatactttgggacgacattccctcatcttttcctgatgacttactcgcacttgaagccgcagaagccgtcacagcaatacactccaagggttttcggcttcaaacttcacaagccgtcatgacagagttgtagcttccgccagaagcacccctgtcacctaggttttagggagagcatcgtggccttcaaatactgttgtattattgatgtacgaattcgcgagcctgggcctcgctgtaaactattgtgaaattgtatctgttttccgatattattactgttgtgtaaccttggttctctctcactcgcttgatcgaagtgtgtcgtcaacatgcatggtttcagggcatttcacacgaaatattttccgccctatgtgttcgtgtcaatcaatatatgtggccaacatggg

SEQ ID NO: 2330 - DNA, 1025 bp, Zea Mays
catcaatgctggtacatgtggacctggccaacacatagtcacatttttccctctctgagcagaacacatgggaccagcgccactgaggcacactggccaaacaagaggaatttgaaactgacagtgaagattctgatgtgagtggttccgagggagaggacacgtcctggatttcatggttctgtacattgcgaggcaatgaattcttttgtgagatcgatgatgactatatacaggatgattttaacctgtgtggtctgagtaatcaggtgccatattatgattatgcacttgatctcatcttagacattgagtcttctaatgatgacgggtttaccgaggagcaaaatgaattaatcgagtcatctgcagagatgctgtacggtttaattcatgcacgatacattttaaccagcaagggtctagctgcaatgttggagaagttcaagaactacgactttggtagatgccccagggtgtactgctgtggccagccctgccttccagcagggcaatcagatgttcctagatcgagcactgtgaagatatattgtccgaaatgcgaagaacttaactatccaagatccaagtaccaaggcaacatcgatggatcatactttgggacgacattccctcatcttttcctgatgacttactcgcacttgaagccgcagaagccgtcacagcaatacactccaagggttttcggcttcaaacttcacaagccgtcatgacagagttgtagcttccgccagaagcacccctgtcacctaggttttagggagagcatcgtggccttcaaatactgttgtattattgatgtacgaattcgcgagcctgggcctcgctgtaaactattgtgaaattgtatctgttttccgatattattactgttgtgtaaccttggttctctctcactcgcttgatcgaagtgtgtcgtcaacatgcatggtttcagggcatttcacacgaaatattttccgccctatgtgttcgtgtcaatcaatatatgtggccaacatggg

SEQ ID NO: 2331 - DNA, 2041 bp, Zea Mays
atcgatgcaggaaaaagggagcgaaaaagcgtaaggcggccgccttcgccatttctccgctcctccgcctcgcctcgcctcgcccatcgttccatgtctttctcctccggcggtcaccacccctcccggccggaccaaccccggatcccatttccagttagatgcttccccttcaccaccaccccgccgccgcgccggagtcggcggccccggcgacagaccctccgcccccgccggtcctcgatccgtcctccctccgcatccacatcccgtcaagcccgcaccacgcactgccctccaccccgcacaagcgccccgtcgtcatgacctcgtcgtcctcctcgtccacccccacccgcccctcaccgttgcccttcaccccgcctcggaggcgcaaggtccccgcgcccgctgctcccgcggggacagcggcggccaggcatctccttcgctgcctgcacctccgcctgcgtgtcctcctcctcatctcgcttccctccctctactttctctccccgacccctgccatttttccgcgctccctcctcgccgacttcctttccgcggcggccttctcctgcgcgctcctccttctcctctgcctctccctgccgcggcttcccttcgcgctgacgctgccgctccccctccgccgcgcgcgccgatcccccatcctttggtccatcggttcctcgccatccgcatctgcgaccacccccacaaccggccatttcgtccaggtttatagcaacggtgacgtctacgagggccagttccaccgcggccgctgcactggcagcggcgtctactactactacatgagcgggaggtacgagggagattgggtcgacggcaagtacagcggcttcggcgtcgagacatgggccagaggtagccggtaccggggccagtaccggcagggactcaggcatggctacggcgtgtacaggttctacactggggatgtgtatgccggggagtggtcaaacggccagagccatgggtatggtgtgcacacctgtgaggacggtagccggtatataggggagtttaagaggggcgtcaagcatggtctcggccactaccatttcaggaatggtgacacctacgctggagagtactttgctgataggatgcacggctttggaatctacagctttgccaatggccatagatatgagggagcatggcatgagggtagaaggcagggtttaggcatgtatagtttcaggaatggagagacacaagctgggcactggcaaaatggagttcttgatactttaagcacccagaacttcatccctggatcacctattgctgtgaaccattccaaggtcctcaatgcagtgcaggaagcgagaagagctgcagagaaggcctatgacatcccaagagttgatgataaggtgaacagggcggttgcagcagctaataaagcagccaatgcagccagggtggctgccgtgaaggctgcacaaaagcgcatccccagtaatggtgaagccactgctcgtccatcaggccatggcgtgttggcgacacctgagtcattgccagcagcattcaagcttgcgggagaagaccaagttttcagccatcccttccatacatctttgtgatgtcttttgcgatgcagcagaaccactgctctgaggactttccattgtccaaggcagccggtcgaggtcagcagtaggttttatcctgccttttctgcagtgtaatactcacccgatgttagtagagatatgatgaatgtacaccccaacatcagtcgataaaaaactgtgtttattttctctcttggactatgtacagaacctacaaatttagcggttgttggccgtgctggttggagaaacgacaggtgccttcgggttcggccattttcgtactttgtacttcatacgagaacaagataccatgatcatgagcgtctcctgttgttttgtggtcggcgtgttgctgcaaattgtttagtaatggtgtagtacaggagtgccgtatcagattccccatgccggtcaaaggcgatcgcgcg

SEQ ID NO: 2332 - DNA, 1904 bp, Zea Mays
atcgatgcaggaaaaagggagcgaaaaagcgtaaggcggccgccttcgccatttctccgctcctccgcctcgcctcgcctcgcccatcgttccatgtctttctcctccggcggtcaccacccctcccggccggaccaaccccggatcccatttccagttagatgcttccccttcaccaccaccccgccgccgcgccggagtcggcggccccggcgacagaccctccgcccccgccggtcctcgatccgtcctccctccgcatccacatcccgtcaagcccgcaccacgcactgccctccaccccgcacaagcgccccgtcgtcatgacctcgtcgtcctcctcgtccacccccacccgcccctcaccgttgcccttcaccccgcctcggaggcgcaaggtccccgcgcccgctgctcccgcggggacagcggcggccaggcatctccttcgctgcctgcacctccgcctgcgtgtcctcctcctcatctcgcttccctccctctactttctctccccgacccctgccatttttccgcgctccctcctcgccgacttcctttccgcggcggccttctcctgcgcgctcctccttctcctctgcctctccctgccgcggcttcccttcgcgctgacgctgccgctccccctccgccgcgcgcgccgatcccccatcctttggtccatcggttcctcgccatccgcatctgcgaccacccccacaaccggccatttcgtccaggtttatagcaacggtgacgtctacgagggccagttccaccgcggccgctgcactggcagcggcgtctactactactacatgagcgggaggtacgagggagattgggtcgacggcaagtacagcggcttcggcgtcgagacatgggccagaggtagccggtaccggggccagtaccggcagggactcaggcatggctacggcgtgtacaggttctacactggggatgtgtatgccggggagtggtcaaacggccagagccatgggtatggtgtgcacacctgtgaggacggtagccggtatataggggagtttaagaggggcgtcaagcatggtctcggccactaccatttcagctttgccaatggccatagatatgagggagcatggcatgagggtagaaggcagggtttaggcatgtatagtttcaggaatggagagacacaagctgggcactggcaaaatggagttcttgatactttaagcacccagaacttcatccctggatcacctattgctgtgaaccattccaaggtcctcaatgcagtgcaggaagcgagaagagctgcagagaaggcctatgacatcccaagagttgatgataaggtgaacagggcggttgcagcagctaataaagcagccaatgcagccagggtggctgccgtgaaggctgcacaaaagcgcatccccagtaatggtgacgatctaccactgtcagtagtgtgacaatgaagccaatatggcaatatatgttggcatggagctgcttcgcgatgccatcgcatcaccaattgcccgacataaccttcaacttcccagtaggttttatcctgccttttctgcagtgtaatactcacccgatgttagtagagatatgatgaatgtacaccccaacatcagtcgataaaaaactgtgtttattttctctcttggactatgtacagaacctacaaatttagcggttgttggccgtgctggttggagaaacgacaggtgccttcgggttcggccattttcgtactttgtacttcatacgagaacaagataccatgatcatgagcgtctcctgttgttttgtggtcggcgtgttgctgcaaattgtttagtaatggtgtagtacaggagtgccgtatcagattccccatgccggtcaaaggcgatcgcgcg

SEQ ID NO: 2333 - DNA, 1069 bp, Zea Mays
gtccaatattatgagatatttatcacctgtctgaccaaatggttctgcctcaggccgtttaaaaaaaaaggataagtacatgaatatgcttgcttggccattttggatcatatatgatgttcaggttgagaattgagataatcagaaggaagaagaacaaaccgacccctacaaaatcccaacaaagcataacatagggatggccatgtattggcttgtgcaaggttgtcaacctggagactcattggtgttccattattctgggcatggagcacagcaaagaaactacaatggagatgaggttgatgggtttgatgaaaccctctgcccattggattttgagacacaaggaatgattgtggatgatgacataaatacagcactagttcgaccacttcctcgtggagttaaacttcatgcattcattgatgcttgtcatagtggaactgcacttgatttgccttacctctgcagaatgaacaggagtgggcaatatgtatgggaagatcaccgaccaccatctggtgtctggaaaggcactagtggtggggaggctatttcatttagtggttgtgatgatgatcagacctctgcagatacctctgctttatcaaaggtcacttcgactggtgcaatgacatttggcttcatccaagctattgaacgtggacagggcaccacctacggtagtatcctgaactccatgcgttcgacaatacgcaacacagatgactcagcaggtgtaggtggcggtgctgttacatcactaattacaatgcttcttactggagggagcctatctgctggtggtctgagacaggagccacaactgacggcatgcgagccatttgatgtctatgcgaagcccttctccctatgacgcgttcatggtgctgctgctgcccacccatttcacgttatcaacttatcatcgtgtacatttcaccatcccgattgttaacagcgcgtggaattacaatccgtataaggaagctatgcatatatatcgtttgtttcacaggacgcctctgtatctggtgacgttaccgcggaagacgtgaaatcggag

SEQ ID NO: 2334 - DNA, 1267 bp, Zea Mays
ctcaggccgtttaaaaaaaaaggataagtacatgaatatgcttgcttggccattttggatcatatatgatgttcaggttgagaattgagataatcagaaggaagaagaacaaaccgacccctacaaaatcccaacaaagcataacatagggatggccatgtattggcttgtgcaaggttgtcaacctggagactcattggtgttccattattctgggcatggagcacagcaaagaaactacaatggagatgaggttgatgggtttgatgaaaccctctgcccattggattttgagacacaaggaatgattgtggatgatgacataaatacagcactagttcgaccacttcctcgtggagttaaacttcatgcattcattgatgcttgtcatagtggaactgcacttgatttgccttacctctgcagaatgaacaggagtgggcaatatgtatgggaagatcaccgaccaccatctggtgtctggaaaggcactagtggtggggaggctatttcatttagtggttgtgatgatgatcagacctctgcagatacctctgctttatcaaaggtcacttcgactggtgcaatgacatttggcttcatccaagctattgaacgtggacagggcaccacctacggtagtatcctgaactccatgcgttcgacaatacgcaacacagatgactcagcaggtgtaggtggcggtgctgttacatcactaattacaatgcttcttactggagggagcctatctgctggtggtctgagacaggagccacaactgacggcatgcgagccatttgatgtctatgcgaagcccttctccctatgacgcgttcatggtgctgctgctgcccacccatttcacgttatcaacttatcatcgtgtacatttcaccatcccgattgttaacagcgcgtggaattacaatccgtataaggaagctatgcatatatatcgtttgtttcacaggtacaatccgtatatgcatgaataattttttgtgcacgctggcccgacaaggctaatctcagtcctataattggctagaatgtagagatggtaatgggacctgatacccgattcttcgtttggaatttttcttttaggggatgaggaagtttcttcctctacaggggatgtaaatgggaaaaatcctctcccgatgggtaaatgaggatggggaagcattttcattcccgttctccgcgcgaggacctgttaaacttatatttgacaatgttttcatttaataattaattatag

SEQ ID NO: 2335 - DNA, 753 bp, Zea Mays
ctgttatgttgtatgttcatcaaataaatgttgctgaaatgcgctttatcaaaggtcacttcgactggtgcaatgacatttggcttcatccaagctattgaacgtggacagggcaccacctacggtagtatcctgaactccatgcgttcgacaatacgcaacacagatgactcagcaggtgtaggtggcggtgctgttacatcactaattacaatgcttcttactggagggagcctatctgctggtggtctgagacaggagccacaactgacggcatgcgagccatttgatgtctatgcgaagcccttctccctatgacgcgttcatggtgctgctgctgcccacccatttcacgttatcaacttatcatcgtgtacatttcaccatcccgattgttaacagcgcgtggaattacaatccgtataaggaagctatgcatatatatcgtttgtttcacaggtacaatccgtatatgcatgaataattttttgtgcacgctggcccgacaaggctaatctcagtcctataattggctagaatgtagagatggtaatgggacctgatacccgattcttcgtttggaatttttcttttaggggatgaggaagtttcttcctctacaggggatgtaaatgggaaaaatcctctcccgatgggtaaatgaggatggggaagcattttcattcccgttctccgcgcgaggacctgttaaacttatatttgacaatgttttcatttaataattaattatag

SEQ ID NO: 2336 - DNA, 799 bp, Zea Mays
ggaggccacagcaccaaccgggggttacttcttcgaggccctttgccgtgccatatagtacaacaacgtcaaaggccctgtgttctagtatagcataaaagcagcaagcacctgactggggggaggaaagggaaacgagagcagttcagcgaaagcacatgcgcgccggcaccgctcgatcggacggaggcaccacaacgacacaacactcaccctggacggcgtgcgcacgccggcccgcccaccaggttcgcaccgcatatcacacagtagctcgctccaagcacgaggagccgggcgaagacaggtcgcgctccaaggagttgcttctttatttcttttagggagacccaacgaattgctactagatgctcagacgttgacgttggcatcgttccatcggcggcttcaatcaggtactttcggacttgaactcttcggacttgagtcaaaatcacagtatgaagaagcacaagggaaacgaatgatggaacagagccgaagctgtgcgcaagggagcttcggcatgatgataggaaaaagaaaaccgacttaaaagggaaaagactatctagacctcgatgaattactatagaattattagcaaatgcaaagagcctggatgtaattttacatgggctgcgacccgtgcctataaatagatgaacagtgctcccgcactggacacgggcttgacattttgcttttgcgtcacacttgtactctttatcttccttcaagccgaaggtacacttgtaataaattatcatttctattcattcataataataagataaaa

SEQ ID NO: 2337 - DNA, 712 bp, Zea Mays
ccaggctccagctgtccaggaaattaaaccatacaatatttttcctgtggttagcactgtcagggtggttgttcagaattttcatttttggcacgtttgtgctgccatttgctgcccctcttctccttgggacctttgctaacagggttgccattgagggaacatgcccagcatgcaaaaggcgtttcgtgggctaccgcaaccaagtgattcggtgcatgagctgccaaaacattgtatggcagccaaataacagcccatctggtggtgctagaagttcacgaagctcggaacctgatgtgattgatgtagaatatgaagagaagtaagaacattctgccccaccctacaccgaaaagcaaaaatcacgtgggcggaagaagaggcaaggcttgagacacaggctgcaccccatgagcaatttgtagatttggttgtttgtgtttttctggtgtacatacattacgtgctcctttcgaaataaaatggaaattctggtgttgtgcacagcgagacgatgtgtggcacctttcgatgttaggttctggtgtatccatagcttattgtactgttgcatctggatactaggaaacatcttgtaaagcaagcagcttagggaagactttgtacaaccactcacttcatacgacgccaattgcaaaatgttaatgacaattaaaataaccagtaaatctatatgccagatcatata

SEQ ID NO: 2338 - DNA, 2793 bp, Zea Mays
cgccccgctctggcgctctccattccgtgacgctgctgctgcagcagcgcgcgattaaaaaataataaggtcaaagccgctgcgccggcaggcggcagcgaccaaccccaccaatttccgaacccaactcaaccccgaggcccgcgccctctccgcccggcgcagcggctgcgagcttgaagccgtcaccgcccccgccgccgaggcgaactcgaagctgcctccgccacggcgagctcgagccattcctgcgttgctgaaccgcccccgccgtcttccttgaagagagagagagagagacacacacacagagggagggagggagggagatttgcttcctcctcctgcgccgctccattttgaaatcgatcccgttcgtttcggttgccttcggcctcggcggttcatgaggggttcaagaatgaatccaggtgaccgtagaacgcggagcacgatgacgatagtaattgtgatgggtttatcatgcttcttttacatactaggtgcttggcagaaaagtgggacaggaaggggtgatagcatagctctgagagttaaccaagaaactgactgtacaatcttgccaaatttgcactttgagacccatcataccataagtggcgctaatccattgatcatgtccaataaaatgattgagccatgccacatccgatacagtgactatactccttgtcaagaccagaaccgagcaatggcctttcctagacaaaacatgacatacagagaaaggcattgtcctgtagagaatgagaaactgcattgtctcatcccagcaccaaaaggatatgtcacccctttctcttggcccaagagccgtgactatgttccatatgcaaatgctccgtataagagtctgacagttgagaaagctgttcagaactggatccaatatcagggagatgtgttcaaatttccaggaggaggaacaatgtttcccaatggagcgaatgcttaccttgatgaacttgcatccatcatcccactcgctgatggcactatcagaactgcacttgatactggatgtggggttgcaagcttcggagcttatctaatggacagaaatgtattaaccatgtcatttgcacccagagattcacatgaagctcaggttcaatttgcgttggagcgaggtgtccctgcagtaattggagtacttggaactataaaggtcccatacccctctagatcttttgatatggctcattgctcacgctgtttaatcccatgggagtcaaatggcggtatgtacatgatggaagtagaccgggttttgaggcctgggggttattggatactttctggacctcccatcaattggaagaaatactaccagtcatggaaaaggtctaaacaagatgcagaggaagatcaacatagaattgaaaatattgcagaaatgctttgctgggataaaatctttgagaaggatgatattgctatttggcagaaacaagggaattcatattcatgtcatcaaaaggatggtcatgctagcaagatgtgcaaagttcaagattcagatgatgtctggtataagaaattggaatcttgtataacacctcctatagaggcagcacagctaaagaagtttccagagagactatctgccattcctcccagaattctggagggtcaggtcccagacataacagaagaagtctatgaggaggataataagttgtggaagaagcatgttaatacttataagagggtgaacaagctgataggttcttcaaggtacaggaatattatggacatgaatgcaggccttggaagttttgctgcaactcttcattcttccagttcctgggtaatgaacgttgtgccctctatatcagaaaggaacactcttggtatcatatatgagcgaggtctgattggtatataccatgattggtgcgaagccttctcaacataccctaggacatacgacctgatacatggcaatgacatcttcagtttatatcagaacaagtgtgatgcagaagacattcttctggagatggataggattttacggccagagggtgcagtcatactgcgggacaatgccgatgtactgaacaaggttagaagtatggtggcaggaatgcggtggaagtccaagttactagatcatgaggatggcccgcacgttcccgagaagattctgatttcagtgaaagaatattgggttggcagcgaggaacagaacagctgataggtacagaaccatgttgatgctggatgccagcctctttccctgatgcgatcccctgatgctgttttgtcggttaatagattttgttcatactgcatacgtacagtactaaagacccttagatgatcgggacatacctggatttttgctgtgcatatatagtaatcagagcgttaagtgaactgttggcgatttgccaaggcatattgtagtgtaggcaaaagttcgtttgaaaaacatgtaggtacgagacaacttagtcgctactttgcccagagattaattatacagatgcacgcaagaagttttttgtgatttcgtatatgaacattatctgttgataatgcatgagattatttctttgagtgtttgtctgattgacctgacaagaggtcacaaggattgaattctgcttcagctgccctgctccgctcgctgttcaatggataagatagggagacagggctggacaaaatatcgtgtatcgtgggtttgttcggctcgttttaatgttgtcacgagccgaggtatttgttaacgagctagctcgttagcttgaacgagtaaccatt

SEQ ID NO: 2339 - DNA, 2782 bp, Zea Mays
ctccattccgtgacgctgctgctgcagcagcgcgcgattaaaaaataataaggtcaaagccgctgcgccggcaggcggcagcgaccaaccccaccaatttccgaacccaactcaaccccgaggcccgcgccctctccgcccggcgcagcggctgcgagcttgaagccgtcaccgcccccgccgccgaggcgaactcgaagctgcctccgccacggcgagctcgagccattcctgcgttgctgaaccgcccccgccgtcttccttgaagagagagagagagagacacacacacagagggagggagggagggagatttgcttcctcctcctgcgccgctccattttgaaatcgatcccgttcgtttcggttgccttcggcctcggcggttcatgaggggttcaagaatgaatccaggtgaccgtagaacgcggagcacgatgacgatagtaattgtgatgggtttatcatgcttcttttacatactaggtgcttggcagaaaagtgggacaggaaggggtgatagcatagctctgagagttaaccaagaaactgactgtacaatcttgccaaatttgcactttgagacccatcataccataagtggcgctaatccattgatcatgtccaataaaatgattgagccatgccacatccgatacagtgactatactccttgtcaagaccagaaccgagcaatggcctttcctagacaaaacatgacatacagagaaaggcattgtcctgtagagaatgagaaactgcattgtctcatcccagcaccaaaaggatatgtcacccctttctcttggcccaagagccgtgactatgttccatatgcaaatgctccgtataagagtctgacagttgagaaagctgttcagaactggatccaatatcagggagatgtgttcaaatttccaggaggaggaacaatgtttcccaatggagcgaatgcttaccttgatgaacttgcatccatcatcccactcgctgatggcactatcagaactgcacttgatactggatgtggggttgcaagcttcggagcttatctaatggacagaaatgtattaaccatgtcatttgcacccagagattcacatgaagctcaggttcaatttgcgttggagcgaggtgtccctgcagtaattggagtacttggaactataaaggtcccatacccctctagatcttttgatatggctcattgctcacgctgtttaatcccatgggagtcaaatggcggtatgtacatgatggaagtagaccgggttttgaggcctgggggttattggatactttctggacctcccatcaattggaagaaatactaccagtcatggaaaaggtctaaacaagatgcagaggaagatcaacatagaattgaaaatattgcagaaatgctttgctgggataaaatctttgagaaggatgatattgctatttggcagaaacaagggaattcatattcatgtcatcaaaaggatggtcatgctagcaagatgtgcaaagttcaagattcagatgatgtctggatagggtataagaaattggaatcttgtataacacctcctatagaggcagcacagctaaagaagtttccagagagactatctgccattcctcccagaattctggagggtcaggtcccagacataacagaagaagtctatgaggaggataataagttgtggaagaagcatgttaatacttataagagggtgaacaagctgataggttcttcaaggtacaggaatattatggacatgaatgcaggccttggaagttttgctgcaactcttcattcttccagttcctgggtaatgaacgttgtgccctctatatcagaaaggaacactcttggtatcatatatgagcgaggtctgattggtatataccatgattggtgcgaagccttctcaacataccctaggacatacgacctgatacatggcaatgacatcttcagtttatatcagaacaagtgtgatgcagaagacattcttctggagatggataggattttacggccagagggtgcagtcatactgcgggacaatgccgatgtactgaacaaggttagaagtatggtggcaggaatgcggtggaagtccaagttactagatcatgaggatggcccgcacgttcccgagaagattctgatttcagtgaaagaatattgggttggcagcgaggaacagaacagctgataggtacagaaccatgttgatgctggatgccagcctctttccctgatgcgatcccctgatgctgttttgtcggttaatagattttgttcatactgcatacgtacagtactaaagacccttagatgatcgggacatacctggatttttgctgtgcatatatagtaatcagagcgttaagtgaactgttggcgatttgccaaggcatattgtagtgtaggcaaaagttcgtttgaaaaacatgtaggtacgagacaacttagtcgctactttgcccagagattaattatacagatgcacgcaagaagttttttgtgatttcgtatatgaacattatctgttgataatgcatgagattatttctttgagtgtttgtctgattgacctgacaagaggtcacaaggattgaattctgcttcagctgccctgctccgctcgctgttcaatggataagatagggagacagggctggacaaaatatcgtgtatcgtgggtttgttcggctcgttttaatgttgtcacgagccgaggtatttgttaacgagctagctcgttagcttgaacgagtaaccatt

SEQ ID NO: 2340 - DNA, 2375 bp, Zea Mays
tgaagccgtcaccgcccccgccgccgaggcgaactcgaagctgcctccgccacggcgagctcgagccattcctgcgttgctgaaccgcccccgccgtcttccttgaagagagagagagagagacacacacacagagggagggagggagggagatttgcttcctcctcctgcgccgctccattttgaaatcgatcccgttcgtttcggttgccttcggcctcggcggttcatgaggggttcaagaatgaatccagtgactatactccttgtcaagaccagaaccgagcaatggcctttcctagacaaaacatgacatacagagaaaggcattgtcctgtagagaatgagaaactgcattgtctcatcccagcaccaaaaggatatgtcacccctttctcttggcccaagagccgtgactatgttccatatgcaaatgctccgtataagagtctgacagttgagaaagctgttcagaactggatccaatatcagggagatgtgttcaaatttccaggaggaggaacaatgtttcccaatggagcgaatgcttaccttgatgaacttgcatccatcatcccactcgctgatggcactatcagaactgcacttgatactggatgtggggttgcaagcttcggagcttatctaatggacagaaatgtattaaccatgtcatttgcacccagagattcacatgaagctcaggttcaatttgcgttggagcgaggtgtccctgcagtaattggagtacttggaactataaaggtcccatacccctctagatcttttgatatggctcattgctcacgctgtttaatcccatgggagtcaaatggcggtatgtacatgatggaagtagaccgggttttgaggcctgggggttattggatactttctggacctcccatcaattggaagaaatactaccagtcatggaaaaggtctaaacaagatgcagaggaagatcaacatagaattgaaaatattgcagaaatgctttgctgggataaaatctttgagaaggatgatattgctatttggcagaaacaagggaattcatattcatgtcatcaaaaggatggtcatgctagcaagatgtgcaaagttcaagattcagatgatgtctggatagggtataagaaattggaatcttgtataacacctcctatagaggcagcacagctaaagaagtttccagagagactatctgccattcctcccagaattctggagggtcaggtcccagacataacagaagaagtctatgaggaggataataagttgtggaagaagcatgttaatacttataagagggtgaacaagctgataggttcttcaaggtacaggaatattatggacatgaatgcaggccttggaagttttgctgcaactcttcattcttccagttcctgggtaatgaacgttgtgccctctatatcagaaaggaacactcttggtatcatatatgagcgaggtctgattggtatataccatgattggtgcgaagccttctcaacataccctaggacatacgacctgatacatggcaatgacatcttcagtttatatcagaacaagtgtgatgcagaagacattcttctggagatggataggattttacggccagagggtgcagtcatactgcgggacaatgccgatgtactgaacaaggttagaagtatggtggcaggaatgcggtggaagtccaagttactagatcatgaggatggcccgcacgttcccgagaagattctgatttcagtgaaagaatattgggttggcagcgaggaacagaacagctgataggtacagaaccatgttgatgctggatgccagcctctttccctgatgcgatcccctgatgctgttttgtcggttaatagattttgttcatactgcatacgtacagtactaaagacccttagatgatcgggacatacctggatttttgctgtgcatatatagtaatcagagcgttaagtgaactgttggcgatttgccaaggcatattgtagtgtaggcaaaagttcgtttgaaaaacatgtaggtacgagacaacttagtcgctactttgcccagagattaattatacagatgcacgcaagaagttttttgtgatttcgtatatgaacattatctgttgataatgcatgagattatttctttgagtgtttgtctgattgacctgacaagaggtcacaaggattgaattctgcttcagctgccctgctccgctcgctgttcaatggataagatagggagacagggctggacaaaatatcgtgtatcgtgggtttgttcggctcgttttaatgttgtcacgagccgaggtatttgttaacgagctagctcgttagcttgaacgagtaaccatt

SEQ ID NO: 2341 - DNA, 2396 bp, Zea Mays
cctaggttcatgaggggttcaagaatgaatccaggtgaccgtagaacgcggagcacgatgacgatagtaattgtgatgggtttatcatgcttcttttacatactaggtgcttggcagaaaagtgggacaggaaggggtgatagcatagctctgagagttaaccaagaaactgactgtacaatcttgccaaatttgcactttgagacccatcataccataagtggcgctaatccattgatcatgtccaataaaatgattgagccatgccacatccgatacagtgactatactccttgtcaagaccagaaccgagcaatggcctttcctagacaaaacatgacatacagagaaaggcattgtcctgtagagaatgagaaactgcattgtctcatcccagcaccaaaaggatatgtcacccctttctcttggcccaagagccgtgactatgttccatatgcaaatgctccgtataagagtctgacagttgagaaagctgttcagaactggatccaatatcagggagatgtgttcaaatttccaggaggaggaacaatgtttcccaatggagcgaatgcttaccttgatgaacttgcatccatcatcccactcgctgatggcactatcagaactgcacttgatactggatgtggggttgcaagcttcggagcttatctaatggacagaaatgtattaaccatgtcatttgcacccagagattcacatgaagctcaggttcaatttgcgttggagcgaggtgtccctgcagtaattggagtacttggaactataaaggtcccatacccctctagatcttttgatatggctcattgctcacgctgtttaatcccatgggagtcaaatggcggtatgtacatgatggaagtagaccgggttttgaggcctgggggttattggatactttctggacctcccatcaattggaagaaatactaccagtcatggaaaaggtctaaacaagatgcagaggaagatcaacatagaattgaaaatattgcagaaatgctttgctgggataaaatctttgagaaggatgatattgctatttggcagaaacaagggaattcatattcatgtcatcaaaaggatggtcatgctagcaagatgtgcaaagttcaagattcagatgatgtctggtataagaaattggaatcttgtataacacctcctatagaggcagcacagctaaagaagtttccagagagactatctgccattcctcccagaattctggagggtcaggtcccagacataacagaagaagtctatgaggaggataataagttgtggaagaagcatgttaatacttataagagggtgaacaagctgataggttcttcaaggtacaggaatattatggacatgaatgcaggccttggaagttttgctgcaactcttcattcttccagttcctgggtaatgaacgttgtgccctctatatcagaaaggaacactcttggtatcatatatgagcgaggtctgattggtatataccatgattggtgcgaagccttctcaacataccctaggacatacgacctgatacatggcaatgacatcttcagtttatatcagaacaagtgtgatgcagaagacattcttctggagatggataggattttacggccagagggtgcagtcatactgcgggacaatgccgatgtactgaacaaggttagaagtatggtggcaggaatgcggtggaagtccaagttactagatcatgaggatggcccgcacgttcccgagaagattctgatttcagtgaaagaatattgggttggcagcgaggaacagaacagctgataggtacagaaccatgttgatgctggatgccagcctctttccctgatgcgatcccctgatgctgttttgtcggttaatagattttgttcatactgcatacgtacagtactaaagacccttagatgatcgggacatacctggatttttgctgtgcatatatagtaatcagagcgttaagtgaactgttggcgatttgccaaggcatattgtagtgtaggcaaaagttcgtttgaaaaacatgtaggtacgagacaacttagtcgctactttgcccagagattaattatacagatgcacgcaagaagttttttgtgatttcgtatatgaacattatctgttgataatgcatgagattatttctttgagtgtttgtctgattgacctgacaagaggtcacaaggattgaattctgcttcagctgccctgctccgctcgctgttcaatggataagatagggagacagggctggacaaaatatcgtgtatcgtgggtttgttcggctcgttttaatgttgtcacgagccgaggtatttgttaacgagctagctcgttagcttgaacgagtaaccatt

SEQ ID NO: 2342 - DNA, 2558 bp, Zea Mays
aaatcaggcagggatctgaaatggttaggcatagtcacatgattgaggttgatgcacatatctgagtgttaataaacttgttctcaggactggcacgctggctgggtagtttatcatttatcttcacagaaggaagtttctctattggaactttagcatacacgggggttcatgaggggttcaagaatgaatccaggtgaccgtagaacgcggagcacgatgacgatagtaattgtgatgggtttatcatgcttcttttacatactaggtgcttggcagaaaagtgggacaggaaggggtgatagcatagctctgagagttaaccaagaaactgactgtacaatcttgccaaatttgcactttgagacccatcataccataagtggcgctaatccattgatcatgtccaataaaatgattgagccatgccacatccgatacagtgactatactccttgtcaagaccagaaccgagcaatggcctttcctagacaaaacatgacatacagagaaaggcattgtcctgtagagaatgagaaactgcattgtctcatcccagcaccaaaaggatatgtcacccctttctcttggcccaagagccgtgactatgttccatatgcaaatgctccgtataagagtctgacagttgagaaagctgttcagaactggatccaatatcagggagatgtgttcaaatttccaggaggaggaacaatgtttcccaatggagcgaatgcttaccttgatgaacttgcatccatcatcccactcgctgatggcactatcagaactgcacttgatactggatgtggggttgcaagcttcggagcttatctaatggacagaaatgtattaaccatgtcatttgcacccagagattcacatgaagctcaggttcaatttgcgttggagcgaggtgtccctgcagtaattggagtacttggaactataaaggtcccatacccctctagatcttttgatatggctcattgctcacgctgtttaatcccatgggagtcaaatggcggtatgtacatgatggaagtagaccgggttttgaggcctgggggttattggatactttctggacctcccatcaattggaagaaatactaccagtcatggaaaaggtctaaacaagatgcagaggaagatcaacatagaattgaaaatattgcagaaatgctttgctgggataaaatctttgagaaggatgatattgctatttggcagaaacaagggaattcatattcatgtcatcaaaaggatggtcatgctagcaagatgtgcaaagttcaagattcagatgatgtctggtataagaaattggaatcttgtataacacctcctatagaggcagcacagctaaagaagtttccagagagactatctgccattcctcccagaattctggagggtcaggtcccagacataacagaagaagtctatgaggaggataataagttgtggaagaagcatgttaatacttataagagggtgaacaagctgataggttcttcaaggtacaggaatattatggacatgaatgcaggccttggaagttttgctgcaactcttcattcttccagttcctgggtaatgaacgttgtgccctctatatcagaaaggaacactcttggtatcatatatgagcgaggtctgattggtatataccatgattggtgcgaagccttctcaacataccctaggacatacgacctgatacatggcaatgacatcttcagtttatatcagaacaagtgtgatgcagaagacattcttctggagatggataggattttacggccagagggtgcagtcatactgcgggacaatgccgatgtactgaacaaggttagaagtatggtggcaggaatgcggtggaagtccaagttactagatcatgaggatggcccgcacgttcccgagaagattctgatttcagtgaaagaatattgggttggcagcgaggaacagaacagctgataggtacagaaccatgttgatgctggatgccagcctctttccctgatgcgatcccctgatgctgttttgtcggttaatagattttgttcatactgcatacgtacagtactaaagacccttagatgatcgggacatacctggatttttgctgtgcatatatagtaatcagagcgttaagtgaactgttggcgatttgccaaggcatattgtagtgtaggcaaaagttcgtttgaaaaacatgtaggtacgagacaacttagtcgctactttgcccagagattaattatacagatgcacgcaagaagttttttgtgatttcgtatatgaacattatctgttgataatgcatgagattatttctttgagtgtttgtctgattgacctgacaagaggtcacaaggattgaattctgcttcagctgccctgctccgctcgctgttcaatggataagatagggagacagggctggacaaaatatcgtgtatcgtgggtttgttcggctcgttttaatgttgtcacgagccgaggtatttgttaacgagctagctcgttagcttgaacgagtaaccatt

SEQ ID NO: 2343 - DNA, 1405 bp, Zea Mays
ccgtcagcatggccgccgatgcgataaaaaaataactccagctcaaattcctaatgcagccagcccaaccgatctgctccgtccactgcctcaggcaacggcactcctcgcgccacctggtgggtccctcgtccactccaactccaccgcctcctttgccccaatccagccgagtgatttttagtttattcacgcgcaaaaaactaaaaaagaattataaacggaagaagaacggcaggcgaagcatcgccaggtttatttatttgttcattggtgttggtgctactgttttcctcgtgtctctgtttggctgcattggagcagggacaagaaacacctgctgtttgtgtttctatgccttcttggtcatattgttgatccttgctgaagctggagctgctgcattcattttctttgaccatagctggaaagatgtaattccagtggacaagacacataactttgatgttatgtatggctttctgaagaaaaactgggagattgcaagatgggttgctcttggcgttgttgtttttgaggcagtgctctttctattagctctggttgtcagggcaatgaacaaacctgcggagtatgacagtgatgatgaaattattgcaattggccgaagccctaccatgcggcagccattgatccatgcccaaaatgtgccggccaccggtgttcctgtcccaacactcgatcagcgttcaagtagaaatgatgcctggagccaaaggatgcgagagaagtatggtctggacacgagccagttcacgtacaacccctcagacccaagcaggtaccagcagaatggcgctccacaggctgaagaaaggagtcgatgcactataatgtgaagaattcttcatgacgtcctacgtcataatggttttcttgaacgggctacctcagcttgtgtagtttggtgttgttcagacttcatagctgtgtgtgtggaatgcaaaaatcccgaccatattgtttgtcacgcttgatgtcttctctgcaaatgttctatgcacttgtaattttaccgtgaatgacgaactgttagccattgacatcatctattttgtattttaggggggttgtttcttcttgccagtcctaccattttcatgtagctctgtttaatcatgatgctttactcaaatatatgtaagatttggttgtgccgtgaagtgaggtgagactgataggatccgttttgctttgtgtatattggaataaagttaggttatggatttgttaggagggtaaatgtttctattgggttttcagccaatgtgaaaagactagtctcgacgaaggatctgtcgactacacgctcaaggctcatttgcgatctgtaacataatcttcaagatgctagaaccccatgctggaagatgccaatttcgtg

SEQ ID NO: 2344 - DNA, 1557 bp, Zea Mays
ccgtcagcatggccgccgatgcgataaaaaaataactccagctcaaattcctaatgcagccagcccaaccgatctgctccgtccactgcctcaggcaacggcactcctcgcgccacctgattggtatatcgatcgattgatcggtggcggagggaggggaggagggcggcagatggcggcgtgccggggcttcttcgagtgcctgctcaggctgctcaacttcatcctcaccgtcgccggcctcgccatggtcggctacgggatctacctgctcgtcgagtggatgaagatatctgaggacggcagcagcggggggttgacggcggaggtgctggtctccggccggccgttgttgggggctgtcgctctcggtgacagcttcctcgacatgctacccaaagcatggtttatttatttgttcattggtgttggtgctactgttttcctcgtgtctctgtttggctgcattggagcagggacaagaaacacctgctgtttgtgtttctatgccttcttggtcatattgttgatccttgctgaagctggagctgctgcattcattttctttgaccatagctggaaagatgtaattccagtggacaagacacataactttgatgttatgtatggctttctgaagaaaaactgggagattgcaagatgggttgctcttggcgttgttgtttttgaggcagtgctctttctattagctctggttgtcagggcaatgaacaaacctgcggagtatgacagtgatgatgaaattattgcaattggccgaagccctaccatgcggcagccattgatccatgcccaaaatgtgccggccaccggtgttcctgtcccaacactcgatcagcgttcaagtagaaatgatgcctggagccaaaggatgcgagagaagtatggtctggacacgagccagttcacgtacaacccctcagacccaagcaggtaccagcagaatggcgctccacaggctgaagaaaggagtcgatgcactataatgtgaagaattcttcatgacgtcctacgtcataatggttttcttgaacgggctacctcagcttgtgtagtttggtgttgttcagacttcatagctgtgtgtgtggaatgcaaaaatcccgaccatattgtttgtcacgcttgatgtcttctctgcaaatgttctatgcacttgtaattttaccgtgaatgacgaactgttagccattgacatcatctattttgtattttaggggggttgtttcttcttgccagtcctaccattttcatgtagctctgtttaatcatgatgctttactcaaatatatgtaagatttggttgtgccgtgaagtgaggtgagactgataggatccgttttgctttgtgtatattggaataaagttaggttatggatttgttaggagggtaaatgtttctattgggttttcagccaatgtgaaaagactagtctcgacgaaggatctgtcgactacacgctcaaggctcatttgcgatctgtaacataatcttcaagatgctagaaccccatgctggaagatgccaatttcgtg

SEQ ID NO: 2345 - DNA, 1271 bp, Zea Mays
ccgtcagcatggccgccgatgcgataaaaaaataactccagctcaaattcctaatgcagccagcccaaccgatctgctccgtccactgcctcaggcaacggcactcctcgcgccacctggtttatttatttgttcattggtgttggtgctactgttttcctcgtgtctctgtttggctgcattggagcagggacaagaaacacctgctgtttgtgtttctatgccttcttggtcatattgttgatccttgctgaagctggagctgctgcattcattttctttgaccatagctggaaagatgtaattccagtggacaagacacataactttgatgttatgtatggctttctgaagaaaaactgggagattgcaagatgggttgctcttggcgttgttgtttttgaggcagtgctctttctattagctctggttgtcagggcaatgaacaaacctgcggagtatgacagtgatgatgaaattattgcaattggccgaagccctaccatgcggcagccattgatccatgcccaaaatgtgccggccaccggtgttcctgtcccaacactcgatcagcgttcaagtagaaatgatgcctggagccaaaggatgcgagagaagtatggtctggacacgagccagttcacgtacaacccctcagacccaagcaggtaccagcagaatggcgctccacaggctgaagaaaggagtcgatgcactataatgtgaagaattcttcatgacgtcctacgtcataatggttttcttgaacgggctacctcagcttgtgtagtttggtgttgttcagacttcatagctgtgtgtgtggaatgcaaaaatcccgaccatattgtttgtcacgcttgatgtcttctctgcaaatgttctatgcacttgtaattttaccgtgaatgacgaactgttagccattgacatcatctattttgtattttaggggggttgtttcttcttgccagtcctaccattttcatgtagctctgtttaatcatgatgctttactcaaatatatgtaagatttggttgtgccgtgaagtgaggtgagactgataggatccgttttgctttgtgtatattggaataaagttaggttatggatttgttaggagggtaaatgtttctattgggttttcagccaatgtgaaaagactagtctcgacgaaggatctgtcgactacacgctcaaggctcatttgcgatctgtaacataatcttcaagatgctagaaccccatgctggaagatgccaatttcgtg

SEQ ID NO: 2346 - DNA, 1306 bp, Zea Mays
aaagaatattccatttgtcatacacaatacactaaaaagtactccctccgttcttttttatttgtcgcggtttagttcaaaaataaactaacggacgacaaatattttaaaacggaggtagtacttggaattatgctgcacattaaatccagacgggctattagtatctgaacctgctaaaccaacaaattttgtttctgtactactctgaaacgccaatcttatagaacagcagtagcagaggcaataatattttaactatttctgcagccccatgatattttgtcaaagctggagctgctgcattcattttctttgaccatagctggaaagatgtaattccagtggacaagacacataactttgatgttatgtatggctttctgaagaaaaactgggagattgcaagatgggttgctcttggcgttgttgtttttgaggcagtgctctttctattagctctggttgtcagggcaatgaacaaacctgcggagtatgacagtgatgatgaaattattgcaattggccgaagccctaccatgcggcagccattgatccatgcccaaaatgtgccggccaccggtgttcctgtcccaacactcgatcagcgttcaagtagaaatgatgcctggagccaaaggatgcgagagaagtatggtctggacacgagccagttcacgtacaacccctcagacccaagcaggtaccagcagaatggcgctccacaggctgaagaaaggagtcgatgcactataatgtgaagaattcttcatgacgtcctacgtcataatggttttcttgaacgggctacctcagcttgtgtagtttggtgttgttcagacttcatagctgtgtgtgtggaatgcaaaaatcccgaccatattgtttgtcacgcttgatgtcttctctgcaaatgttctatgcacttgtaattttaccgtgaatgacgaactgttagccattgacatcatctattttgtattttaggggggttgtttcttcttgccagtcctaccattttcatgtagctctgtttaatcatgatgctttactcaaatatatgtaagatttggttgtgccgtgaagtgaggtgagactgataggatccgttttgctttgtgtatattggaataaagttaggttatggatttgttaggagggtaaatgtttctattgggttttcagccaatgtgaaaagactagtctcgacgaaggatctgtcgactacacgctcaaggctcatttgcgatctgtaacataatcttcaagatgctagaaccccatgctggaagatgccaatttcgtg

SEQ ID NO: 2347 - DNA, 3599 bp, Zea Mays
cggtgtctaacatctgcttgtggactttgactcgtacttcagcgacccgagcccccgacaatccctcgccgaattccagaatccagagcaagggtatcacctcgacctcagttactgatcggagccgctcctggcgcttggtttctattggatgcggatcaatgcatttcaacactgagaagaagccaacagttcaatggcagagggtgttgttggcatccttattctgaagcttggttcagccttgtttttagaggcttgcaggcttggcacaaaacagctctaccatgaagcttcagcccttggcaggctctttggtgagatccgtgatatcaaggaggaattggagagcatgcaatcttttctacaaggagctgagagattcaaagatactgacaacaacactgccaactttatcaagaagattcgtggccttgctttcgacattgaagatgttatcgatgagtttatctacaagatggaggacaagcatggcagttttgctacaaagatgaatcgtcggattaatcgtatttggacatggcgacgtctcacgtccaaattgcaaaagatcaaactgaaactagagaatgttgataagagaaatgttcgatatgacatgagaggaattgctagagaagatggaagcagtgatgctcatcatagatctaccgaccagatttcttacttccccaaagaggaaaatcttgtgggcattgatgaaaacaaggagttattgatgaattggctaaggggtgatctacatcagcaaagtgtaattacaacagtatgggggatggggggagttggcaagaccactttggttgcacatgtttacaacactgtgaaggtagactttgacagtgctgcatggataactgtttcaaaagcttaccaagtggaggacttgctgaagcagatcatcaggggatttcagaaaagtgatttgaagggtgaacttcgtgttgacataattgacatggaaaagagaagcctagttgagatcatccgtgattattttgcatggcaaaagctatgttttagtgctagatgacgtctggggtgttgacatctggttcaagataagagatgcttttcctaccaatagcactagcaggtttattattacatcgaggatacatgaagtagcattgctggctaatggaaattgcataattgagttgaagccactagaggcacaccattcatgggagttattttgtaaagaggccttctggaaaaatgaaaacaaaatgtgcctgctggaacttaataatttggcacaaagatttgttgacaagtgtaacgggctgcccattgccattgcatgtgtaggccgtcttttgtcttgcagaagcccaacctactctgattgggaaagctttttcaaggaactagagttgcagatgacaaataatgtgattcttaatgttaatgttcttctaaaggttagtttagaggatcttccatatattttaaagaactgctttttgcactgtacaatatttcccgaggatcatttgatcaaaaggaaaaggttaattaggcactgggtagcagagggattcatcagagaaacagagcacaaaacaatggaggaagtggcagagggctatttgtatgaacttgtcaatcgtagcctattacaagtagtggagagaaatgaaagtggacgagtgcagagttgccgaatgcatgatattattcgacttcttgctctgacaaaagcaaatgaggaaggcttctgtaaagtttatgatggcatggggagttattcagcagaaaagacacgtcgtttatcgattcacagtgcaaatattaagttgtcgactcaaccaacaaagcttacagtccgctcaatatatgtttttagtaatggtttgactattgaatcacttaggtctttcttgaaacatttctacttgctgtcaactctagatctccagggtgcccagattgtggagctgccagatgaggttttcaacttgtttaatctacggtttctcagccttcgaaatactgaggttacgaatatccccagcacagttggaagattacaaaaacttgaagtcttggatgtttataatgctaaactgttggctttgccagagagtgtttcgaagcttagaaaattgagatatctacatgtagctactgttccaaagataaatactaaaggggttgtgacctggattggaatccaggtgcctaaaagcatcaaatacctgacaggcttgcaaaccttgaggcttgttgaggcgagctcagagactttatttcaccttggtgctttgacacagttgagaacttttgccatcacaaatgtgcagagggatcagtgtgccgatttgtgcactgttataatgagcatgaagcatcttgttagcttagcaattatggctataagtgaggaggaaatacttcaacttgaagaactttgtttacccccaactctttcaaagcttgaattaggagggcagctggacaagaaagcaatgccccagattgtatcatccttttcagatcttggtaacctcaccttattggccttggcattctccaaacttgatgaggactcattttcatgcctcttgacgttgcatggtctacgtgggctttgggttgataaggcttatgaagggaagaggcttcactttaatgctatgtcttttccaaatcttcgacagcttgcaatatcagatgcaccgcagctcaacagcgttgtaatcgaacgaagcgcactgcaaagccttgttcagctgacacttgtagattgtccagaactgaaggccctgcctgatggcattgagcatcttagaacacttgagaaattatatctgcgaggagcatccaaagagctcacaaagctatttcagtgcaatgaagaaacacatgagtccaatgggaatcttgagaagatcggtcatatccgaagggttactgtttatccataagggtttgattgggagtaagggtaatggggaggattgaaggggctagaatctctcactattctattttaaatagtgaggaattctagccccctcgatctccttcattccatttactcccaaacgagccctaaaaggatgcgaagacttggtgtcataaacccatacacttgcgtgcaagtgttggccttgtcaccgattgcatactactggccaactggtgtaatagctcaagacagtcaagagtaaaataaagttggtgaaaatatagttgggtctgaaccgctgaagtgagtggagactaataatttgtttttgtttccggtacttgattttactgttttgaccttatttttgtgtcactaatactcatcatgtatttgtagtcatacaggtatagattaaacgaaactcttcatcaaacgcgaattgagcaaaagttgagcggtagataaattgtatatttttaaggctagttgggaactctatttttccaatggatttctattatatttctgtacttgatctataaatatttcatgatattattttttaatacgtaatgcagaaaagtattaatcttttttgtgctccggcatattcaattgtttatttggtgacagtcagagagcaaatattgtctttttt

SEQ ID NO: 2348 - DNA, 3658 bp, Zea Mays
gtctaacatctgcttgtggactttgactcgtacttcagcgacccgagcccccgacaatccctcgccgaattccagaatccagagcaagggtatcacctcgacctcagttactgatcggagccgctcctggcgcttggtttctattggatgcgggtgtgatgcagttaggggcaccaaagaaattgaaccatcagttcgataagagtacataaaaggatcaatgcatttcaacactgagaagaagccaacagttcaatggcagagggtgttgttggcatccttattctgaagcttggttcagccttgtttttagaggcttgcaggcttggcacaaaacagctctaccatgaagcttcagcccttggcaggctctttggtgagatccgtgatatcaaggaggaattggagagcatgcaatcttttctacaaggagctgagagattcaaagatactgacaacaacactgccaactttatcaagaagattcgtggccttgctttcgacattgaagatgttatcgatgagtttatctacaagatggaggacaagcatggcagttttgctacaaagatgaatcgtcggattaatcgtatttggacatggcgacgtctcacgtccaaattgcaaaagatcaaactgaaactagagaatgttgataagagaaatgttcgatatgacatgagaggaattgctagagaagatggaagcagtgatgctcatcatagatctaccgaccagatttcttacttccccaaagaggaaaatcttgtgggcattgatgaaaacaaggagttattgatgaattggctaaggggtgatctacatcagcaaagtgtaattacaacagtatgggggatggggggagttggcaagaccactttggttgcacatgtttacaacactgtgaaggtagactttgacagtgctgcatggataactgtttcaaaagcttaccaagtggaggacttgctgaagcagatcatcaggggatttcagaaaagtgatttgaagggtgaacttcgtgttgacataattgacatggaaaagagaagcctagttgagatcatccgtgattattttgcatggcaaaagctatgttttagtgctagatgacgtctggggtgttgacatctggttcaagataagagatgcttttcctaccaatagcactagcaggtttattattacatcgaggatacatgaagtagcattgctggctaatggaaattgcataattgagttgaagccactagaggcacaccattcatgggagttattttgtaaagaggccttctggaaaaatgaaaacaaaatgtgcctgctggaacttaataatttggcacaaagatttgttgacaagtgtaacgggctgcccattgccattgcatgtgtaggccgtcttttgtcttgcagaagcccaacctactctgattgggaaagctttttcaaggaactagagttgcagatgacaaataatgtgattcttaatgttaatgttcttctaaaggttagtttagaggatcttccatatattttaaagaactgctttttgcactgtacaatatttcccgaggatcatttgatcaaaaggaaaaggttaattaggcactgggtagcagagggattcatcagagaaacagagcacaaaacaatggaggaagtggcagagggctatttgtatgaacttgtcaatcgtagcctattacaagtagtggagagaaatgaaagtggacgagtgcagagttgccgaatgcatgatattattcgacttcttgctctgacaaaagcaaatgaggaaggcttctgtaaagtttatgatggcatggggagttattcagcagaaaagacacgtcgtttatcgattcacagtgcaaatattaagttgtcgactcaaccaacaaagcttacagtccgctcaatatatgtttttagtaatggtttgactattgaatcacttaggtctttcttgaaacatttctacttgctgtcaactctagatctccagggtgcccagattgtggagctgccagatgaggttttcaacttgtttaatctacggtttctcagccttcgaaatactgaggttacgaatatccccagcacagttggaagattacaaaaacttgaagtcttggatgtttataatgctaaactgttggctttgccagagagtgtttcgaagcttagaaaattgagatatctacatgtagctactgttccaaagataaatactaaaggggttgtgacctggattggaatccaggtgcctaaaagcatcaaatacctgacaggcttgcaaaccttgaggcttgttgaggcgagctcagagactttatttcaccttggtgctttgacacagttgagaacttttgccatcacaaatgtgcagagggatcagtgtgccgatttgtgcactgttataatgagcatgaagcatcttgttagcttagcaattatggctataagtgaggaggaaatacttcaacttgaagaactttgtttacccccaactctttcaaagcttgaattaggagggcagctggacaagaaagcaatgccccagattgtatcatccttttcagatcttggtaacctcaccttattggccttggcattctccaaacttgatgaggactcattttcatgcctcttgacgttgcatggtctacgtgggctttgggttgataaggcttatgaagggaagaggcttcactttaatgctatgtcttttccaaatcttcgacagcttgcaatatcagatgcaccgcagctcaacagcgttgtaatcgaacgaagcgcactgcaaagccttgttcagctgacacttgtagattgtccagaactgaaggccctgcctgatggcattgagcatcttagaacacttgagaaattatatctgcgaggagcatccaaagagctcacaaagctatttcagtgcaatgaagaaacacatgagtccaatgggaatcttgagaagatcggtcatatccgaagggttactgtttatccataagggtttgattgggagtaagggtaatggggaggattgaaggggctagaatctctcactattctattttaaatagtgaggaattctagccccctcgatctccttcattccatttactcccaaacgagccctaaaaggatgcgaagacttggtgtcataaacccatacacttgcgtgcaagtgttggccttgtcaccgattgcatactactggccaactggtgtaatagctcaagacagtcaagagtaaaataaagttggtgaaaatatagttgggtctgaaccgctgaagtgagtggagactaataatttgtttttgtttccggtacttgattttactgttttgaccttatttttgtgtcactaatactcatcatgtatttgtagtcatacaggtatagattaaacgaaactcttcatcaaacgcgaattgagcaaaagttgagcggtagataaattgtatatttttaaggctagttgggaactctatttttccaatggatttctattatatttctgtacttgatctataaatatttcatgatattattttttaatacgtaatgcagaaaagtattaatcttttttgtgctccggcatattcaattgtttatttggtgacagtcagagagcaaatattgtctttttt

SEQ ID NO: 2349 - DNA, 3617 bp, Zea Mays
gtctaacatctgcttgtggactttgactcgtacttcagcgacccgagcccccgacaatccctcgccgaattccagaatccagagcaagggtatcacctcgacctcagttactgatcggagccgctcctggcgcttggtttctattggatgcggatcaatgcatttcaacactgagaagaagccaacagttcaatggcagagggtgttgttggcatccttattctgaagcttggttcagccttgtttttagaggcttgcaggcttggcacaaaacagctctaccatgaagcttcagcccttggcaggctctttggtgagatccgtgatatcaaggaggaattggagagcatgcaatcttttctacaaggagctgagagattcaaagatactgacaacaacactgccaactttatcaagaagattcgtggccttgctttcgacattgaagatgttatcgatgagtttatctacaagatggaggacaagcatggcagttttgctacaaagatgaatcgtcggattaatcgtatttggacatggcgacgtctcacgtccaaattgcaaaagatcaaactgaaactagagaatgttgataagagaaatgttcgatatgacatgagaggaattgctagagaagatggaagcagtgatgctcatcatagatctaccgaccagatttcttacttccccaaagaggaaaatcttgtgggcattgatgaaaacaaggagttattgatgaattggctaaggggtgatctacatcagcaaagtgtaattacaacagtatgggggatggggggagttggcaagaccactttggttgcacatgtttacaacactgtgaaggtagactttgacagtgctgcatggataactgtttcaaaagcttaccaagtggaggacttgctgaagcagatcatcaggggatttcagaaaagtgatttgaagggtgaacttcgtgttgacataattgacatggaaaagagaagcctagttgagatcatccgtgattattttgcatggcaaaagctatgttttagtgctagatgacgtctggggtgttgacatctggttcaagataagagatgcttttcctaccaatagcactagcaggtttattattacatcgaggatacatgaagtagcattgctggctaatggaaattgcataattgagttgaagccactagaggcacaccattcatgggagttattttgtaaagaggccttctggaaaaatgaaaacaaaatgtgcctgctggaacttaataatttggcacaaagatttgttgacaagtgtaacgggctgcccattgccattgcatgtgtaggccgtcttttgtcttgcagaagcccaacctactctgattgggaaagctttttcaaggaactagagttgcagatgacaaataatgtgattcttaatgttaatgttcttctaaaggttagtttagaggatcttccatatattttaaagaactgctttttgcactgtacaatatttcccgaggatcatttgatcaaaaggaaaaggttaattaggcactgggtagcagagggattcatcagagaaacagagcacaaaacaatggaggaagtggcagagggctatttgtatgaacttgtcaatcgtagcctattacaagtagtggagagaaatgaaagtggacgagtgcagagttgccgaatgcatgatattattcgacttcttgctctgacaaaagcaaatgaggaaggcttctgtaaagtttatgatggcatggggagttattcagcagaaaagacacgtcgtttatcgattcacagtgcaaatattaagttgtcgactcaaccaacaaagcttacagtccgctcaatatatgtttttagtaatggtttgactattgaatcacttaggtctttcttgaaacatttctacttgctgtcaactctagatctccagggtgcccagattgtggagctgccagatgaggttttcaacttgtttaatctacggtttctcagccttcgaaatactgaggttacgaatatccccagcacagttggaagattacaaaaacttgaagtcttggatgtttataatgctaaactgttggctttgccagagagtgtttcgaagcttagaaaattgagatatctacatgtagctactgttccaaagataaatactaaaggggttgtgacctggattggaatccaggtgcctaaaagcatcaaatacctgacaggcttgcaaaccttgaggcttgttgaggcgagctcagagactttatttcaccttggtgctttgacacagttgagaacttttgccatcacaaatgtgcagagggatcagtgtgccgatttgtgcactgttataatgagcatgaagcatcttgttagcttagcaattatggctataagtgaggaggaaatacttcaacttgaagaactttgtttacccccaactctttcaaagcttgaattaggagggcagctggacaagaaagcaatgccccagattgtatcatccttttcagatcttggtaacctcaccttattggccttggcattctccaaacttgatgaggactcattttcatgcctcttgacgttgcatggtctacgtgggctttgggttgataaggcttatgaagggaagaggcttcactttaatgctatgtcttttccaaatcttcgacagcttgcaatatcagatgcaccgcagctcaacagcgttgtaatcgaacgaagcgcactgcaaagccttgttcagctgacacttgtagattgtccagaactgaaggccctgcctgatggcattgagcatcttagaacacttgagaaattatatctgcgaggagcatccaaagagctcacaaagctatttcagtgcaatgaagaaacacatgagtccaatgggaatcttgagaagatcggtcatatccgaagggttactgtttatccataagggtttgattgggagtaagggtaatggggaggattgaaggggctagaatctctcactattctattttaaatagtgaggaattctagccccctcgatctccttcattccatttactcccaaacgagccctaaaaggatgcgaagacttggtgtcataaacccatacacttgcgtgcaagtgttggccttgtcaccgattgcatactactggccaactggtgtaatagctcaagacagtcaagagtaaaataaagttggtgaaaatatagttgggtctgaaccgctgaagacgtgcctccatcttgtggtttcgatgatgacggcaatgatgagttgcaggccacaatacgtgcttcgagagaggagaaataacttaagagggcacgcacgtatgagacgagtggtggctcctcctatgggggtgttcgtggcctgtttgggaattgggagaatagtctctaggaaggaggaggccacgcatgatacaatcaaggattgataagagcctgttttcgaagacaggaacgaatgtggcccatttcattggtaagcaatgggctaattggttctatgctaatgcgattccgaggcataaagctaacagtctgtatttcatcagcgtatttaaagagatacaaaaacatggtgagtatgaatccatagtttat

SEQ ID NO: 2350 - DNA, 773 bp, Zea Mays
cttttcgagttcccgttacaattcacaaggtcttcaatgcaaaattccccgacccctctagattctggaacgaccgccccagccgaggagccgaccggccggcgaagtgggatgggggcgatggcggcggctcgggggcagaaggcgctggtggctctgccgcagctggtgaagtcgctgcggagtgatcccgtttccggaagcgcacgactcagacaccttccgtctctcaggaggaccttctcgttgtacgaccagatcaacctcatcgacagcgtccccgaagacgagctccgattccagtcgtatgatgatactggattcaaaattaacaatataaaatatgaaggcagcttgttgattgtagagaacaagataatgacatgggcacccaaaacgttctcagagataactgctgaaagtttatcaatcttcaaagttgtgcaccctatcccagagatcttgattcttggttgtggaagacacatccagccgaggaatgcggcttcaacatataatatcctgaacgaggagggcaggccggtggcagctgcagttcttccttatggagtcgcttgaaaggccaccctaggttttgtagcatattgttccctttgtaatcgcgggctaacagaagtcacgcagtgtacactacatggaatcgaaataagaatgatggtccctgtcatagtactttgtttcgtttgcgctgttcttggaaatcctgtatcatgcccaaactgaagttgtctttcttccagcttttctactac

SEQ ID NO: 2351 - DNA, 1303 bp, Zea Mays
cttttcgagttcccgttacaattcacaaggtcttcaatgcaaaattccccgacccctctagattctggaacgaccgccccagccgaggagccgaccggccggcgaagtgggatgggggcgatggcggcggctcgggggcagaaggcgctggtggctctgccgcagctggtgaagtcgctgcggagtgatcccgtttccggaagcgcacgactcagacaccttccgtctctcaggaggaccttctcgttgtacgaccagatcaacctcatcgacagcgtccccgaagacgagctccgattccagtcgtatgatgatactggattcaaaattaacaatataaaatatgaaggcagcttgttgattgtagagaacaagataatgacatgggcacccaaaacgttctcagagataactgctgaaagtttatcaatcttcaaagttgtgcaccctatcccaggtaattttgtctcggccaatgctctgctaccttcacgcatattgttgtgctaatgtcacaatccaatgctttgtatggcccttattccttggtttttatgtggcccactggagttttctgctccattagaaagctatagggcatacatggattttattgtgacagatttcatctttatgtttattaattaattgaatggacagtccttggttgtggttgattcgcaagcattttgtgatggtgggggttcaagatctagtttcctattcctttctgtacatttgatcgtcctcataggtagaaatatcaaagtgatctgcaacatttgatatgccattcttgtccagagatcttgattcttggttgtggaagacacatccagccggtcagtcctgagctacgaaagttcattcgttcaactggaatgaagctagaagcagtcgattcaaggaatgcggcttcaacatataatatcctgaacgaggagggcaggccggtggcagctgcagttcttccttatggagtcgcttgttagtgttttttgccttttataccagtttggcaggcgttttcttgttggaatcgatagctaactgagctgaaatgtcggcatccgtctggaccatcgacaatgctgttttggtgtctaggaaaggccaccctaggttttgtagcatattgttccctttgtaatcgcgggctaacagaagtcacgcagtgtacactacatggaatcgaaataagaatgatggtccctgtcatagtactttgtttcgtttgcgctgttcttggaaatcctgtatcatgcccaaactgaagttgtctttcttccagcttttctactac

SEQ ID NO: 2352 - DNA, 2610 bp, Zea Mays
cttttcgagttcccgttacaattcacaaggtcttcaatgcaaaattccccgacccctctagattctggaacgaccgccccagccgaggagccgaccggccggcgaagtgggatgggggcgatggcggcggctcgggggcagaaggcgctggtggctctgccgcagctggtgaagtcgctgcggagtgatcccgtttccggaagcgcacgactcagacaccttccgtctctcaggaggaccttctcgttgtacgaccagatcaacctcatcgacagcgtccccgaagacgagctccgattccagtcgtatgatgatactggattcaaaattaacaatataaaatatgaaggcagcttgttgattgtagagaacaagataatgacatgggcacccaaaacgttctcagagataactgctgaaagtttatcaatcttcaaagttgtgcaccctatcccagatgaatagtaaggctacaagtgaaatcacttcacaggcagttactgcaaattctaggagaaagacaaagatagtctgcaccataggtccctcaaccaacactcgtgagatgatttggaagcttgcagagactggaatgaatgtagcacgccttaatatgtcccatggtgaccaccagtcgcaccagaaggttattgatttggtcaaggagtacaatgcacagaacactgatggcaatgttattgccattatgctggacacaaagggtcctgaagttagaagtggggatgttccagagccaatcatgctcaaggaaggtcaagagttcaacttcacgattaaaagaggggtgagcactgaagacactgtcagcgtgaactatgatgacttcataaatgatgttgaagctggcgacatactattagtggatggaggaatgatgtcgcttgctgtgaagtctaaaacaaccgatacagtcaagtgtaaagtagttgatggtggggaattgaaatcacggcgccacctaaatgtccgtggaaagagtgctactttgccatctatcactgagaaggattgggaagacataaaatttggtgtcgaaaacggtgttgatttctatgcagtttcctttgtgaaggatgccaaagttatccatgaattaaaagactaccttaaaagtgctaatgccgatatacatgtcattccaaaaattgaaagtgcagattcaataccaaacctgcagtccattattgctgcttcagatggggcaatggtggcgcgtggagaccttggtgctgaacttccgattgaggatgttcctttgctacaggcagagattgtccaaacatgtcgaagtatggagaaaccagtcattgtcgctacaaatatgttggaaagcatgattgaccatcctactcccactagggcagaagtttctgacatagctattgcagttcgggaaggtgctgatgccatcatgttatctggcgaaactgctcatggaaagtatccactaaaggcagtcaaggtgatgcacactgtggcactcagaacagaatccagcctttataacccaactacttctcctagtcttgttgcatctgcacagggtctacagaatgaggacttctccccaagccagctaagtaaaatgttcggatctcatgcaacgatgatggccaacacccttcgcacaccaatcattgtatttacacagacaggctccatggctgtcctcctgagccattatcgtccctcgtctacactatttgcatttacaaacgaggaacgagtgaagcaacggctagcactctaccagggcgtcatccctattcacatgcagttctctgacgacgcagaagaaactttctccagagcaattagcagcttgctgaaagcacaatatgtgaagaagggagactacgtcactcttgttcagagcggagtgacttcaatctggagagaggaatccactcaccacatccaagtgaggaaagttcaggtctgatgtgccggtgggaattggtcgtctgagaaattttgatagcgccgcctgatgtgttatcatcattatatgtgtaattttactgttttaccaggagattgctacgtcgagttatatgttgtgtcgaattcacgtgtaggctctgaatcttgactgtgtccgttcattttcgcttgtttcacactgaagtgttataagctcaactttactgcttttgttttcttgtgaaacttgagtttagtttcttgttacaaaaggagctagcactaacagggtggtgagttttgtaaaaacggggcgaggactgttgagttaaaactgttgtaataatgatatcgttcctgcaagacgacacatgcatggccagaaggccaaagtctgaactcttttctgccgggacaagacaggatgacatggtcattgtcgtggtggcatgatgcttgctagccttttctctgcttctgcgcatcatgtcaaggtgataaccttggcagcggatgtggtgacccagcagattgggcacggaacacacctgctgtacctcgtatcacgaccatccgcgaaaagtgcacgaaccacgataacgtaccagctgctagcttcggattccctgcaaggctgcaaactcgagcctcgccgcctcggttttg

SEQ ID NO: 2353 - DNA, 2642 bp, Zea Mays
tccggttctctcgggcgttggaaccgaggattggaggcatcgtgtggaccgcgccgtgcacacctggcgcgtgggcccgcctcctccatctccccctgcggcgtaataagaagcggcccacggccaccgccacgccttgtcggaatatcatacgaaaaccctcgcggcgaggagcgctctccgtcccacacacgcgcgccgcagcctccgcagtccgcacctgcctccacgacttgtcgtgctcgtgcgctactctcctcgagcgcggcgcggagcacggggacatcaaatggcggcagcggcggagatcggtggtttcgcggcggcgagagtggcggtggcgacgctcaggccggctgcgcacccagccccggcggcggcaccgcagcagcctaggagggcggtggcggcgcagtcgctgcggacgaccgccaccgaggcgctgacggcggatctcgccggcacgaccaacggcgctgtgcatgctcggatgaatagtaaggctacaagtgaaatcacttcacaggcagttactgcaaattctaggagaaagacaaagatagtctgcaccataggtccctcaaccaacactcgtgagatgatttggaagcttgcagagactggaatgaatgtagcacgccttaatatgtcccatggtgaccaccagtcgcaccagaaggttattgatttggtcaaggagtacaatgcacagaacactgatggcaatgttattgccattatgctggacacaaagggtcctgaagttagaagtggggatgttccagagccaatcatgctcaaggaaggtcaagagttcaacttcacgattaaaagaggggtgagcactgaagacactgtcagcgtgaactatgatgacttcataaatgatgttgaagctggcgacatactattagtggatggaggaatgatgtcgcttgctgtgaagtctaaaacaaccgatacagtcaagtgtaaagtagttgatggtggggaattgaaatcacggcgccacctaaatgtccgtggaaagagtgctactttgccatctatcactgagaaggattgggaagacataaaatttggtgtcgaaaacggtgttgatttctatgcagtttcctttgtgaaggatgccaaagttatccatgaattaaaagactaccttaaaagtgctaatgccgatatacatgtcattccaaaaattgaaagtgcagattcaataccaaacctgcagtccattattgctgcttcagatggggcaatggtggcgcgtggagaccttggtgctgaacttccgattgaggatgttcctttgctacaggcagagattgtccaaacatgtcgaagtatggagaaaccagtcattgtcgctacaaatatgttggaaagcatgattgaccatcctactcccactagggcagaagtttctgacatagctattgcagttcgggaaggtgctgatgccatcatgttatctggcgaaactgctcatggaaagtatccactaaaggcagtcaaggtgatgcacactgtggcactcagaacagaatccagcctttataacccaactacttctcctagtcttgttgcatctgcacagggtctacagaatgaggacttctccccaagccagctaagtaaaatgttcggatctcatgcaacgatgatggccaacacccttcgcacaccaatcattgtatttacacagacaggctccatggctgtcctcctgagccattatcgtccctcgtctacactatttgcatttacaaacgaggaacgagtgaagcaacggctagcactctaccagggcgtcatccctattcacatgcagttctctgacgacgcagaagaaactttctccagagcaattagcagcttgctgaagcacaatatgtgaagaagggagactacgtcactcttgttcagagcggagtgacttcaatctggagagaggaatccactcaccacatccaagtgaggaaagttcaggtctgatgtgccggtgggaattggtcgtctgagaaattttgatagcgccgcctgatgtgttatcatcattatatgtgtaattttactgttttaccaggagattgctacgtcgagttatatgttgtgtcgaattcacgtgtaggctctgaatcttgactgtgtccgttcattttcgcttgtttcacactgaagtgttataagctcaactttactgcttttgttttcttgtgaaacttgagtttagtttcttgttacaaaaggagctagcactaacagggtggtgagttttgtaaaaacggggcgaggactgttgagttaaaactgttgtaataatgatatcgttcctgcaagacgacacatgcatggccagaaggccaaagtctgaactcttttctgccgggacaagacaggatgacatggtcattgtcgtggtggcatgatgcttgctagccttttctctgcttctgcgcatcatgtcaaggtgataaccttggcagcggatgtggtgacccagcagattgggcacggaacacacctgctgtacctcgtatcacgaccatccgcgaaaagtgcacgaaccacgataacgtaccagctgctagcttcggattccctgcaaggctgcaaactcgagcctcgccgcctcggttttg

SEQ ID NO: 2354 - DNA, 2638 bp, Zea Mays
tccggttctctcgggcgttggaaccgaggattggaggcatcgtgtggaccgcgccgtgcacacctggcgcgtgggcccgcctcctccatctccccctgcggcgtaataagaagcggcccacggccaccgccacgccttgtcggaatatcatacgaaaaccctcgcggcgaggagcgctctccgtcccacacacgcgcgccgcagcctccgcagtccgcacctgcctccacgacttgtcgtgctcgtgcgctactctcctcgagcgcggcgcggagcacggggacatcaaatggcggcagcggcggagatcggtggtttcgcggcggcgagagtggcggtggcgacgctcaggccggctgcgcacccagccccggcggcggcaccgcagcagcctaggagggcggtggcggcgcagtcgctgcggacgaccgccaccgaggcgctgacggcggatctcgccggcacgaccaacggcgctgtgcatgctcggatgaatagtaaggctacaagtgaaatcacttcacaggcagttactgcaaattctaggagaaagacaaagatagtctgcaccataggtccctcaaccaacactcgtgagatgatttggaagcttgcagagactggaatgaatgtagcacgccttaatatgtcccatggtgaccaccagtcgcaccagaaggttattgatttggtcaaggagtacaatgcacagaacactgatggcaatgttattgccattatgctggacacaaagggtcctgaagttagaagtggggatgttccagagccaatcatgctcaaggaaggtcaagagttcaacttcacgattaaaagaggggtgagcactgaagacactgtcagcgtgaactatgatgacttcataaatgatgttgaagctggcgacatactattagtggatggaggaatgatgtcgcttgctgtgaagtctaaaacaaccgatacagtcaagtgtaaagtagttgatggtggggaattgaaatcacggcgccacctaaatgtccgtggaaagagtgctactttgccatctatcactggattgggaagacataaaatttggtgtcgaaaacggtgttgatttctatgcagtttcctttgtgaaggatgccaaagttatccatgaattaaaagactaccttaaaagtgctaatgccgatatacatgtcattccaaaaattgaaagtgcagattcaataccaaacctgcagtccattattgctgcttcagatggggcaatggtggcgcgtggagaccttggtgctgaacttccgattgaggatgttcctttgctacaggcagagattgtccaaacatgtcgaagtatggagaaaccagtcattgtcgctacaaatatgttggaaagcatgattgaccatcctactcccactagggcagaagtttctgacatagctattgcagttcgggaaggtgctgatgccatcatgttatctggcgaaactgctcatggaaagtatccactaaaggcagtcaaggtgatgcacactgtggcactcagaacagaatccagcctttataacccaactacttctcctagtcttgttgcatctgcacagggtctacagaatgaggacttctccccaagccagctaagtaaaatgttcggatctcatgcaacgatgatggccaacacccttcgcacaccaatcattgtatttacacagacaggctccatggctgtcctcctgagccattatcgtccctcgtctacactatttgcatttacaaacgaggaacgagtgaagcaacggctagcactctaccagggcgtcatccctattcacatgcagttctctgacgacgcagaagaaactttctccagagcaattagcagcttgctgaaagcacaatatgtgaagaagggagactacgtcactcttgttcagagcggagtgacttcaatctggagagaggaatccactcaccacatccaagtgaggaaagttcaggtctgatgtgccggtgggaattggtcgtctgagaaattttgatagcgccgcctgatgtgttatcatcattatatgtgtaattttactgttttaccaggagattgctacgtcgagttatatgttgtgtcgaattcacgtgtaggctctgaatcttgactgtgtccgttcattttcgcttgtttcacactgaagtgttataagctcaactttactgcttttgttttcttgtgaaacttgagtttagtttcttgttacaaaaggagctagcactaacagggtggtgagttttgtaaaaacggggcgaggactgttgagttaaaactgttgtaataatgatatcgttcctgcaagacgacacatgcatggccagaaggccaaagtctgaactcttttctgccgggacaagacaggatgacatggtcattgtcgtggtggcatgatgcttgctagccttttctctgcttctgcgcatcatgtcaaggtgataaccttggcagcggatgtggtgacccagcagattgggcacggaacacacctgctgtacctcgtatcacgaccatccgcgaaaagtgcacgaaccacgataacgtaccagctgctagcttcggattccctgcaaggctgcaaactcgagcctcgccgcctcggttttg

SEQ ID NO: 2355 - DNA, 2639 bp, Zea Mays
tccggttctctcgggcgttggaaccgaggattggaggcatcgtgtggaccgcgccgtgcacacctggcgcgtgggcccgcctcctccatctccccctgcggcgtaataagaagcggcccacggccaccgccacgccttgtcggaatatcatacgaaaaccctcgcggcgaggagcgctctccgtcccacacacgcgcgccgcagcctccgcagtccgcacctgcctccacgacttgtcgtgctcgtgcgctactctcctcgagcgcggcgcggagcacggggacatcaaatggcggcagcggcggagatcggtggtttcgcggcggcgagagtggcggtggcgacgctcaggccggctgcgcacccagccccggcggcggcaccgcagcagcctaggagggcggtggcggcgcagtcgctgcggacgaccgccaccgaggcgctgacggcggatctcgccggcacgaccaacggcgctgtgcatgctcggatgaatagtaaggctacaagtgaaatcacttcacaggcagttactgcaaattctaggagaaagacaaagatagtctgcaccataggtccctcaaccaacactcgtgagatgatttggaagcttgcagagactggaatgaatgtagcacgccttaatatgtcccatggtgaccaccagtcgcaccagaaggttattgatttggtcaaggagtacaatgcacagaacactgatggcaatgttattgccattatgctggacacaaagggtcctgaagttagaagtggggatgttccagagccaatcatgctcaaggaaggtcaagagttcaacttcacgattaaaagaggggtgagcactgaagacactgtcagcgtgaactatgatgacttcataaatgatgttgaagctggcgacatactattagtggatggaggaatgatgtcgcttgctgtgaagtctaaaacaaccgatacagtcaagtgtaaagtagttgatggtggggaattgaaatcacggcgccacctaaatgtccgtggaaagagtgctactttgccatctatcactgagaaggattgggaagacataaaatttggtgtcgaaaacggtgttgatttctatgcagtttcctttgtgaaggatgccaaagttatccatgaattaaaagactaccttaaaagtgctaatgccgatatacatgtcattccaaaaattgaaagtgcagattcaataccaaacctgcagtccattattgctgcttcagatggggcaatggtggcgcgtggagaccttggtgctgaacttccgattgaggatgttcctttgctacagagattgtccaaacatgtcgaagtatggagaaaccagtcattgtcgctacaaatatgttggaaagcatgattgaccatcctactcccactagggcagaagtttctgacatagctattgcagttcgggaaggtgctgatgccatcatgttatctggcgaaactgctcatggaaagtatccactaaaggcagtcaaggtgatgcacactgtggcactcagaacagaatccagcctttataacccaactacttctcctagtcttgttgcatctgcacagggtctacagaatgaggacttctccccaagccagctaagtaaaatgttcggatctcatgcaacgatgatggccaacacccttcgcacaccaatcattgtatttacacagacaggctccatggctgtcctcctgagccattatcgtccctcgtctacactatttgcatttacaaacgaggaacgagtgaagcaacggctagcactctaccagggcgtcatccctattcacatgcagttctctgacgacgcagaagaaactttctccagagcaattagcagcttgctgaaagcacaatatgtgaagaagggagactacgtcactcttgttcagagcggagtgacttcaatctggagagaggaatccactcaccacatccaagtgaggaaagttcaggtctgatgtgccggtgggaattggtcgtctgagaaattttgatagcgccgcctgatgtgttatcatcattatatgtgtaattttactgttttaccaggagattgctacgtcgagttatatgttgtgtcgaattcacgtgtaggctctgaatcttgactgtgtccgttcattttcgcttgtttcacactgaagtgttataagctcaactttactgcttttgttttcttgtgaaacttgagtttagtttcttgttacaaaaggagctagcactaacagggtggtgagttttgtaaaaacggggcgaggactgttgagttaaaactgttgtaataatgatatcgttcctgcaagacgacacatgcatggccagaaggccaaagtctgaactcttttctgccgggacaagacaggatgacatggtcattgtcgtggtggcatgatgcttgctagccttttctctgcttctgcgcatcatgtcaaggtgataaccttggcagcggatgtggtgacccagcagattgggcacggaacacacctgctgtacctcgtatcacgaccatccgcgaaaagtgcacgaaccacgataacgtaccagctgctagcttcggattccctgcaaggctgcaaactcgagcctcgccgcctcggttttg

SEQ ID NO: 2356 - DNA, 2484 bp, Zea Mays
cttctctcggagccttgcctcctgcctcgcaccttcacgagctcactcctgctgctccattccacaatccacactcccccgcgctggactggagtcgagttgagcgcacgctctcgcactcccatattcccaccgaccatatcgctcttgcttcgctaagcatcctagatctccattcgcgcccatggggtgcttccagtccaaggtggcggggcccctgccgcccaacgacgccgccgcgctccccgccgacaagcctgcagatcccgaggcggcgaacggcgccgccgacgggggaggcgacggcgacgacaaggaggccgtgaagcgcgcggtgccggtgttcagggagttcgcgctggccgagctgcgcgccgccaccaagggcttcagcgccgacctcatcgtctcggagagcggcgagaaggcgcccaacgccgtctaccgcggccgcctcgatggcggacggctcatcgccgtcaaacgcttctcgcgcctctcttggcctgacccgcagcagttcctcgcggatgcggtgggcgtggggaaggtgcggcacaagcgcctcgtcaacctcattggctgctgcgccgagggtgacgagaggctgctcgtcgctgagtacatgcccaacgacaccctgtcgaagcatctcttccactgggataaacagcctttaccatgggaaatgaggctgagggttgcatattttattgcacaagctctcgaccattgcaatttggagaacaggaaaatctatcatgatttgaatgcttatagagtactttttgatgaggaaggtgatccccgcctgtcaagttttggattaatgaagaacagccgtgatggaaaaagctatagtactaacctggcttacactccaccagagtttctacgaacaggcagagtaattcccgagagtgtgatatatagctatggaactgtcctgttggatcttttgagcggaaaacacattcctcctagtcatgccctagatttaataaggggaaagaatatactgttgctgatggattcctccttagaagggcagtatgctaatgaagatgcttcaaaattggttgaccttgcatcaaagtgtctgcaatttgaatctagggatagaccaaacataaagtatcttttgtcttcagttggtcctcttcaaaatcaaaaggaggttgcatcacatgtgttcatgggtattacaaaagccacatcagtactgccagccatttattctccacttgggaaggcctgcgctggtatggatctttcagcggtgcatgatattttactcaaaacaggttataaagatgacgagggtgcagaaaacgagttatcctttcaagaatggacccagcaagtgcaagagatgctgaacacaaagaagtttggtgacattgcatttagagacaaggattttaagactgcaattgactactattccaagtttttcctacttgatgaatgagcaagcagagcttgctctacgggacgcaatgcaggcccaggtctgcatgcccgagtggcctacagccttctacctccaagcccttgctctttcaaagctcggcatggaaaccgacgcgcaggacatgctcaacgacggagcaacatttgaggccaagaagcaaaacggctggcgcagttaggaaataaaagtctcctaactactccgtgtcgttgcccttcgaggaaaaaaaaggcgcaatcgctagtgtcctccaaatcagttcattgggacgtctgttgcacgaccaaggagtgggattgaaatgcactgttttatcgtgcaatctctgccctaatgccggcaacgagcggtggtgttatgatcaggagtggaagaacaggtcagggggctttgagtgcacaggcatagcttgctctcccgtgagttgcgctttgttttgcgagtggtggtggcaggatctgctgattgttgcaactgcagttgtaattaaagggatgctttctaacaatttctccttttggttcacgtcgaatctttgggctgcagaggacaagagtggtgtgcaaaaagccgggttcattgtgattagctacggagaataaactagaggcatcggaattccattcgattctaccatgtttgtatggagtttgtatgcggtcttattttttccccctttctatgaacaattctgtcttttttgatcgatcgaatcgtttcagatagtcagttgcgcatccaccgatttggtttcaaagcagcagatacgtgcttgtatatcatctggttgactggttgtcataaagaacttgcacaactatcggttgggaggcgcgtaattttattttaagtacacgagcaacttatcacttgctgttatttgttttcagattttttaaaattgattttaaatccttaaacttgtccctgtatttataaaattcatgtttaatctttaaacttatcatagagtgtcacccgacttcctgaaattcttaaaatatcatctc

SEQ ID NO: 2357 - DNA, 2471 bp, Zea Mays
ctcctccctcctgccgctgctctctctctctccgttcctgatcggcaaggcaacttattgaagcagcctctctccctcgacggctggacctcaacaattgtttgttcttgaggcccgccagaccttaataatcttgctggctggctggctggtaacttactaatctagctagctataggcggctctgaccctctgataatggtcttggactccatcggcttcttcttcgtcgtcgtcatagtcatcccccgcgcgctgcttaggaagagcttctatttctggatcttccacgtcttcaacagatatcccctcctcaacctcctcctcttccattgccagccgcgcactgatctatctactaaccgccgctctagctagcacacagcctacacatacgcatctgctgcctgaaatatttgcttggcagagttgacatttacattcgatctctcggttactagtgtagtagtagtgttggatcggcagcatttatttgcttccccctgccgctgccggccatgggcaccatgaccctgccgcccgggttccgcttccaccccaccgacgacgagctggtgagctactacctcaagaggaaggtggacaacctcaagatcgagctcgaggtcatccccgtcgtcgacctctacaagtccgagccatgggaactaccagacaagtcgttcctgccgaagcgcgacctggagtggttcttcttctgcccccgcgatcgcaagtaccccaacgggtcgcgcaccaaccgcgccacggcgacgggctactggaaggcgacgggcaaggaccggcgcgtggcgtgcgacggcggcgtctacggcctccgcaagacgctcgtcttctaccgcggccgcgcgccaggcggcgagcgcaccgactgggtcatgcacgagtaccgcctctgccaggacctcgtccacggcgcgtgcaacttcatcggcgcctacgcgctgtgccgcgtgatcaagcggcacgaggccgggctgctgctgccgccgcctgcgagcagggccaaagcggccggcagcgcgagagggcacatgatgagcgaggtctccagcggcgagcagctaagcgcgtcgtcgtcgccgtcgccgttcacgcccgccaactccagccccactcgtcccacgctggacgcggcgggagctgtaacgtgcgccatggctcctgaacccggcaacgcgttccagctggcgcacgacgcgagcgcggcccttccctccctcgcgctgcctccgccgcccctgctcctgccgtctccccacgaggacgacacgtttttcgtcagcgaaggcctccccgccgcggcggcggactggttcggcggagacatgggcggcgtctcggagtcggagcaggagctgaaatgggacgccttgttcccctgcacaggcacgttcccgagcgtaggtgtcgacacgtggaacgcggcggccgcgagcccgacgaccatgctgtgccggcaggcgagcgacggcatcgacgacctggccgccttcttcttctcggaggacaacaggatcgtcttctgaatccttttaataacagaacagagcacagcacagcacatattgggaactattgctacagagggtgatggcgtcttttttattacagtcttctctgtagcactcggtcggtgtgctgtgtacggccgtgtcactttctaatactacttagtactactactacttgcgtgcttgaccagtactgtactgtgatgtgtacgacaacgcaaaatattgcactgctttgtagccccttgttaaccattctcaattcaatgccattattgtattgtaccccggcaattacatgttgcgtgcagtgctgcgatcacgattggggtttctgttcatcatcatcagcagcagaagaagaagaagctactccaagcaaggtagggaagtaggcacagtataacgttgaaggtggtgtggtggcagccagctgaaatagcttcatgagatgagaagatggcgcgcggaaagcaagggatggcttagcagccaaggacgaaccaagcagctagcagaccagttacgtgaccattcacctcagggaaacgaaacggtggacacgaacattccccaggaacctggacgacggcacgcaattcagagccaggaaagcgctactagtattattcaggacagaaaggggacgggagaatatatagcatgggccatgggggaaacaggtcgccgtcgttccacgaatctgacggcgaaaggaggtgagggcggcgagcagccatcgtcagcaagtgataatcatgttcatgtcaaacgcgggtgcgcgctccctttttctctcagtctccgcaccgcaccagcttgcgaatgttttgcgctgggagcagcggagagtcggccggaggaatccctgtctctgcttgctttggcctggtgtctagtatattctgtcgacgcctggtgtctagtaaaagttgg

SEQ ID NO: 2358 - DNA, 1510 bp, Zea Mays
ctcaatcgaagcaccaggaaaactcgcgcaacacaaatctcaacaattatccggctggtgcgccggcgagcaccgtcctccggcgaccggctgggcagcagcagcaaagggggatcttgtcacgcttcgagatcggtcgccgcgctgggggcgactcactcgcgccactcttccccttccctgcgctggtggcggaaccctaatgccggcccgagtctagccgccatggactttgccagccgccacgccgcagcggaggcggccacatcggcatccgccgctgcccccgcgggcgtcgccgaggagcccgagtacctcgcccggtacctcgtcgtcaagcactcttggaggggaaggtaccgccgggtcctttgcatcgcctcttccggcgtcgtcacgctcgaccccaccacgctcaacctcaccaactcctacgatgcccgctccgagttcgaccacgctgaggctctcaccgccaccgacgagttcacgctcgcagtccgcaccgatgcccgcagcaagttcaagcccatgcgcttctcgtcgccgctccgcccggggatcctcaccgaactccaccgcctccgcccggtccaggcctccttcgacttccccgttctccacctccgccgacgcacccacgaatggtcctccttcaaatttaaggtcactcctgtgggtgttgagctccttgaggcttctggtgatatacgctggtgcttggacttcagagatatgaattctccggcaattgtactcttgggggatagctatgggaggaagacttctgaaggtggagggtttgtgctatgccctctttatggtaggaagtcaaaagcttttatggctgcttcaggaactacaaacactgcaattatatcgcatatgacgaaaactgccaaattaaagattggattatcactatctgtggataactcacaatcaatgaaagcggatgacttcatagcaaaaagagctatggaggcagttggagctgctgaaacacggcatggagagtggtcggtaacaagattacgttctgctgcgcgtggcactgctaatattgagagcttaagtttgggtgttggaccaaggggtgggcttggagaacagggtgattctgtctctcgtctgcttgttcttacaagtacttcacttgttgaaagacgtccagagaactatgaggctgccattgtacgaccactctcagcagtaagtgcttttgttcgatttgctgaagagccacagatgtttgcatttgaattcaatgatggctgcccaattcatgtatatgcaagcacttcccgtgataatctacttgcaacagttcttgacattttacaaacccagagacagtgtgcaattccagtgctaccaaggttaacaatgcctggtcatcggatagatccgccttgcggggtatcacatcttcagatgccccatcatagttctgttgatatggagtctgctaccatgcacattaaaacatctggctgcagctgcttaagag

SEQ ID NO: 2359 - DNA, 1504 bp, Zea Mays
ctcaatcgaagcaccaggaaaactcgcgcaacacaaatctcaacaattatccggctggtgcgccggcgagcaccgtcctccggcgaccggctgggcagcagcagcaaagggggatcttgtcacgcttcgagatcggtcgccgcgctgggggcgactcactcgcgccactcttccccttccctgcgctggtggcggaaccctaatgccggcccgagtctagccgccatggactttgccagccgccacgccgcagcggaggcggccacatcggcatccgccgctgcccccgcgggcgtcgccgaggagcccgagtacctcgcccggtacctcgtcgtcaagcactcttggaggggaaggtaccgccgggtcctttgcatcgcctcttccggcgtcgtcacgctcgaccccaccacgctcaacctcaccaactcctacgatgcccgctccgagttcgaccacgctgaggctctcaccgccaccgacgagttcacgctcgcagtccgcaccgatgcccgcagcaagttcaagcccatgcgcttctcgtcgccgctccgcccggggatcctcaccgaactccaccgcctccgcccggtccaggcctccttcgacttccccgttctccacctccgccgacgcacccacgaatggtcctccttcaaatttaaggtcactcctgtgggtgttgagctccttgaggcttctggtgatatacgctggtgcttggacttcagagatatgaattctccggcaattgtactcttgggggatagctatgggaggaagacttctgaaggtggagggtttgtgctatgccctctttatggtaggaagtcaaaagcttttatggctgcttcaggaactacaaacactgcaattatatcgcatatgacgaaaactgccaaattaaagattggattatcactatctgtggataactcacaatcaatgaaagcggatgacttcatagcaaaaagagctatggaggcagttggagctgctgaaacacggcatggagagtggtcggtaacaagattacgttctgctgcgcgtggcactgctaatattgagagcttaagtttgggtgttggaccaaggggtgggcttggagaacagggtgattctgtctctcgtctgcttgttcttacaagtacttcacttgttgaaagacgtccagagaactatgaggctgccattgtacgaccactctcagcagtaagtgcttttgttcgatttgctgaagagccacagatgtttgcatttgaattcaatgatggctgcccaattcatgtatatgcaagcacttcccgtgataatctacttgcaacagttcttgacattttacaaacccagtgtgcaattccagtgctaccaaggttaacaatgcctggtcatcggatagatccgccttgcggggtatcacatcttcagatgccccatcatagttctgttgatatggagtctgctaccatgcacattaaaacatctggctgcagctgcttaagag

SEQ ID NO: 2360 - DNA, 1418 bp, Zea Mays
gaaaactcgcgcaacacaaatctcaacaattatccggctggtgcgccggcgagcaccgtcctccggcgaccggctgggcagcagcagcaaagggggatcttgtcacgcttcgagatcggtcgccgcgctgggggcgactcactcgcgccactcttccccttccctgcgctggtggcggaaccctaatgccggcccgagtctagccgccatggactttgccagccgccacgccgcagcggaggcggccacatcggcatccgccgctgcccccgcgggcgtcgccgaggagcccgagtacctcgcccggtacctcgtcgtcaagcactcttggaggggaaggtaccgccgggtcctttgcatcgcctcttccggcgtcgtcacgctcgaccccaccacgctcaacctcaccaactcctacgatgcccgctccgagttcgaccacgctgaggctctcaccgccaccgacgagttcacgctcgcagtccgcaccgatgcccgcagcaagttcaagcccatgcgcttctcgtcgccgctccgcccggggatcctcaccgaactccaccgcctccgcccggtccaggcctccttcgacttccccgttctccacctccgccgacgcacccacgaatggtcctccttcaaatttaaggtcactcctgtgggtgttgagctccttgaggcttctggtgatatacgctggtgcttggacttcagagatatgaattctccggcaattgtactcttgggggatagctatgggaggaagacttctgaaggtggagggtttgtgctatgccctctttatggtaggaagtcaaaagcttttatggctgcttcaggaactacaaacactgcaattatatcgcatatgacgaaaactgccaaattaaagattggattatcactatctgtggataactcacaatcaatgaaagcggatgacttcatagcaaaaagagctatggaggcagttggagctgctgaaacacggcatggagagtggtcggtaacaagattacgttctgctgcgcgtggcactgctaatattgagagcttaagtttgggtgttggaccaaggggtgggcttggagaacagggtgattctgtctctcgtctgcttgttcttacaagtacttcacttgttgaaagacgtccagagaactatgaggctgccattgtacgaccactctcagcagtatatgcaagcacttcccgtgataatctacttgcaacagttcttgacattttacaaacccagagacagtgtgcaattccagtgctaccaaggttaacaatgcctggtcatcggatagatccgccttgcggggtatcacatcttcagatgccccatcatagttctgttgatatggagtctgctaccatgcacattaaaacatctggctgcagctgcttaagag

SEQ ID NO: 2361 - DNA, 6370 bp, Zea Mays
catgcttcatttgttgagcttctgcggcaagttgctggtttgcgccgccgtttgttttcattatttgcacatccagctgaaagtgtgcgagagactatttctgttataatgcgtacaattgctgaggaagatgcaatagcagcagagtccatgcgtgacgctgccttgaaggatggtgctcttctgaggcatttactaaatgctttcttctttcctgctggagaacggcgtgatgttagtcggcaacttgttgctctttgggctgattcctatcaacctgcacttgatttgctatcaagaatacttcctcctggacttgttgcttatctgcatacacgttcagatgaagattcacggagccagtatgatgaagcaccgttgagcagaaggcagagacgaatacttcagcagaggagggttcatggtactaaaactatggcagtacaagaacaagggataccccccaatggtgttgaggatggggaacccttcaggcacatcagtgccggcacttacggaggagcagatgttcatcagaggcatgttggcctgtactcttccacccactctccttcgccaggtataaacattgatccttctcacactgtttcagttccacatggttctgtacctgaggccctttctgaaaataatcaacaaatcgaggcaccacagctggattcacatgtttattcagtggactccaatgccaatggcaatcttgtgagctcattgcattcagatttttcagtccctgcacaggttgtggtggaaaacactcctgtgggatctggcaggctcctgtgcaattggtatggattttggagggcattcagtctagatcacaacagagcagatttgatatggaatgaacgcactagaggggaattgagggcagcattgcaagctgaagttcataacttggatgtcgagaaagaaagaacagatgacattgtccttggaagttcagtcactgaggatgctgctggtagtgacaacttacctcgaatttcatggaattatgctgaattttcagtgagttacccaagcttgttcaaagaagtctgtgtggggcaatactatttgcggctcctgcttgaaagcggaagcaactatcgagcacaggattttccattacgtgatcctgttgccttttttagagctctgtaccatcgatttttgtgtgacgcagatattggtcttactgtggatggtgcagtacctgatgagttgggatcatctgatgattggtgtgacatggggagattagatggctttggtggtggtggaggatcttctgtgagagaactttgttctagggcaatggctatagtttatgagcaacattataaagttattgggccttttgatggcactgcacatattactgtcctcttagaccgaacagatgatagggtgttgaggcatcgtttgctactacttttaaaggccttgatgaatgacctttcaaatgttgaagcatgtgttttggttggaggctgtgttttggctgttgatttgcttactgttgcacatgaaacatccgaacggacagctattcctttgcaatctaacctcatcgcggcaactgcatttatggaaccttcaaaagagtggatgtacattgataaagatggcacacaagttgggccacttgaaaaggatgcaataagaaggctgtggtcaaagaagtcaattgattggacaataaaatgttgggcttctggtatgtctgactggaaaaggttacgggatatacgggaactgcgatgggcactttctgtaagagtacctgttttgactcctacccagcaggtgaaatagtaactccaactcctagggtgaaacatatattgtcaagtccaagatgccttcctcatgtggcccaggctatgcttactggggaacccagcatcgttgaagcagctgcctcattgcttaaggctattgttacaagaaatcctaaagctatgattcgattatatagtactggtgccttttactttgcattggcgtatcctggttcaaatctcctatcaattgcacagttgttttcggccacacatactcatcaagcttttcatggtggtgaagaggcagcactatcttcatctttgcctttggcaaagcgtagtgtactgggtggactactcccagaatctttgctgtatgtcttggagcgcagtggcccttctgcttttgcgggtgcaatggtgtctgattctgacacaccagaaattatatggacccacaagatgcgagcagaaaaccttattcgtcaggtcctgcagcatctcggtgactttcctcagaaattagcacagcattgccattcgttgtatgattatgctcctatgccacccgtgacttatccgaatctgaaagatgagatgtggtgccatcgttactacctccgtaacctatgtgatgaaattaggtttcctaactggcccattgtagaacacgtggagtttttgcagtcattgttggtaatgtggcgtgaagagttaactcgtcgtccaatggatttatctgaagaagaagcctgtaagatactggagatttcacttgatgatctcgtgcttgttgagaacggtagcagcaagcggccatctgacttaagttcggctaattccggaaacaaaactgaaaacattgatgaagagaagcttaagcgccaataccgaaagctagcaataaaatatcatccagacaagaaccctgaaggaagggagaagtttgttgctgtgcaaaaggcctatgagcgattgcaggctagtatgcagggattgcagggaccacaagtctggaggctgctactcttgctgaaggcacaatgcatcttgtacaagagatatggggatgtcttggaaccattcaaatatgctggttatcctatgttgctaaatgcagttactgtagataaggatgacagcaattttctttcatctgatagggcccctcttcttatagctgcttcagagctgatttggctgacatgtgcatcatcttcattaaatggagaagaacttataagggatggtggtatccccttgttggcaacacttctttctcgctgtatgtgcattgttcagcccacaacaccggcaaatgaaccagctgcaagaatagtcaccaacataatgcatactttctctgtcctcagtcagtttgagtcaggaagagttgaggttcttaagtttggtggccttgttgaggacattgtgcattgtacagaacttgaatttgttccttcagctgtggatgctgcactgctgacagctgcaaatgtttcggtgtcatctgagttgcaaaatgctttgctcagggctggatttttatggtatgtgctacccctgctgcttcagtatgattcgacagcagaagagaatgagatatgtgaggcacatggtgttggggcaagggtgcagattgctaaaaatctgcatgctgttcatgcaactcaggctttgtctaagctttctggtctcagcagcgatgatatactgtacccagataacaaacctgcatacaatgcgctaaaggctcttcttactccaaagcttgctgacatgctgagaaaccacccacctaaagagttattatcaaatctgaattcaaatttggaatcaccagagatcatatggaattcgtccaccagaggggagcttctcaaatttgtagaccagcagcgtgctagtcaaggccctgatggttcatatgatttgacagaatcacagtctttcacctatgaagctttatccaaagaattgatcgttggtaatgtatacttgagagtttacaacaatcaaccggattttgaaataagtgaccaggaggaattttgcattgccctgctcaagtttatagcagagttagtacaacagtggaattccgttaacttggaggagacgattcatcaacatggttcagttattgaagcatctatttctgaaaatgatcaagtcagtgattcaactattgaaggaaaaatggacaattcatcaggaaaacaaagtacagatggagattctgaagttattataaacctccaatgtgggctaacatcacttcagaatcttcttacaagtaatccaggcttagctgctgtttttgctaccaaggagcgtctggttcctctttttgaatgccttgcactccatgtttctcctgaaagcagcatcccacaaatctgtttaagtattctttctctgttgactaagcatgctccttgtttggaggctatggttgcagaaaggatgagcctcattttgctatttcagatactccactgcaatcctccttgcagggatggagctcttgctgtactatattctttagccagcacaccagagcttgcctgggctgctgccaagcatggtggtgttgtttacattcttgaacttatgttgccacttcaagaggaaatctctatgcagcaaagagctgctgctgcatctttattgggcaaacttgttggacaaccaatgcatggccccagggtggcaatcacccttgccaggttcctgcctgatggtttggtttctgccattaaagatggacctggtgaagctgttgtttcttctcttgaacagacaacggaaactcctgaactagtatggacacccgcaatggcagcttctctttctgcacagttagcaacaatggcatcagacctctaccaagagcagatgaaaggacgtgttgttgattgggatgtacctgaacaagcatctgggcaacatgtaatgaaggacgaaccacaggttggtggaatttatgttagactttttcttaaggaccccaaatttccactgagaaaccctaaaagattccttgaagggctcctagatcaatatgtctcctctgttgctgctacgcattatgaagcaattgctacagacccagagcttcctttactactgtctgcggcattggtttccttactacgagttcatccagcacttgctgaccatgttggctacctcggttatgttccaaagcttgttgcggctatggcttatgagggaagaagggagactatggcatctgggcaggctaccagtgcatcgaaggcagaacctagcgaacatgacaactcagctcactccgaggccactgtacagactccacaagaacgtgttcgccttagttgtttgcgtgttctgcatcagcttgcgtctagtacaacttgtgcagaagctatggcagcaacaagtgcaggaactcctcaggttgtaccactgcttatgaaagcaattggatggcaaggtggaagtatactggcattggagacattaaagcgtgtagttggtgctggtaatcgggctcgtgatgctcttgttgcacaggggcttaaggttggtcttgttgaagtactccttggtattcttgattggcgtgttggtggaagacaggggctctgtaatcaaatgaagtggaatgaatcagaggcttcaattggacgtgttttggctgtggaggtgcttcatgcttttgcaaccgaaggtgcacattgtgctagagttcgtgaagtcctgaattcctctgatgtatggagtgcttacaaagaccagaagcacgaccttttccttccatccaatgcacaatcttctgctgctggaattgctgggctcattgagagctcatcatcaagactcacttacgccctcaccgcaccgccaccacaaccttcattggtccgtctgccatcttcttctccctctccaccatcagctcctgcaaaccctagtggacggcattcttatcagcgtttgtagtgcaaaacggaacatgttaatctcaacccggagtgtgaaccatgaaggcaccatggtaacggtttctagagtgaggccaccttgagtgggcttgttactgccaccaaatacagattgtgcggttgtgcctccattccccaccaatgagcagctgtcagtggctgcatttcagtacatagcattgtacagttttccattacaacggggtcagggtcggggtcggttttgcgtttgttcatgtaaagcatatgatcttttttgtaacataatagatgtcaatagaataatggagctggaaattgtagtatcgattcattgctgggtcctgggtggatgcactcccttgttaggataacacgactttcttggacaagagaaatggatgttttttgttttgtttgatcagcgtcctgtagcgtcagggtatatttggttccctgtctaactcgacttttttgttagtcacaaactaaacaatgacacagttagtcacaaaccaaataactccttaaccttttatagtcatacgtcgcaaacttctggcaatggtgtgctattttatttgtaataaaataacaaagcaaaattca

SEQ ID NO: 2362 - DNA, 6367 bp, Zea Mays
catgcttcatttgttgagcttctgcggcaagttgctggtttgcgccgccgtttgttttcattatttgcacatccagctgaaagtgtgcgagagactatttctgttataatgcgtacaattgctgaggaagatgcaatagcagcagagtccatgcgtgacgctgccttgaaggatggtgctcttctgaggcatttactaaatgctttcttctttcctgctggagaacggcgtgatgttagtcggcaacttgttgctctttgggctgattcctatcaacctgcacttgatttgctatcaagaatacttcctcctggacttgttgcttatctgcatacacgttcagatgaagattcacggagccagtatgatgaagcaccgttgagcagaaggcagagacgaatacttcagcagaggagggttcatggtactaaaactatggcagtacaagaacaagggataccccccaatggtgttgaggatggggaacccttcaggcacatcagtgccggcacttacggaggagcagatgttcatcagaggcatgttggcctgtactcttccacccactctccttcgccaggtataaacattgatccttctcacactgtttcagttccacatggttctgtacctgaggccctttctgaaaataatcaacaaatcgaggcaccacagctggattcacatgtttattcagtggactccaatgccaatggcaatcttgtgagctcattgcattcagatttttcagtccctgcacaggttgtggtggaaaacactcctgtgggatctggcaggctcctgtgcaattggtatggattttggagggcattcagtctagatcacaacagagcagatttgatatggaatgaacgcactagaggggaattgagggcagcattgcaagctgaagttcataacttggatgtcgagaaagaaagaacagatgacattgtccttggaagttcagtcactgaggatgctgctggtagtgacaacttacctcgaatttcatggaattatgctgaattttcagtgagttacccaagcttgttcaaagaagtctgtgtggggcaatactatttgcggctcctgcttgaaagcggaagcaactatcgagcacaggattttccattacgtgatcctgttgccttttttagagctctgtaccatcgatttttgtgtgacgcagatattggtcttactgtggatggtgcagtacctgatgagttgggatcatctgatgattggtgtgacatggggagattagatggctttggtggtggtggaggatcttctgtgagagaactttgttctagggcaatggctatagtttatgagcaacattataaagttattgggccttttgatggcactgcacatattactgtcctcttagaccgaacagatgatagggtgttgaggcatcgtttgctactacttttaaaggccttgatgaatgacctttcaaatgttgaagcatgtgttttggttggaggctgtgttttggctgttgatttgcttactgttgcacatgaaacatccgaacggacagctattcctttgcaatctaacctcatcgcggcaactgcatttatggaaccttcaaaagagtggatgtacattgataaagatggcacacaagttgggccacttgaaaaggatgcaataagaaggctgtggtcaaagaagtcaattgattggacaataaaatgttgggcttctggtatgtctgactggaaaaggttacgggatatacgggaactgcgatgggcactttctgtaagagtacctgttttgactcctacccaggtgaaatagtaactccaactcctagggtgaaacatatattgtcaagtccaagatgccttcctcatgtggcccaggctatgcttactggggaacccagcatcgttgaagcagctgcctcattgcttaaggctattgttacaagaaatcctaaagctatgattcgattatatagtactggtgccttttactttgcattggcgtatcctggttcaaatctcctatcaattgcacagttgttttcggccacacatactcatcaagcttttcatggtggtgaagaggcagcactatcttcatctttgcctttggcaaagcgtagtgtactgggtggactactcccagaatctttgctgtatgtcttggagcgcagtggcccttctgcttttgcgggtgcaatggtgtctgattctgacacaccagaaattatatggacccacaagatgcgagcagaaaaccttattcgtcaggtcctgcagcatctcggtgactttcctcagaaattagcacagcattgccattcgttgtatgattatgctcctatgccacccgtgacttatccgaatctgaaagatgagatgtggtgccatcgttactacctccgtaacctatgtgatgaaattaggtttcctaactggcccattgtagaacacgtggagtttttgcagtcattgttggtaatgtggcgtgaagagttaactcgtcgtccaatggatttatctgaagaagaagcctgtaagatactggagatttcacttgatgatctcgtgcttgttgagaacggtagcagcaagcggccatctgacttaagttcggctaattccggaaacaaaactgaaaacattgatgaagagaagcttaagcgccaataccgaaagctagcaataaaatatcatccagacaagaaccctgaaggaagggagaagtttgttgctgtgcaaaaggcctatgagcgattgcaggctagtatgcagggattgcagggaccacaagtctggaggctgctactcttgctgaaggcacaatgcatcttgtacaagagatatggggatgtcttggaaccattcaaatatgctggttatcctatgttgctaaatgcagttactgtagataaggatgacagcaattttctttcatctgatagggcccctcttcttatagctgcttcagagctgatttggctgacatgtgcatcatcttcattaaatggagaagaacttataagggatggtggtatccccttgttggcaacacttctttctcgctgtatgtgcattgttcagcccacaacaccggcaaatgaaccagctgcaagaatagtcaccaacataatgcatactttctctgtcctcagtcagtttgagtcaggaagagttgaggttcttaagtttggtggccttgttgaggacattgtgcattgtacagaacttgaatttgttccttcagctgtggatgctgcactgctgacagctgcaaatgtttcggtgtcatctgagttgcaaaatgctttgctcagggctggatttttatggtatgtgctacccctgctgcttcagtatgattcgacagcagaagagaatgagatatgtgaggcacatggtgttggggcaagggtgcagattgctaaaaatctgcatgctgttcatgcaactcaggctttgtctaagctttctggtctcagcagcgatgatatactgtacccagataacaaacctgcatacaatgcgctaaaggctcttcttactccaaagcttgctgacatgctgagaaaccacccacctaaagagttattatcaaatctgaattcaaatttggaatcaccagagatcatatggaattcgtccaccagaggggagcttctcaaatttgtagaccagcagcgtgctagtcaaggccctgatggttcatatgatttgacagaatcacagtctttcacctatgaagctttatccaaagaattgatcgttggtaatgtatacttgagagtttacaacaatcaaccggattttgaaataagtgaccaggaggaattttgcattgccctgctcaagtttatagcagagttagtacaacagtggaattccgttaacttggaggagacgattcatcaacatggttcagttattgaagcatctatttctgaaaatgatcaagtcagtgattcaactattgaaggaaaaatggacaattcatcaggaaaacaaagtacagatggagattctgaagttattataaacctccaatgtgggctaacatcacttcagaatcttcttacaagtaatccaggcttagctgctgtttttgctaccaaggagcgtctggttcctctttttgaatgccttgcactccatgtttctcctgaaagcagcatcccacaaatctgtttaagtattctttctctgttgactaagcatgctccttgtttggaggctatggttgcagaaaggatgagcctcattttgctatttcagatactccactgcaatcctccttgcagggatggagctcttgctgtactatattctttagccagcacaccagagcttgcctgggctgctgccaagcatggtggtgttgtttacattcttgaacttatgttgccacttcaagaggaaatctctatgcagcaaagagctgctgctgcatctttattgggcaaacttgttggacaaccaatgcatggccccagggtggcaatcacccttgccaggttcctgcctgatggtttggtttctgccattaaagatggacctggtgaagctgttgtttcttctcttgaacagacaacggaaactcctgaactagtatggacacccgcaatggcagcttctctttctgcacagttagcaacaatggcatcagacctctaccaagagcagatgaaaggacgtgttgttgattgggatgtacctgaacaagcatctgggcaacatgtaatgaaggacgaaccacaggttggtggaatttatgttagactttttcttaaggaccccaaatttccactgagaaaccctaaaagattccttgaagggctcctagatcaatatgtctcctctgttgctgctacgcattatgaagcaattgctacagacccagagcttcctttactactgtctgcggcattggtttccttactacgagttcatccagcacttgctgaccatgttggctacctcggttatgttccaaagcttgttgcggctatggcttatgagggaagaagggagactatggcatctgggcaggctaccagtgcatcgaaggcagaacctagcgaacatgacaactcagctcactccgaggccactgtacagactccacaagaacgtgttcgccttagttgtttgcgtgttctgcatcagcttgcgtctagtacaacttgtgcagaagctatggcagcaacaagtgcaggaactcctcaggttgtaccactgcttatgaaagcaattggatggcaaggtggaagtatactggcattggagacattaaagcgtgtagttggtgctggtaatcgggctcgtgatgctcttgttgcacaggggcttaaggttggtcttgttgaagtactccttggtattcttgattggcgtgttggtggaagacaggggctctgtaatcaaatgaagtggaatgaatcagaggcttcaattggacgtgttttggctgtggaggtgcttcatgcttttgcaaccgaaggtgcacattgtgctagagttcgtgaagtcctgaattcctctgatgtatggagtgcttacaaagaccagaagcacgaccttttccttccatccaatgcacaatcttctgctgctggaattgctgggctcattgagagctcatcatcaagactcacttacgccctcaccgcaccgccaccacaaccttcattggtccgtctgccatcttcttctccctctccaccatcagctcctgcaaaccctagtggacggcattcttatcagcgtttgtagtgcaaaacggaacatgttaatctcaacccggagtgtgaaccatgaaggcaccatggtaacggtttctagagtgaggccaccttgagtgggcttgttactgccaccaaatacagattgtgcggttgtgcctccattccccaccaatgagcagctgtcagtggctgcatttcagtacatagcattgtacagttttccattacaacggggtcagggtcggggtcggttttgcgtttgttcatgtaaagcatatgatcttttttgtaacataatagatgtcaatagaataatggagctggaaattgtagtatcgattcattgctgggtcctgggtggatgcactcccttgttaggataacacgactttcttggacaagagaaatggatgttttttgttttgtttgatcagcgtcctgtagcgtcagggtatatttggttccctgtctaactcgacttttttgttagtcacaaactaaacaatgacacagttagtcacaaaccaaataactccttaaccttttatagtcatacgtcgcaaacttctggcaatggtgtgctattttatttgtaataaaataacaaagcaaaattca

SEQ ID NO: 2363 - DNA, 6154 bp, Zea Mays
catgcttcatttgttgagcttctgcggcaagttgctggtttgcgccgccgtttgttttcattatttgcacatccagctgaaagtgtgcgagagactatttctgttataatgcgtacaattgctgaggaagatgcaatagcagcagagtccatgcgtgacgctgccttgaaggatggtgctcttctgaggcatttactaaatgctttcttctttcctgctggagaacggcgtgatgttagtcggcaacttgttgctctttgggctgattcctatcaacctgcacttgatttgctatcaagaatacttcctcctggacttgttgcttatctgcatacacgttcagatgaagattcacggagccagtatgatgaagcaccgttgagcagaaggcagagacgaatacttcagcagaggagggttcatggtactaaaactatggcagtacaagaacaagggataccccccaatggtgttgaggatggggaacccttcaggcacatcagtgccggcacttacggaggagcagatgttcatcagaggcatgttggcctgtactcttccacccactctccttcgccaggtataaacattgatccttctcacactgtttcagttccacatggttctgtacctgaggccctttctgaaaataatcaacaaatcgaggcaccacagctggattcacatgtttattcagtggactccaatgccaatggcaatcttgtgagctcattgcattcagatttttcagtccctgcacaggttgtggtggaaaacactcctgtgggatctggcaggctcctgtgcaattggtatggattttggagggcattcagtctagatcacaacagagcagatttgatatggaatgaacgcactagaggggaattgagggcagcattgcaagctgaagttcataacttggatgtcgagaaagaaagaacagatgacattgtccttggaagttcagtcactgaggatgctgctggtagtgacaacttacctcgaatttcatggaattatgctgaattttcagtgagttacccaagcttgttcaaagaagtctgtgtggggcaatactatttgcggctcctgcttgaaagcggaagcaactatcgagcacaggattttccattacgtgatcctgttgccttttttagagctctgtaccatcgatttttgtgtgacgcagatattggtcttactgtggatggtgcagtacctgatgagttgggatcatctgatgattggtgtgacatggggagattagatggctttggtggtggtggaggatcttctgtgagagaactttgttctagggcaatggctatagtttatgagcaacattataaagttattgggccttttgatggcactgcacatattactgtcctcttagaccgaacagatgatagggtgttgaggcatcgtttgctactacttttaaaggccttgatgaatgacctttcaaatgttgaagcatgtgttttggttggaggctgtgttttggctgttgatttgcttactgttgcacatgaaacatccgaacggacagctattcctttgcaatctaacctcatcgcggcaactgcatttatggaaccttcaaaagagtggatgtacattgataaagatggcacacaagttgggccacttgaaaaggatgcaataagaaggctgtggtcaaagaagtcaattgattggacaataaaatgttgggcttctggtatgtctgactggaaaaggttacgggatatacgggaactgcgatgggcactttctgtaagagtacctgttttgactcctacccagattggggacactgcattatctatattacacagtatggcatctgcacgctctgatcttgatgatgcaggtgaaatagtaactccaactcctagggtgaaacatatattgtcaagtccaagatgccttcctcatgtggcccaggctatgcttactggggaacccagcatcgttgaagcagctgcctcattgcttaaggctattgttacaagaaatcctaaagctatgattcgattatatagtactggtgccttttactttgcattggcgtatcctggttcaaatctcctatcaattgcacagttgttttcggccacacatactcatcaagcttttcatggtggtgaagaggcagcactatcttcatctttgcctttggcaaagcgtagtgtactgggtggactactcccagaatctttgctgtatgtcttggagcgcagtggcccttctgcttttgcgggtgcaatggtgtctgattctgacacaccagaaattatatggacccacaagatgcgagcagaaaaccttattcgtcaggtcctgcagcatctcggtgactttcctcagaaattagcacagcattgccattcgttgtatgattatgctcctatgccacccgtgacttatccgaatctgaaagatgagatgtggtgccatcgttactacctccgtaacctatgtgatgaaattaggtttcctaactggcccattgtagaacacgtggagtttttgcagtcattgttggtaatgtggcgtgaagagttaactcgtcgtccaatggatttatctgaagaagaagcctgtaagatactggagatttcacttgatgatctcgtgcttgttgagaacggtagcagcaagcggccatctgacttaagttcggctaattccggaaacaaaactgaaaacattgatgaagagaagcttaagcgccaataccgaaagctagcaataaaatatcatccagacaagaaccctgaaggaagggagaagtttgttgctgtgcaaaaggcctatgagcgattgcaggctagtatgcagggattgcagggaccacaagtctggaggctgctactcttgctgaaggcacaatgcatcttgtacaagagatatggggatgtcttggaaccattcaaatatgctggttatcctatgttgctaaatgcagttactgtagataaggatgacagcaattttctttcatctgatagggcccctcttcttatagctgcttcagagctgatttggctgacatgtgcatcatcttcattaaatggagaagaacttataagggatggtggtatccccttgttggcaacacttctttctcgctgtatgtgcattgttcagcccacaacaccggcaaatgaaccagctgcaagaatagtcaccaacataatgcatactttctctgtcctcagtcagtttgagtcaggaagagttgaggttcttaagtttggtggccttgttgaggacattgtgcattgtacagaacttgaatttgttccttcagctgtggatgctgcactgctgacagctgcaaatgtttcggtgtcatctgagttgcaaaatgctttgctcagggctggatttttatggtatgtgctacccctgctgcttcagtatgattcgacagcagaagagaatgagatatgtgaggcacatggtgttggggcaagggtgcagattgctaaaaatctgcatgctgttcatgcaactcaggctttgtctaagctttctggtctcagcagcgatgatatactgtacccagataacaaacctgcatacaatgcgctaaaggctcttcttactccaaagcttgctgacatgctgagaaaccacccacctaaagagttattatcaaatctgaattcaaatttggaatcaccagagatcatatggaattcgtccaccagaggggagcttctcaaatttgtagaccagcagcgtgctagtcaaggccctgatggttcatatgatttgacagaatcacagtctttcacctatgaagctttatccaaagaattgatcgttggtaatgtatacttgagagtttacaacaatcaaccggattttgaaataagtgaccaggaggaattttgcattgccctgctcaagtttatagcagagttagtacaacagtggaattccgttaacttggaggagacgattcatcaacatggttcagttattgaagcatctatttctgaaaatgatcaagtcagtgattcaactattgaaggaaaaatggacaattcatcaggaaaacaaagtacagatggagattctgaagttattataaacctccaatgtgggctaacatcacttcagaatcttcttacaagtaatccaggcttagctgctgtttttgctaccaaggagcgtctggttcctctttttgaatgccttgcactccatgtttctcctgaaagcagcatcccacaaatctgtttaaagggatggagctcttgctgtactatattctttagccagcacaccagagcttgcctgggctgctgccaagcatggtggtgttgtttacattcttgaacttatgttgccacttcaagacaacggaaactcctgaactagtatggacacccgcaatggcagcttctctttctgcacagttagcaacaatggcatcagacctctaccaagagcagatgaaaggacgtgttgttgattgggatgtacctgaacaagcatctgggcaacatgtaatgaaggacgaaccacaggttggtggaatttatgttagactttttcttaaggaccccaaatttccactgagaaaccctaaaagattccttgaagggctcctagatcaatatgtctcctctgttgctgctacgcattatgaagcaattgctacagacccagagcttcctttactactgtctgcggcattggtttccttactacgagttcatccagcacttgctgaccatgttggctacctcggttatgttccaaagcttgttgcggctatggcttatgagggaagaagggagactatggcatctgggcaggctaccagtgcatcgaaggcagaacctagcgaacatgacaactcagctcactccgaggccactgtacagactccacaagaacgtgttcgccttagttgtttgcgtgttctgcatcagcttgcgtctagtacaacttgtgcagaagctatggcagcaacaagtgcaggaactcctcaggttgtaccactgcttatgaaagcaattggatggcaaggtggaagtatactggcattggagacattaaagcgtgtagttggtgctggtaatcgggctcgtgatgctcttgttgcacaggggcttaaggttggtcttgttgaagtactccttggtattcttgattggcgtgttggtggaagacaggggctctgtaatcaaatgaagtggaatgaatcagaggcttcaattggacgtgttttggctgtggaggtgcttcatgcttttgcaaccgaaggtgcacattgtgctagagttcgtgaagtcctgaattcctctgatgtatggagtgcttacaaagaccagaagcacgaccttttccttccatccaatgcacaatcttctgctgctggaattgctgggctcattgagagctcatcatcaagactcacttacgccctcaccgcaccgccaccacaaccttcattggtccgtctgccatcttcttctccctctccaccatcagctcctgcaaaccctagtggacggcattcttatcagcgtttgtagtgcaaaacggaacatgttaatctcaacccggagtgtgaaccatgaaggcaccatggtaacggtttctagagtgaggccaccttgagtgggcttgttactgccaccaaatacagattgtgcggttgtgcctccattccccaccaatgagcagctgtcagtggctgcatttcagtacatagcattgtacagttttccattacaacggggtcagggtcggggtcggttttgcgtttgttcatgtaaagcatatgatcttttttgtaacataatagatgtcaatagaataatggagctggaaattgtagtatcgattcattgctgggtcctgggtggatgcactcccttgttaggataacacgactttcttggacaagagaaatggatgttttttgttttgtttgatcagcgtcctgtagcgtcagggtatatttggttccctgtctaactcgacttttttgttagtcacaaactaaacaatgacacagttagtcacaaaccaaataactccttaaccttttatagtcatacgtcgcaaacttctggcaatggtgtgctattttatttgtaataaaataacaaagcaaaattca

SEQ ID NO: 2364 - DNA, 2066 bp, Zea Mays
tgtcgtcaccatgttgtcggacgtgtgctagacttagatgtcaatgctattgacgtcggcccgtgttagttaggcgtcaatagtgttggcgtcgacctatatgtcatttttgaaatgaaactgaaaagagtatatttctgaaaataaaaccgaaaatggctaaattgtaaaaaaaaaaaatttggccggtatgtgtatgtctaggctctgccgctctggggtctagacgacaacgcacgcaaaggctgatgcgtatcaacgtatgcggatgcaggggcagcaccgtccacctccaccatctttcctcttcctcctcgcctccaccccttcccttccatctcctcccacccggcgactcctcttcctctctgccgcgccgatcgattggcccacccatcgatcgagcacggggaagaagattccagtccggagtggtttcaattcggtcgggttcgttgcccgtgtgggtgggcgctatggcggcgatggatgcctcggcagataagaacgccgtcttccgcaagcttcgcgccaaatcggacaacaagatgtgcttcgattgcaacgccaagaacccgacgtgggcgtccgtcacctacggcgtcttcctctgcatcgactgctcggcggcgcaccgcagcctcggcgtccacgtctccttcgtcaggtcaacaaatttggattcatggactccagaacaactgaaaatgatggtctatggcggaaataaccgtgcgcaagctttctttaagcagcatggttggacagatggtggaaaaattgaagcaaagtatacttcaagagctgctgacttgtaccgacagttgcttgctaaagacgttgctaaaagctctacagaagatggaaacaatagttggccatcttccccagttgcagcatcccaggctccaaatcaagctgctgcatttccagatctcaagctgacagaggtgtcaaaagaaaatgtaagtgaaaagaaagattctgagattgttcgttcgcctagagctccaacccattctttcaagaagccgattggtgctaaaaagcctggaaataagactggtggacttggtgcacggaagcttacatcaaagccaaatgaaagcctctatgagcagaagcccgaggaaccagctcccgtcctgccatcatcggtgattgagagtactacaactaggagcaaatcacatacttcccgatttgattacgttgaaaatgcacctgctcttaagaatgggaatagctcagaaggcaaccacatgagtggacatgttgcacccccaatgtcgtcaaacttctttgctgaatttgggatggacagtggatatcagaaaaaatctacgtccagttcatccaaagtgcagattgaggaaagcagggaagcaagacagaaattctcaaaagcgaaatcaatttcttcctctcagttttttggtgatcaggccagttttgaaaaggacgctcaagtctctctccaaaagttttctggttcctctgcgatatcaagtgctgacctatttggccatccggcaaacaattctagcgtggatctcagtgcttcagatttgatcaacagaatctcgttccaggccactcaggatctgtcttctctcaagaacatggcaggggaaaccgggaaaaatggctggcttctcccgtcgacccgggtgacaaactggcctggcctggcctgcagatctgtctaggagttcgtaggcgtctgagaacttcctggcaatctggcatatctgtctaggagttcggaagcatctgaaaagtggcatatctgcctaggagttcgggagcagctaaaatcttgaagttagagagagagagagagaaagagagagagagggtgaaagaagagaacttatgaccaatactgtaattggctaaagtcatgtatgcttctagagctgtaacgcaaatgtcttttgccattggttttatctcgggtttgagatatatacttttgctttgtaatgatacatacatgttttctaattatgcgtagatatttcttgccccaagcttttgttttctcttggactcatgagaatagg

SEQ ID NO: 2365 - DNA, 2102 bp, Zea Mays
cccgtcgccgcctgaaaccgcgacagcaagggtcgtaggagcaaggacgacgacgagaaggctcggttcggctcttcccagtctctccgagggaggaaggagaggatcggagggtgcgatggcgatcgaccacgagtccccgttcaaggagctccgcctcaagaaccgcaggatcatggtgagtcacctggccggagccgctcgtccatcgccttcctatatatccttttgtagccccgagccctgccattctcgatttctcttcttgccggccaagaaaagaacgttttttttttttttttgctcctttccgttactgttggcgacgaacgcttacttacgtgcagcaatggcggcggccatgccttagattcaacgactgtttttgtccaccgcctccctcgaccctttctttgggatctccgcattgccttggcgtctcgttctgattgtctcccgtgccgccgttccccgagcaataattttttaaaacttttttttttttgagcgcaagcaaccgaatctctctctcttgcagactactattccatcttgtttgtttgccgatctatctgtgtgacggagcttttcttggcaaacagccaattcaaatgcttcgccatcgagcaaagcgagtcaactgacggaaacatggttgtccgtgcagggcggcggcggccctgaccctgagccggaggaggaggaggaggtcgccacggcggcgtacgcggggcagtggccgcgctggctgcagccgctgctttcggcgcgcttcttcgcgcactgcaggacgcacggcgactcgcaccgcagcggcgagtgcaacatgttctgcctggactgctccgccgcgggcgcgggcgcgggcgcgcgcgccctgtgctcgctgtgcctggcgcaggcccaccgcgaccaccacaccatccagatccggcgctcctcctaccacgacgtcatccgggtgtccgacatccagcgcttcatggacatcgccggggtgcagacctacgtcatcaacagcgcccgcgtcgtcttcctcaacgagcggccccagcagcagaggcctggatgcaaggccgcgtcggcgtccgccaacctctgcgaggtgtgcgcccgcagcctcctcgacaacttccgcttctgctccctcggatgcaaggtcgtgggctgctcccccgacgccgccaaggccaggagctggctcctccggcccgccgtcggcggcagcggcgacggcgactccacgtcctcctcgccgctgcgcgacgcccagaagaggcagagcttcaccccgcccacgccgcagccggcgaagcgccgcaagggcatcccgcaccgcgcgccgttcggcagcttcatcgtcgagtactagctccctctctctccgtctccacggcggcggcggcggctgcattggcagtggcactacacagcacacgcgcgggcaatgggactgggacggccaccacttccttttgccgtgacacactctggctggctggctggtggtgcttctcgaggtggatgccattcggtcgctgctggctttgctttccacaaagggaggggaggaaagaaaggttgaggaagaatcaaaacactggcttttcatcactgttgctaggctctctgatatagaaatatatatgtacatttttagccttgtcctgtttcaaatcatcatagtggagcattatagctagctagctttttttactagattattcgtctgaagaaaagaaaccatggttcaggagatgaccagctagtgcaaggtacttactttatactagtaataagctatggtggtgggtgatgatggctgatggatgccgaaccacattgttggcacttgatgattagtgtgccaagaagaggaagcaaggaaatgccgtcacgttactgcccgggcaaggttgcgttgatgcaaagccactctgaatgcgactggccggcatcgctaaacgccctgattattattcttgttcattctaatctaatcctgggccattgaaccgggccagtttggtgctgacgtgacgctgaggcccgcgcagcgccagcgtccgtcggcgacgacgtacgtacgtcatgggtgaagc

SEQ ID NO: 2366 - DNA, 1317 bp, Zea Mays
cgaccacattgcaaacgttgcttcagagtttgccttgcagttgttgcacaccagtgcagacatttcatctttgaaggcccgccggcggttgggaagagaagcatggtactggcacttataagggatgcttttggcccccatgatctcaagatagaggaacagacaaagagatttgagctgaagggagaaattagaaagcacatcgatgtcagagtgaagacctctgagcatcatgtggaggtgagcttggctgatttacatggctacgagaagtacatcataaccactctgttgagtgaatccatcccatcaccaagctcagtttgtgaccatactaactgcagagtgattgttatccatgatgctgataagctctcgtttgatcttcaacattatattggttggtttttggggaggtatgccgggtgcaacaaaatcattttctgctgttctgatgcttctaatcttgaagccattaagcatctctgtaaggttgtgactcttcaaccaccttcatttgacgagataataaatgttctagagtacattgcaacgcaagagagcattgatttgcctcgtgatcttgctagaagaattacagtcggcgcaaacaataatctccgacagacaatacgctcttttgaagctacttggaaggcaaactacccgttcatagacggtcaagttattttgacaggatgggaagaagaaatctctaatgtggccagcaatatcatggaggagccaagtccaaagcaactgtttcttgtccggggaaagatcagaaaaatgattgaacatgatgtgtcacctcatttcattttctctcacctggtcgcggaactgaaaagggacaaggatgaagacttccagcacagcgttgatgaattggcctcggacttgaaccattttcaagattccaaagggcagtgcaaaggaaacaaatcacgggaggcaaactttaaaacgaggtatatgaacatagaaggttttaccgctgaggctcatgaccatggtgaaaccatccaatgcttcataaaaattgaagaattcaccgtaaggttcctgagcttctacagatctctagtggcaaaaaactcgaatagaggcagtgctcaatgaagaacaactcgtcgcttgggtctacagatccccttctgggggctcttgtacctatggtacctgaatatgatgcgttgtgtctattgtcttcatcttgtaaaatttacctgtatatgatgacatacagtttttcatatgttactatcatataaaataaaatcgtaatataaaaaaaagatggccttatggtttgct

SEQ ID NO: 2367 - DNA, 2225 bp, Zea Mays
ccgcggaacagcccccgtgaccgtgaaccaaccagttgtccagttccgctccggcactccacccacccacccagccaccccacgcccgcgagcgaccaactcccctctcgaacggttcgggcctttgcagtcgacagatcgatcaatcagcaccgaccactcgcgacccgattcgaatcgagccagagtcccaggcagcggcggcggcggcgcccgcctccaagaccacctccacccggaccccagccccaaccccaaggtctccctctcgtaccgttccccgctctgcgcgcgctcgtgcgtcatatctggcctgcgattcatttcacggcgccgtgtgcctctaatatggctggcgtctgtgcctctttggtgaggttttcgactccgtggctttgccttccctctagagacagcgggtggtgtcttcagccctgatggcaccatgtcatgtgcgcgattggatcatggggattctgatggttcacagcgcttcttcaccttctccgtcaagggttctgtatgttgcaaaccacggtgtggttctctttgacatgtccattgacgactgccatactgtgcatttctgatagctttgcgcagcttacctgtcttattgcaaaataaccagtagtaccattggcggaagcaggccccccccccccccccctcttccctgtcccccttccccgtcaaattggttgttgttaacagatgggggacgttgcgaaggacttgacggctgggaccgtgggaggggctgccaacctcatcgtcgggcacccgttcgacaccatcaaggtcaagctccagagccagcccacccctgctcccggacagctccccaagtacgccggcgccatcgatgctgtgaagcagacggtcgcggctgaaggtccgaggggcctatacaaggggatgggggcacctctggccaccgtagcggccttcaacgctgtcttgttcagtgtcagggggcagatggaggcgtttctcaggtcagagcctggtgtgccgctgacagtgaagcagcaggttgttgcgggcgccggtgctggaatcgcagtctccttcttggcttgtccaacagaactgatcaagtgcaggttgcaagcccagagttccttagccgaggcagccaccgcttctggtgtggctcttcccaaaggtccgatcgacgtggcgaagcatgttgtccgggacgccggcgccaaaggtctcttcaagggcctggtcccgacgatgggacgcgaggtccctggcaacgcactgatgttcggcgtgtacgaagccacgaagcagtacctggccggcggcccggacacgtcgggcctcggcaggggctcccaggtcctggcgggcggcctcgccggcgccgccttctggctgtccgtgtacccgacggacgtggtgaagagcgtgatccaggtggacgattacaagaagcccaagtactccgggtccctcgacgcgctgaggaagatcgtggcggctgatggggtgaagggcctgtacaaggggttcggacccgccatggcacgcagcgttccagccaatgccgcgacattcgtggcctacgagatcacgagatcggcgcttggttgatttgattggtgctggcctttgccatggccctttgcagtttattcattctccttgcgcggctggagcaacgcgaacaatgcgagacaattttagggaggaaagagagagagaaacttttcacttcaatgatgagattctttaatgaagcaaagcttactaaaagtttgttcatgtggagccacagagtgagtggttggtgacagataagtaatactggccttgtcgtaatggttggttggcctggactagagtgggcatccgacggtgatccgatggcgcgcgagtccgactggtggtgcttgtgatggtgagctgtgtggcccatggttttgttggcgtctggtggtgggtggccctcgtcagctcgcattcggcattcccttttgcccccacaatcccacgttcgccttgcctcctttttcttcttggcctaaattttattctttttctctctcacacacacaaatatatcagtataccgttctccttttattagtgccagtatgtaatggcatgttcggctgcctttctagcagatttttattttagtcttttttctaaaactgttattgttgttacttgacttcaattatcaaaaatcaaggcaatataagttaaat

SEQ ID NO: 2368 - DNA, 2299 bp, Zea Mays
ccgcggaacagcccccgtgaccgtgaaccaaccagttgtccagttccgctccggcactccacccacccacccagccaccccacgcccgcgagcgaccaactcccctctcgaacggttcgggcctttgcagtcgacagatcgatcaatcagcaccgaccactcgcgacccgattcgaatcgagccagagtcccaggcagcggcggcggcggcgcccgcctccaagaccacctccacccggaccccagccccaaccccaaggtctccctctcgtaccgttccccgctctgcgcgcgctcgtgcgtcatatctggcctgcgattcatttcacggcgccgtgtgcctctaatatggctggcgtctgtgcctctttggtgaggttttcgactccgtggctttgccttccctctagagacagcgggtggtgtcttcagccctgatggcaccatgtcatgtgcgcgattggatcatggggattctgatggttcacagcgcttcttcaccttctccgtcaagggttctgtatgttgcaaaccacggtgtggttctctttgacatgtccattgacgactgccatactgtgcatttctgatagctttgcgcagcttacctgtcttattgcaaaataaccagtagtaccattggcggaagcaggccccccccccccccccctcttccctgtcccccttccccgtcaaattggttgttggtactttgcttttctggctcattctaaattttcatccagaccagacaacccggtgtttgatacaaaatttgctgtgaacctttacttgcatcgagaaaagacttgacggctgggaccgtgggaggggctgccaacctcatcgtcgggcacccgttcgacaccatcaaggtcaagctccagagccagcccacccctgctcccggacagctccccaagtacgccggcgccatcgatgctgtgaagcagacggtcgcggctgaaggtccgaggggcctatacaaggggatgggggcacctctggccaccgtagcggccttcaacgctgtcttgttcagtgtcagggggcagatggaggcgtttctcaggtcagagcctggtgtgccgctgacagtgaagcagcaggttgttgcgggcgccggtgctggaatcgcagtctccttcttggcttgtccaacagaactgatcaagtgcaggttgcaagcccagagttccttagccgaggcagccaccgcttctggtgtggctcttcccaaaggtccgatcgacgtggcgaagcatgttgtccgggacgccggcgccaaaggtctcttcaagggcctggtcccgacgatgggacgcgaggtccctggcaacgcactgatgttcggcgtgtacgaagccacgaagcagtacctggccggcggcccggacacgtcgggcctcggcaggggctcccaggtcctggcgggcggcctcgccggcgccgccttctggctgtccgtgtacccgacggacgtggtgaagagcgtgatccaggtggacgattacaagaagcccaagtactccgggtccctcgacgcgctgaggaagatcgtggcggctgatggggtgaagggcctgtacaaggggttcggacccgccatggcacgcagcgttccagccaatgccgcgacattcgtggcctacgagatcacgagatcggcgcttggttgatttgattggtgctggcctttgccatggccctttgcagtttattcattctccttgcgcggctggagcaacgcgaacaatgcgagacaattttagggaggaaagagagagagaaacttttcacttcaatgatgagattctttaatgaagcaaagcttactaaaagtttgttcatgtggagccacagagtgagtggttggtgacagataagtaatactggccttgtcgtaatggttggttggcctggactagagtgggcatccgacggtgatccgatggcgcgcgagtccgactggtggtgcttgtgatggtgagctgtgtggcccatggttttgttggcgtctggtggtgggtggccctcgtcagctcgcattcggcattcccttttgcccccacaatcccacgttcgccttgcctcctttttcttcttggcctaaattttattctttttctctctcacacacacaaatatatcagtataccgttctccttttattagtgccagtatgtaatggcatgttcggctgcctttctagcagatttttattttagtcttttttctaaaactgttattgttgttacttgacttcaattatcaaaaatcaaggcaatataagttaaat

SEQ ID NO: 2369 - DNA, 1589 bp, Zea Mays
ttttcatccagaccagacaacccggtgtttgatacaaaatttgctgtgaacctttacttgcatcgagaaaattaacagatgggggacgttgcgaaggacttgacggctgggaccgtgggaggggctgccaacctcatcgtcgggcacccgttcgacaccatcaaggtcaagctccagagccagcccacccctgctcccggacagctccccaagtacgccggcgccatcgatgctgtgaagcagacggtcgcggctgaaggtccgaggggcctatacaaggggatgggggcacctctggccaccgtagcggccttcaacgctgtcttgttcagtgtcagggggcagatggaggcgtttctcaggtcagagcctggtgtgccgctgacagtgaagcagcaggttgttgcgggcgccggtgctggaatcgcagtctccttcttggcttgtccaacagaactgatcaagtgcaggttgcaagcccagagttccttagccgaggcagccaccgcttctggtgtggctcttcccaaaggtccgatcgacgtggcgaagcatgttgtccgggacgccggcgccaaaggtctcttcaagggcctggtcccgacgatgggacgcgaggtccctggcaacgcactgatgttcggcgtgtacgaagccacgaagcagtacctggccggcggcccggacacgtcgggcctcggcaggggctcccaggtcctggcgggcggcctcgccggcgccgccttctggctgtccgtgtacccgacggacgtggtgaagagcgtgatccaggtggacgattacaagaagcccaagtactccgggtccctcgacgcgctgaggaagatcgtggcggctgatggggtgaagggcctgtacaaggggttcggacccgccatggcacgcagcgttccagccaatgccgcgacattcgtggcctacgagatcacgagatcggcgcttggttgatttgattggtgctggcctttgccatggccctttgcagtttattcattctccttgcgcggctggagcaacgcgaacaatgcgagacaattttagggaggaaagagagagagaaacttttcacttcaatgatgagattctttaatgaagcaaagcttactaaaagtttgttcatgtggagccacagagtgagtggttggtgacagataagtaatactggccttgtcgtaatggttggttggcctggactagagtgggcatccgacggtgatccgatggcgcgcgagtccgactggtggtgcttgtgatggtgagctgtgtggcccatggttttgttggcgtctggtggtgggtggccctcgtcagctcgcattcggcattcccttttgcccccacaatcccacgttcgccttgcctcctttttcttcttggcctaaattttattctttttctctctcacacacacaaatatatcagtataccgttctccttttattagtgccagtatgtaatggcatgttcggctgcctttctagcagatttttattttagtcttttttctaaaactgttattgttgttacttgacttcaattatcaaaaatcaaggcaatataagttaaat

SEQ ID NO: 2370 - DNA, 1188 bp, Zea Mays
cttattttgtgccaatattaaaacagtttttttcctgttcgcaaaggatttcctataagctgtactaatgttgcaagcccagagttccttagccgaggcagccaccgcttctggtgtggctcttcccaaaggtccgatcgacgtggcgaagcatgttgtccgggacgccggcgccaaaggtctcttcaagggcctggtcccgacgatgggacgcgaggtccctggcaacgcactgatgttcggcgtgtacgaagccacgaagcagtacctggccggcggcccggacacgtcgggcctcggcaggggctcccaggtcctggcgggcggcctcgccggcgccgccttctggctgtccgtgtacccgacggacgtggtgaagagcgtgatccaggtggacgattacaagaagcccaagtactccgggtccctcgacgcgctgaggaagatcgtggcggctgatggggtgaagggcctgtacaaggggttcggacccgccatggcacgcagcgttccagccaatgccgcgacattcgtggcctacgagatcacgagatcggcgcttggttgatttgattggtgctggcctttgccatggccctttgcagtttattcattctccttgcgcggctggagcaacgcgaacaatgcgagacaattttagggaggaaagagagagagaaacttttcacttcaatgatgagattctttaatgaagcaaagcttactaaaagtttgttcatgtggagccacagagtgagtggttggtgacagataagtaatactggccttgtcgtaatggttggttggcctggactagagtgggcatccgacggtgatccgatggcgcgcgagtccgactggtggtgcttgtgatggtgagctgtgtggcccatggttttgttggcgtctggtggtgggtggccctcgtcagctcgcattcggcattcccttttgcccccacaatcccacgttcgccttgcctcctttttcttcttggcctaaattttattctttttctctctcacacacacaaatatatcagtataccgttctccttttattagtgccagtatgtaatggcatgttcggctgcctttctagcagatttttattttagtcttttttctaaaactgttattgttgttacttgacttcaattatcaaaaatcaaggcaatataagttaaat

SEQ ID NO: 2371 - DNA, 745 bp, Zea Mays
atcgccacttgcgcttgccgccttgctgttgccgtgcccgacgccccgactgcccgtgcactgtgcgcaccgtccaggttccggccagttgccagccgccccgccgcccgccagttgccagccggcagctcaaccagcagagcagtagatcgagcgccagtccagatttaaaaataaagaggaagaacaatgctaccactgatttgagagctttttagcaaaagctgctgcaaaaaagaaggatattgttgctccatcttccaatgaaagagagatgcaattggtgatattttaaagacagaccgaaactagtaatgcaacacccgcagaacaagagagagttgagcctaaacctccaataatagtagatgctgaagacgatgatgattttgaatcagtgcacttaaatgggacagcatcaaatgaggataatgatagtgatgataatgatatttatggcattgagcatgatcctggattgagactccaatctcaagctattccattaatattcaagatgcagttagaagggcctatattgcattagggtcatgtcgaccaaagatgaagaaggatgattgttggggacttgttcttaactgctacaaattaagaacaaggcaacacagaaattgttaaatgttatagtccttcgtcctccgaagcattattttccttgggatttaatggattccggacgaaggttattaaggacataccttcataatcgcaacaaaaaatgaag

SEQ ID NO: 2372 - DNA, 5934 bp, Zea Mays
cacacatgtttaacgtcgtcgccgcacaggcacagaagctcccctcgcctgcggtcactgcatggtcgaatttgccccttgtgctttcctctccttcctgcaaggagtcgagacgagacatcatcccttctctctccacatctctcgaccccgacctcgctcgccgtctcttccctgcccctgcccctgccccctcagctgcgatctccctccctcccccgaatcgctgaatttttctcactcctcctccttcccatctcggatcgactccaagacgccgagcccactttggtgacccagccccgaaatccccaatcgagctcgaccggaacccgtcgattccgccggattcgacctcccgccggtgaggcggttcgcctgaatcggccgattggacccgaattcgggtgttccggatgcgctcagagcggaggcttgcggatctagggttccggagggcctagggttgctgccggcgatctggtgatggtggtgcggcgcggtgccggagctcggcgaggagggttcggcagcgacgttggagaagatgcagcgagccggatatgcatgggtggcgcggcgctgaggggtgcgacgtcaggaggcggcgtctcgttcggctcatgtggccagcggcacgcgtagaggcagaagctccaccaccaccggcacaaggaccagctacttctccttctggttcatctgctacccatcctcggactacttatcggccggaatcgagtgcgcagaagcaggagtgcatcgatcttccctgcccagtgtcatctgattcctttgtaaaggacgggcgtgagattagagttggcgattgtgctctttttcgggctgtcgatgtccctccattcattggattgatacgttggattgagaagaaggaagaaggctatcccaaattacgtgttagttggctttatagacctaacgacgtgaagcttaacaagggtatacaactcaacgctgcaccaaacgagatcttctactctttccaccaggacgaagcatctgctgtttctctgctgcatccttgcaaagttgcctttttacggaaaggtgttgagctaccagctggaattgcttcatttgtatgttggcgcgtgtacgatattgacaacaagtgcttatggtggcttactgaccgggactatattaatgaacggcaggaagaagtaaatcgccttctatacagaacaaggctagaaatgcgtgccgcattacaatcaggtggacgctctccaaagcgcttaaatagtccttcagcttcccagcaactgaagactgcttcagatggtacacagaatggtggtttgtctagaggaaagaagagagagagaagtgaacagggagttgatccagccaagcgggatcgtgatcgtctacttaaggttgatgacggtgagcctggaagctttaacttggatgatattaagtccgaaatagcaaagataacagaaaaaggtggacttccaaatgcagaagcagttgcaaaacttgtacatcttatgcaacttgatcgaactgagcagaagatagaccatagtggtcgggttatacttgctgatgttattgctgctacagatagtcccgattgcctcggcagatttgtccaatcaaggggccttcccgtgttggacagttggcttcaagaggcccacaaagggaagtctggtgatgggagtagtcctaaagaagcagataagcctattgatgaacttctcttggccctgcttcgtgcactagctaaattgcctattaatctcagtgcattacaaagttgtagcattgggaaatctgtcaatcatctgcgcagccataaaaatctggagattcaaaagaaagctaagtgtcttgttgagaactggaagaagcgtgttgatgctgagatgaagtcaaatgatgtgaagcctttagtttcaggtcaatctgtttcctggtcaggaaaagcaggttttcaagaaatttcaaatgttggaaccaaacgaggtggctcaagtgagaacagtccaaaaaattcagtgcccactctttcatcatcaaaagttttgactgataaacctgggggcacagatgctgcagcgaagttgaatcctggggtatctgcattgtcaaatttacaacatgtgcaatcaacacatgttactaccaacttgaaggagcagccctgcaaatcaactggtgggactggctgtcctgagctgcctactgtaaaagaggagaaaagcagcagttcaagccaatcgccgaacaacagccagtcaatatctagtgagccatcgaaggatgcaagaagttcaactgctgcttctggtggtgctagtaaaacttctggaagctcttcacggagccatcgaagggcaaacaatggtcttgtttcagggaacctgaaggaaccttctgtaggaagatctgtctcccttgatcgatcattgctgcaggataagtcatcccaaactggtacagcttctgaaaaaggaattgatatgccatctgatcatggaaataatcatagattgattgttcgctttccaaatcctggtcgtagtcctgctagaagtgcaagtgctggatcttttgatgacccatctgttactgggggtagagcttcatctcctgtggttgcagataggcatgatcagactgagcgcagggtgaaagtgaagactgaaaattctcggcctcatttagcatctgatgctaatgcagagtcctggcacagcaacgacattaaaggagctactggttcggaggaaggtgataaatcaccatgtgctatattagatgatgacaacagcaggacacctgatcattctgttaaggatgcacatgcatcgcgagctgcgtgctcgtcatatatgaatgaaaaaggtgtcagtgaaactaaggtgggaacctcattcagcccaatgaatgctcttattgaaatcaagtactctgaagctagtcattcactgcaagctggagatgacacagctatgaatcttcttgctagtgtggcaggagaaatatctaaatctgaattggcttcttcaccaagtacttctgtaaagaaattggtctgtgagggtgtcaatactggaaaggttaaagtagaaagtgacatgggcccatcacatccagggcaagcagatgctaagaaagttgccatggggaatgaagtgaaaaatgatgcttgtttggttccgaaggaggaacaacatcaaactgcgccatctcctgagctagcagattcaaaagcagttaaatcttcagcaaagattgaaatccatgaagggcatgcaaacaaatgcaactcccagcatgcttcaattgattccaaaggcgaaaatcgggatggctgtactgcccatgggaaagttgaagatggcagtacaaacaaggatggtgccatggaatctgcattcggcagccagcgtagcttggttgtttccagtaaaaattcaagattggttcttgctggggaatcttcattgtctgctgctgataaacaaacacagggtctgttaaaatcaactaatcataagcatcttctgagtgtatcggacaacccaggagcctttgatagacatgacagtatggctggaaaattagatttgatggctgcagaggtgaaaaaagctgatgtcgtgggcaatagtagtgtattgcagaatgacactgaaaagaaggaacatgtttctccctcttcggctgatgttccaaaactagtaccagcagcgtccccagttggtgtggcaaatgggaataatgagatgaaagaatcaaacggcagttcaagtgaatccaatagccatgtaaaatctgaaggtgtcaattctcagcaaagcgagcaaagtgcaaagcagagttcaaagaaatccagtgatggtgtgtgcggaaaagaagaccatgtcttatcagacgaagaaggttcttctctagccgctcacaccaagtcaaatgctacagccaagcttgattttgacttgaatgaaggaatacctggggatgatgggcatcagtctgagacaactgcctcacctgttgtatgttcctcagcaatccatttaactgggcttttgccattcacttcgcctactacaagtgggttgccgccagctccaataacagtagctgctccagctaaaggaccctttgttcctcctgaaaacctactaagagcaaagccagagatcgggtggaaaggttcagcagctacgagtgcatttcgccctgctgaaccaaggaagattttggagatgcctgctgccacacgtgacattccagtatctcatgctgctgggaagcagtctcgtcccacgcttggtttcgatttgaatgttgcagatgaccaagctctcgaggaagattttccacagagttctgcacagactacctgttcagaatctggaaatacgagaagtcgagatggctcgtcacgaagtgctggtattgaacttgatctgaacagagctgatgaagttgcagacaatggccaatttgtaccaaatgcttcacacagagttgaagtcccattgttttcgacgagatcgttacctagagttttatctaatgctggcgcaaatagctcaagggactttgatcttaatagtggacccgacctttatgatgttggcactgaacctgcaccaaggagcctaccttctaaaaatacaagcagtattcaattcctaccacaagttcctgttaggatgaatagtgatgccatgagtaataatatatcaccatggcttgtctctaccagtccttgtggtccagtagctatacagtcttttttaccatctagagaacagccttacccattggaggcagcacctggagcccagcggattattgcgcctacagctgatggtggccaatttggaggtgatccctgcaggcctccagttatttcaacgtctccagcgatggtttttcatccgcctgcatatcagagttccatattttccaactctttcctcctctcttgttgggccagccggagcgttgccttcccaacattcaaggcagtatgccataaatcttgctgagggtagcagcagtagtgtacgtgacggtaatcggaaatgggaaagtcagggccttgatcttaactcaggccctggaagtatagatttagaaggaaaggatgaacggatgcctttaccagtcagacaaaatttgatcccacccctacatggctttgtggaggatcaaggaagaatttaccaaatgccagttgtaggaacaaagagaaaggaacctgatggcagttgggactcagaaaggtctacatacaagcagttaccatggcaatgagggctctgaaggagatcattttgcaccgactggtctgcgaatgagcatatcacctgcatgtagagcttggccggtgtgttcttcagtcactggactacactcaggggattcagccccatgacgatggcgtgggattgaggaaagcgaaaacttcctgtaattgttgtagattttttcttagctgttaggcttttggttctaatttactcaggagggtatggctgcggtggaggaatctttgtgatcctgagctctgtggccgctgtaattagaccgtccgctctgtttgttggtgataaactgttgagcacatgctggagctttacataagaatttagatgtggccttgttccttgttggggaagcgttacgtcagctgaccatatatatacactggtgcaacgtacagctctagttgctacaccatgtatcttgggttgcagtgcagctgtatgtataagaattctagtagatgagcagctataactttttttctctctttgacaccgaatccatctgcatctggtttactcctgatgctctttttttttggagagatgactagcagatacgaacgagaacagtgaattgtgattttcgtttgatttgtgttggatccgg

SEQ ID NO: 2373 - DNA, 6019 bp, Zea Mays
agaagctcccctcgcctgcggtcactgcatggtcgaatttgccccttgtgctttcctctccttcctgcaaggagtcgagacgagacatcatcccttctctctccacatctctcgaccccgacctcgctcgccgtctcttccctgcccctgcccctgccccctcagctgcgatctccctccctcccccgaatcgctgaatttttctcactcctcctccttcccatctcggatcgactccaagacgccgagcccactttggtgacccagccccgaaatccccaatcgagctcgaccggaacccgtcgattccgccggattcgacctcccgccggtgaggcggttcgcctgaatcggccgattggacccgaattcgggtgttccggatgcgctcagagcggaggcttgcggatctagggttccggagggcctagggttgctgccggcgatctggtgatggtggtgcggcgcggtgccggagctcggcgaggagggttcggcagcgacgttggagaagatgcagcgagccggatatgcatgggtggcgcggcgctgaggggtgcgacgtcaggaggcggcgtctcgttcggctcatgtggccagcggcacgcgtagaggcagaagctccaccaccaccggcacaaggaccagctacttctccttctggttcatctgctacccatcctcggactacttatcggccggaatcgagtgcgcagaagcaggagtgcatcgatcttccctgcccagtgtcatctgattcctttgtaaaggacgggcgtgagattagagttggcgattgtgctctttttcgggctgtcgatgtccctccattcattggattgatacgttggattgagaagaaggaagaaggctatcccaaattacgtgttagttggctttatagacctaacgacgtgaagcttaacaagggtatacaactcaacgctgcaccaaacgagatcttctactctttccaccaggacgaagcatctgctgtttctctgctgcatccttgcaaagttgcctttttacggaaaggtgttgagctaccagctggaattgcttcatttgtatgttggcgcgtgtacgatattgacaacaagtgcttatggtggcttactgaccgggactatattaatgaacggcaggaagaagtaaatcgccttctatacagaacaaggctagaaatgcgtgccgcattacaatcaggtggacgctctccaaagcgcttaaatagtccttcagcttcccagcaactgaagactgcttcagatggtacacagaatggtggtttgtctagaggaaagaagagagagagaagtgaacagggagttgatccagccaagcgggatcgtgatcgtctacttaaggttgatgacggtgagcctggaagctttaacttggatgatattaagtccgaaatagcaaagataacagaaaaaggtggacttccaaatgcagaagcagttgcaaaacttgtacatcttatgcaacttgatcgaactgagcagaagatagaccatagtggtcgggttatacttgctgatgttattgctgctacagatagtcccgattgcctcggcagatttgtccaatcaaggggccttcccgtgttggacagttggcttcaagaggcccacaaagggaagtctggtgatgggagtagtcctaaagaagcagataagcctattgatgaacttctcttggccctgcttcgtgcactagctaaattgcctattaatctcagtgcattacaaagttgtagcattgggaaatctgtcaatcatctgcgcagccataaaaatctggagattcaaaagaaagctaagtgtcttgttgagaactggaagaagcgtgttgatgctgagatgaagtcaaatgatgtgaagcctttagtttcaggtcaatctgtttcctggtcaggaaaagcaggttttcaagaaatttcaaatgttggaaccaaacgaggtggctcaagtgagaacagtccaaaaaattcagtgcccactctttcatcatcaaaagttttgactgataaacctgggggcacagatgctgcagcgaagttgaatcctggggtatctgcattgtcaaatttacaacatgtgcaatcaacacatgttactaccaacttgaaggagcagccctgcaaatcaactggtgggactggctgtcctgagctgcctactgtaaaagaggagaaaagcagcagttcaagccaatcgccgaacaacagccagtcaatatctagtgagccatcgaaggatgcaagaagttcaactgctgcttctggtggtgctagtaaaacttctggaagctcttcacggagccatcgaagggcaaacaatggtcttgtttcagggaacctgaaggaaccttctgtaggaagatctgtctcccttgatcgatcattgctgcaggataagtcatcccaaactggtacagcttctgaaaaaggaattgatatgccatctgatcatggaaataatcatagattgattgttcgctttccaaatcctggtcgtagtcctgctagaagtgcaagtgctggatcttttgatgacccatctgttactgggggtagagcttcatctcctgtggttgcagataggcatgatcagactgagcgcagggtgaaagtgaagactgaaaattctcggcctcatttagcatctgatgctaatgcagagtcctggcacagcaacgacattaaaggagctactggttcggaggaaggtgataaatcaccatgtgctatattagatgatgacaacagcaggacacctgatcattctgttaaggatgcacatgcatcgcgagctgcgtgctcgtcatatatgaatgaaaaaggtgtcagtgaaactaaggtgggaacctcattcagcccaatgaatgctcttattgaaatcaagtactctgaagctagtcattcactgcaagctggagatgacacagctatgaatcttcttgctagtgtggcaggagaaatatctaaatctgaattggcttcttcaccaagtacttctgtaaagaaattggtctgtgagggtgtcaatactggaaaggttaaagtagaaagtgacatgggcccatcacatccagggcaagcagatgctaagaaagttgccatggggaatgaagtgaaaaatgatgcttgtttggttccgaaggaggaacaacatcaaactgcgccatctcctgagctagcagattcaaaagcagttaaatcttcagcaaagattgaaatccatgaagggcatgcaaacaaatgcaactcccagcatgcttcaattgattccaaaggcgaaaatcgggatggctgtactgcccatgggaaagttgaagatggcagtacaaacaaggatggtgccatggaatctgcattcggcagccagcgtagcttggttgtttccagtaaaaattcaagattggttcttgctggggaatcttcattgtctgctgctgataaacaaacacagggtctgttaaaatcaactaatcataagcatcttctgagtgtatcggacaacccaggagcctttgatagacatgacagtatggctggaaaattagatttgatggctgcagaggtgaaaaaagctgatgtcgtgggcaatagtagtgtattgcagaatgacactgaaaagaaggaacatgtttctccctcttcggctgatgttccaaaactagtaccagcagcgtccccagttggtgtggcaaatgggaataatgagatgaaagaatcaaacggcagttcaagtgaatccaatagccatgtaaaatctgaaggtgtcaattctcagcaaagcgagcaaagtgcaaagcagagttcaaagaaatccagtgatggtgtgtgcggaaaagaagaccatgtcttatcagacgaagaaggttcttctctagccgctcacaccaagtcaaatgctacagccaagcttgattttgacttgaatgaaggaatacctggggatgatgggcatcagtctgagacaactgcctcacctgttgtatgttcctcagcaatccatttaactgggcttttgccattcacttcgcctactacaagtgggttgccgccagctccaataacagtagctgctccagctaaaggaccctttgttcctcctgaaaacctactaagagcaaagccagagatcgggtggaaaggttcagcagctacgagtgcatttcgccctgctgaaccaaggaagattttggagatgcctgctgccacacgtgacattccagtatctcatgctgctgggaagcagtctcgtcccacgcttggtttcgatttgaatgttgcagatgaccaagctctcgaggaagattttccacagagttctgcacagactacctgttcagaatctggaaatacgagaagtcgagatggctcgtcacgaagtgctggtattgaacttgatctgaacagagctgatgaagttgcagacaatggccaatttgtaccaaatgcttcacacagagttgaagtcccattgttttcgacgagatcgttacctagagttttatctaatgctggcgcaaatagctcaagggactttgatcttaatagtggacccgacctttatgatgttggcactgaacctgcaccaaggagcctaccttctaaaaatacaagcagtattcaattcctaccacaagttcctgttaggatgaatagtgatgccatgagtaataatatatcaccatggcttgtctctaccagtccttgtggtccagtagctatacagtcttttttaccatctagagaacagccttacccattggaggcagcacctggagcccagcggattattgcgcctacagctgatggtggccaatttggaggtgatccctgcaggcctccagttatttcaacgtctccagcgatggtttttcatccgcctgcatatcagtatgcaggattctctttccctccaagtgttcaccttcaaacaccagcattttcaattggatcagcaacatttaataattctgcatctgcaggagttccatattttccaactctttcctcctctcttgttgggccagccggagcgttgccttcccaacattcaaggcagtatgccataaatcttgctgagggtagcagcagtagtgtacgtgacggtaatcggaaatgggaaagtcagggccttgatcttaactcaggccctggaagtatagatttagaaggaaaggatgaacggatgcctttaccagtcagacaaaatttgatcccacccctacatggctttgtggaggatcaaggaagaatttaccaaatgccagttgtaggaacaaagagaaaggaacctgatggcagttgggactcagaaaggtctacatacaagcagttaccatggcaatgagggctctgaaggagatcattttgcaccgactggtctgcgaatgagcatgtatgtagttgattcaaacttttgagatcacctgcatgtagagcttggccggtgtgttcttcagtcactggactacactcaggggattcagccccatgacgatggcgtgggattgaggaaagcgaaaacttcctgtaattgttgtagattttttcttagctgttaggcttttggttctaatttactcaggagggtatggctgcggtggaggaatctttgtgatcctgagctctgtggccgctgtaattagaccgtccgctctgtttgttggtgataaactgttgagcacatgctggagctttacataagaatttagatgtggccttgttccttgttggggaagcgttacgtcagctgaccatatatatacactggtgcaacgtacagctctagttgctacaccatgtatcttgggttgcagtgcagctgtatgtataagaattctagtagatgagcagctataactttttttctctctttgacaccgaatccatctgcatctggtttactcctgatgctctttttttttggagagatgactagcagatacgaacgagaacagtgaattgtgattttcgtttgatttgtgttggatccgg

SEQ ID NO: 2374 - DNA, 4777 bp, Zea Mays
cttactgaccgggactatattaatgaagaagtaaatcgccttctatacagaacaaggctagaaatgcgtgccgcattacaatcaggtggacgctctccaaagcgcttaaatagtccttcagcttcccagcaactgaagactgcttcagatggtacacagaatggtggtttgtctagaggaaagaagagagagagaagtgaacagggagttgatccagccaagcgggatcgtgatcgtctacttaaggttgatgacggtgagcctggaagctttaacttggatgatattaagtccgaaatagcaaagataacagaaaaaggtggacttccaaatgcagaagcagttgcaaaacttgtacatcttatgcaacttgatcgaactgagcagaagatagaccatagtggtcgggttatacttgctgatgttattgctgctacagatagtcccgattgcctcggcagatttgtccaatcaaggggccttcccgtgttggacagttggcttcaagaggcccacaaagggaagtctggtgatgggagtagtcctaaagaagcagataagcctattgatgaacttctcttggccctgcttcgtgcactagctaaattgcctattaatctcagtgcattacaaagttgtagcattgggaaatctgtcaatcatctgcgcagccataaaaatctggagattcaaaagaaagctaagtgtcttgttgagaactggaagaagcgtgttgatgctgagatgaagtcaaatgatgtgaagcctttagtttcaggtcaatctgtttcctggtcaggaaaagcaggttttcaagaaatttcaaatgttggaaccaaacgaggtggctcaagtgagaacagtccaaaaaattcagtgcccactctttcatcatcaaaagttttgactgataaacctgggggcacagatgctgcagcgaagttgaatcctggggtatctgcattgtcaaatttacaacatgtgcaatcaacacatgttactaccaacttgaaggagcagccctgcaaatcaactggtgggactggctgtcctgagctgcctactgtaaaagaggagaaaagcagcagttcaagccaatcgccgaacaacagccagtcaatatctagtgagccatcgaaggatgcaagaagttcaactgctgcttctggtggtgctagtaaaacttctggaagctcttcacggagccatcgaagggcaaacaatggtcttgtttcagggaacctgaaggaaccttctgtaggaagatctgtctcccttgatcgatcattgctgcaggataagtcatcccaaactggtacagcttctgaaaaaggaattgatatgccatctgatcatggaaataatcatagattgattgttcgctttccaaatcctggtcgtagtcctgctagaagtgcaagtgctggatcttttgatgacccatctgttactgggggtagagcttcatctcctgtggttgcagataggcatgatcagactgagcgcagggtgaaagtgaagactgaaaattctcggcctcatttagcatctgatgctaatgcagagtcctggcacagcaacgacattaaaggagctactggttcggaggaaggtgataaatcaccatgtgctatattagatgatgacaacagcaggacacctgatcattctgttaaggatgcacatgcatcgcgagctgcgtgctcgtcatatatgaatgaaaaaggtgtcagtgaaactaaggtgggaacctcattcagcccaatgaatgctcttattgaaatcaagtactctgaagctagtcattcactgcaagctggagatgacacagctatgaatcttcttgctagtgtggcaggagaaatatctaaatctgaattggcttcttcaccaagtacttctgtaaagaaattggtctgtgagggtgtcaatactggaaaggttaaagtagaaagtgacatgggcccatcacatccagggcaagcagatgctaagaaagttgccatggggaatgaagtgaaaaatgatgcttgtttggttccgaaggaggaacaacatcaaactgcgccatctcctgagctagcagattcaaaagcagttaaatcttcagcaaagattgaaatccatgaagggcatgcaaacaaatgcaactcccagcatgcttcaattgattccaaaggcgaaaatcgggatggctgtactgcccatgggaaagttgaagatggcagtacaaacaaggatggtgccatggaatctgcattcggcagccagcgtagcttggttgtttccagtaaaaattcaagattggttcttgctggggaatcttcattgtctgctgctgataaacaaacacagggtctgttaaaatcaactaatcataagcatcttctgagtgtatcggacaacccaggagcctttgatagacatgacagtatggctggaaaattagatttgatggctgcagaggtgaaaaaagctgatgtcgtgggcaatagtagtgtattgcagaatgacactgaaaagaaggaacatgtttctccctcttcggctgatgttccaaaactagtaccagcagcgtccccagttggtgtggcaaatgggaataatgagatgaaagaatcaaacggcagttcaagtgaatccaatagccatgtaaaatctgaaggtgtcaattctcagcaaagcgagcaaagtgcaaagcagagttcaaagaaatccagtgatggtgtgtgcggaaaagaagaccatgtcttatcagacgaagaaggttcttctctagccgctcacaccaagtcaaatgctacagccaagcttgattttgacttgaatgaaggaatacctggggatgatgggcatcagtctgagacaactgcctcacctgttgtatgttcctcagcaatccatttaactgggcttttgccattcacttcgcctactacaagtgggttgccgccagctccaataacagtagctgctccagctaaaggaccctttgttcctcctgaaaacctactaagagcaaagccagagatcgggtggaaaggttcagcagctacgagtgcatttcgccctgctgaaccaaggaagattttggagatgcctgctgccacacgtgacattccagtatctcatgctgctgggaagcagtctcgtcccacgcttggtttcgatttgaatgttgcagatgaccaagctctcgaggaagattttccacagagttctgcacagactacctgttcagaatctggaaatacgagaagtcgagatggctcgtcacgaagtgctggtattgaacttgatctgaacagagctgatgaagttgcagacaatggccaatttgtaccaaatgcttcacacagagttgaagtcccattgttttcgacgagatcgttacctagagttttatctaatgctggcgcaaatagctcaagggactttgatcttaatagtggacccgacctttatgatgttggcactgaacctgcaccaaggagcctaccttctaaaaatacaagcagtattcaattcctaccacaagttcctgttaggatgaatagtgatgccatgagtaataatatatcaccatggcttgtctctaccagtccttgtggtccagtagctatacagtcttttttaccatctagagaacagccttacccattggaggcagcacctggagcccagcggattattgcgcctacagctgatggtggccaatttggaggtgatccctgcaggcctccagttatttcaacgtctccagcgatggtttttcatccgcctgcatatcagagttccatattttccaactctttcctcctctcttgttgggccagccggagcgttgccttcccaacattcaaggcagtatgccataaatcttgctgagggtagcagcagtagtgtacgtgacggtaatcggaaatgggaaagtcagggccttgatcttaactcaggccctggaagtatagatttagaaggaaaggatgaacggatgcctttaccagtcagacaaaatttgatcccacccctacatggctttgtggaggatcaaggaagaatttaccaaatgccagttgtaggaacaaagagaaaggaacctgatggcagttgggactcagaaaggtctacatacaagcagttaccatggcaatgagggctctgaaggagatcattttgcaccgactggtctgcgaatgagcatatcacctgcatgtagagcttggccggtgtgttcttcagtcactggactacactcaggggattcagccccatgacgatggcgtgggattgaggaaagcgaaaacttcctgtaattgttgtagattttttcttagctgttaggcttttggttctaatttactcaggagggtatggctgcggtggaggaatctttgtgatcctgagctctgtggccgctgtaattagaccgtccgctctgtttgttggtgataaactgttgagcacatgctggagctttacataagaatttagatgtggccttgttccttgttggggaagcgttacgtcagctgaccatatatatacactggtgcaacgtacagctctagttgctacaccatgtatcttgggttgcagtgcagctgtatgtataagaattctagtagatgagcagctataactttttttctctctttgacaccgaatccatctgcatctggtttactcctgatgctctttttttttggagagatgactagcagatacgaacgagaacagtgaattgtgattttcgtttgatttgtgttggatccgg

SEQ ID NO: 2375 - DNA, 673 bp, Zea Mays
ctccttcctccctctgctggaccgcgtcccccatggcgctcggtcgcccggccaccgattcctcctccagctccggcgccgtgaagctcccatggtgctcctccctgccgcgtacagctcggatctcgccatagtctgctgctcccccggccgtggccgccgagttctttccccagccatggagctcggtcctggcttctctgctggacgcgcgtcttcttcttcaatcttcctgcacgcgcgttccgttgttcctgcgcgtgctgccatgaagttctcgtctctcgcgttgttgtgcgcgaagttctttgctcgccatgacgtgtcgagcttccgcgccgagtttctctctttcgtaccggttgaacgtctttgatgctcgcctcgacgtcatcttgctcgtgcaacgcttgcttggtgctcgacaaaatggctgaatcaagaccatcgtcgttctcgcgatcatcaagctcggtttagtgtggtacgttaattaatcgcgcgatgcggaagacgagccaagtcgacctcaagcgcgggctaatccgtatggtgatgctgatggacagatgaagcaagtatcagaacaaaagatggttgccaagtgatcgacgtctaacaaacaataacgtagtgtttatccaaggcaagccccggtgcatgcaaccccttc

SEQ ID NO: 2376 - DNA, 593 bp, Zea Mays
ctccttcctccctctgctggaccgcgtcccccatggcgctcggtcgcccggccaccgattcctcctccagctccggcgccgtgaagctcccatggtgctcctccctgccgcgtacagctcggatctcgccatagtctgctgctcccccggccgtggccgccgagttctttccccagccatggagctcggtcctggcttctctgctggacgcgcgtcttcttcttcaatcttcctgcacgcgcgttccgttgttcctgcgcgtgctgccatgaagttctcgtctctcgcgttgttgtgcgcgaagttctttgctcgccatgacgtgtcgagcttccgcgccgagtttctctctttcgtaccggttgaacgtctttgatgctcgcctcgacgtcatcttgctcgtgcaacgcttgcttggtgctcgacaaaatggctgaatcaagaccatcgtcgttctcgcgatcatcaagctcggtttagtgtggtacgttaattaatcgcgcgatgcggaatacgagccaagtcgacctcaagcgcgggctaatccgtatggtgatgctgatggacagatgaagcaagtatcagaacaaaag

SEQ ID NO: 2377 - DNA, 5220 bp, Zea Mays
ctctgaagctagttacagctactgcatttttcagcataagtaatcgtcaccatcacaaaggattctacgtgcaatgttaattacaaagctgacaacgtcaggttgctgagtgtattatgaatacttagtccttaaatgttacatggtttgctacatcaaaatttaatttccgagcagccgatgcatcttgatcaactccaagcagaagcctggtgtatcctccttgcattaatggagcctccattgatgaaaaatccacatacatattgttggtgaaagcatttgatattcccatattagcattattgctctggctcaaattttttggatcatgttcatgctctctattgtctgttactttgcttaaaccttctcctgtgtcatacacaaaaatgacagaaataaatcactatcaacaatattagaataagatttggcgggcatagtgatgagtacctttctcctgagaaaatttcttttttttccatgctttcttttcaactatattctttgctcgcttactttttgcacctttaatcacacgaggaactcgaaatgatatggcactttttattatatctacattggagtcatttaaaaccataggaatatcatttactctcgaagaagatagagatgccataggaacatcattttctctcagattacttagagaagcatctgattccatctccaacttctctaatgctttctctaaataatcaagaagtggccttgacactgagcacttcaatgcaagggatgttgcctttcgagacatgcgtgcagcatgtgctttcaaggtttcattctgatttgtttttctttcaatatgaaatcccttttttgcatattttgtccacctatttaatatatatttcggtggtaaaatgaaaacatcgttcatattaaatactttgaaggcatgcttgcacaatatacctatggattcaaacttcctgcaagaacatgtaatggtcaaatctgcaacattgaatgttactgttgctccataatttgaatgcatatgtgtaaccatgaatgttgatattgacccctcagattgtaacaatttacatgaatatgaaaactgacatttaaattcttcctcaaactccatatacatcctccttgtatatgattcagcagcatacttcaacaaaggtaaattttggatgtaattaactggattcttcatacgtgatttgaaatcttcatccaactcattttcgcgaagagaagcagaaaccttctcgcattcgacgatgagttcggaaagcccaagtttcctacggaatctcttcttaaatacattattcataccttcactcctttgagtagttgtcatatccgctgtaaaagagtcacgataaacagcagcccacttttctcttaaattatatagatttagcatccacaagttctcctcaaggctatattcaatcaacagttcattccacttccttttgaaacaatcctctgatctatcttcatagacacaatttttaaatgcaggtagaaacttcttaggatggttatgaatgatatgacttagatgtttagcggcattaagataaatatgccataaacaaagtcgatgtcttgtatttgggaacacataagcaattgcacatgccatggctgcatcttgatcagtgaaaattgtacttggatgtttccctgacattgctgtcaaaaaggtttgaaagagccaaacaaatgattcaatagtttcattaaataacagtgcagccccaaagactattgtctgcttatgatggttggttccaagtagtggagcaaaaggcatttcaaacttatttgtttgaaatgtggtgtcaaatgaaacatcatctccaaagcatgcataatctaatatagattgaccatcagcccaaaagaaattagctatccgaccatattgctcaccttcttccaaatctatttcaatggcataaaaaaatgcatgatcctctatttgcttattcttcaagtattccaatagtgtttgtgcatcattggattctaaatatttctttcgttcgcgaccgatctcattattacaatccatcctcgagaatggaactttatcagcacctccataaaattgcttcataaattcatacacttgcgttggtctcattccagcttcccgtatttggctaatgagttgtctgtccgcttcaataacatgtcgttgggaccttaacttgtgtgccttgttcggactagcgagggtatgattgtgttcaagttcaactttttgcactgtccaaaccccttccctgctaatgctaaactggacacgagctttgcaacctgtccttgtagttgattgtgatggctcattttttctattaccttggttgctgcaaactatatgtttctgaaatatagttttatctggtcgacgtcttgtatcactctttctaatactaaacccaaccatacatgcataagcattgtacatctcataagcttctttctcagagtcaaaatacattcctactttaggaacaatcacagctggtccaactggatcaaccttctattgcaaaatacgtttagaataaagtcacgttacaacagtacggaaatttattgcaaaatacgtttagaataaaatcaccttatatgtcaccacttctggaatcgtgttctccttgccttgaatgttagtatcgatagcgccaacaatatttacttcggtgtttatacactcaatgttctatgcaaatgtgggaattacagtcaaatagacaaactaaatagacggaaaaagtacaatgatcaaaagaactaatgatgacagtacctgcagtgtcgcctcttcatgatcagatggatcgacgatttgggtagggacgtcacatagcaagggttgcagctgggacatgatattcgtggtggcggcggcaggatcgctgtactcttccatggatgcaatcgtccctctagggctgtgtgtttgcggtacgcaaggaatggcggcgctcgtttgtgtagggcatgaaaaaaagtagatggcttatttgcttgtacggctggcagctggctccaaacgttggctccttttaacattaaattagtgtggccagccgatccgaaagattgctttgagattaataaatgaacacgtggcatcaatccggtaagtgctgcacagatatcgctctgcagcacgcatgtatggaattttttccctcgaggtcgagctactaccatccatctctccccattgcatgcgaaacaagaaagcaagaggccaagaggagcagagtgagtgagtggcgtttggtgtgaaatgtggacttggacctggaaggaggacgaagcgggtcatggaatgtgctgggaggagaaggacaaggtctctgatcagctcagcttgtctggtcaaagctgagagcctcgttgtgctgtgagtgcaagctcgaccgacaggacccctgccactgtgaagcacagcgtcagcggcgacaagacgaaggggcggaagctgccaagccgatagatctacgcaaatggagaccaaggacgtgtcgccgctcgccgccgccaccaccaccaccgcggcgcccgtgcctgcaccgacctctcaaccgcctccgccggccccttcttctatggcgccgccgcagcaccagcaccagcaccatccgccgccgccgttcgcgcagcaggcggccccggttccgtcgcctgccgcgtccatgcccggcggcatgcggctctcgttcgaccagatgtccgggaaggcgcccggggagcagcaccaccactccgcgcccatgctgtacacggtgccaccaccgcagtccgccgcgggcgcgggcgcaccgggggccaatgtgctgggcatgggcgagctgatgcgcaagaagcgcggccggccgcgcaagtacgcgcccgacgggagcatggctctggcgctggcccccatctcctccgcctcagccggcggcgccgcagcccccggacagcagcagcacggcggcgggttctccatcagcagccccccgtccgaccccaacgccaagcgccgcggccggcctcccggctctggcaagaagaagcagttcgaagccttgggctcctggggcatcgccttcacccctcacatcctcaccgtcaaggccggcgaggatgttgcttcaaaaataatgacattctcacagcaaggccctcgcacagtctgcatcctttccgcgaatggtgcaattagtaatgttacacttcggcagccagccacatctggtggactagttacttatgaggggcgctttgagataatctcgctatctggttctttcctgcttgcggaggatggtgatactcgcagcaggactggtggcttgagtgtcgcacttgcaggatctgatggccgagttcttggagggtgtgttgctggaatgcttatggctgcaactcctgttcaggttgtggtggctagctttatcgcagagggaaagaaatcaaagccagcggaagcacggaaggttgaaccgatggctgctcctccaccgcagatggctacctttgttccacctccgctggccaccagccctccatcggagggaacatccagcgcatcatctgatgactctggcagcccaatccaccacagtgcgatgccgttcagcaactccagccagcatcaacaccctcaccagcaccagcaccagcacatgccgcctgcctacgcatccgggggttggtccctctcagtgcaccagcagaataggcatgattctgacatgaagatgatgtcgaactaacagtgctcaacctaggcgtcccatttgttggttgggctggagaggaaggaagctgctgatggttggtactgccgctatgaaatggtcttcttgcgccgtctgtcctgatcagtgaccccgtgttgctctggtcaatgacggtgtgtctgctatagctaagatagctaggaaggattagagtttatgggctcacttgctgttgttcccctgggtaagattaatttaatttgaattagccgctgttgtaatgctgtagccagtgtcctgaagtcgcttatcagtcagtccctgacgcgagctgtgatggttgcctgatgagatcttcacctcctagtcctaggctagttaaaatatcatttctctagtactatgaatcatgaatttacttggatgcttcggtttgattcaggaatttgatcgtattatgtttcgttttgttctc

SEQ ID NO: 2378 - DNA, 4938 bp, Zea Mays
atggacgaaggcctctcggcaagtgaaggcaagatcctagtagaggcgtcttcgacggtcaccacaaggatgtaccaggatggaagaagagccgagtctgctcgctgcccacgctgggagttagggccggaggcctggccgatcggcgggggcggagggagggtaatgagggctccgcaggagcgtagcatgagggatctctacgatcgcacgcggcacaaagatatggcagctccagaggaatcagtggaagggtgcggtggaggatgcgcggagggatgggagcaacgggcactggcctctaagatggaggacaagactgtggtaaggaaaagattgatatcaagcaacaacactcgtgtcaaggcagagtctggcacctacatgctccacaaggtcggaagtaaagaacaatttacttgttcatagggagaaagggctctgtagtaaaggagataacgatgatgagtttagtgcaacctcagatcatgctttgtactctgtaactggtagaaacaaacttgttgcaacatcatccattgccgatgatttgtcagaggttgacatgccatcaaaacgcaggaggctgttgaatcaagacacaagactatctagagcagaataccttgatgacaacaactcatgtgttactggtatatcagcagaaggcaaacttcttgtggataagaaaaaactgtcaatttctgcatccagtcgagatttgaccgctaaagccaacagcatggctaaccacaacaaactaagaaatcaatgtgttgatgaatcaaagaaaggatctgatggttgtgaaatgcatcctagctcatctggtagattttcccctgtagattctcttgttatgacaaaaaagttgctgcgaacccagtcttctgtcagtgcattgagcagattatctcctaacaggcaggttcatgaatttgggaaagcagtggataatttatctcatcaaccttgtgagaaggcttctcttttgaagaataatgaagaaccacgagctgggcaattgaacccttgtatagctggtgaaaacaaccatggcacgctggcaggttacagtaatagacatgcggacaaaaatgatttctcattgaatgatctagacaatggcaccttgtgctcaaaagatgaaatccaagaacatggggacatcacatctaatgataatgataagaagaatgtgtgtgtcaaacaagattcggatcaagattgttcaatggatatatccaatgacagaaagttgaatacacaacatgatgtgatgacagactgtggcaattcagaaggtttgatagatgttaatgtttgtgatatatgtggagatgtcggtagggagtatcttctagctacatgcaccagatgccttgagggagcagagcatacttactgcatgcgagtgaagatggaaaaagttccagttggtgaatggttttgtgaagaatgccagcttaaggaagatcagaacaatacaagaagtaactatggtaacacagcggttaatgtgacagaaggaaagaatcaaaggacagaaagtcaaagcaagcttaaagcattgcaaattgttgtgcctgatttggatgctccgcaagtcacacacagcgcactgacagctgatcagtgtgatggtagtaaaagtttgcatttaacttcagctgatacacaaacacggctaaaggataccacaacagctgctgaaagattggatatgaagaacaaaaaaacattaagtgttgcaagatgtaacaaactgcaagttcttacatctgatttggacacacgaccacacagttatggaaaaccaacatctggagtctataacaagaagagtcgaagttcagattttttgttgaaccacaaaaagttgcaagtttctactgacatggagtcgccactgtcaagtgaaggcctacaaagtccacccatatcatccaagagacatgtagagagcatgtcgtcccctaagcctaggctcttcaagacgggtagccttggaaagcatgatgtcatctctcgtgataactcatttaaaaaatctaacaagggaggtttaacttcagttgataatgttccggtgagaactacccaggcggctaaaagttctgagaccttgtcacgatcatattccatggggaacatggtgaatgctaaagctcccattccttcagcaagaggccttttatccaagcagctatccttcaatagcaccaacaacggaccaaaagtcaagcagttggctgataaaatgtctagcaagttaagacctgcagaacattccccaagagatcctagagataaggaaccaataaaaaagattgtacaatcaggatctttcaaacgcgagggttcagattccgtagatgttggatcatcaaaacaaaagcaaacatttcatttgtctcgagatgaaaaaccaggagtactgaagccaataaaggaaaagaatttaacagaaagaagggcttcttttagtttgaaaaaaccaaacattccttcatctccaaggtctgacagctgtatgaagtcaggggaaagaaaaaatgatcagcatatttctggaacaaacatacttaaaagtagcaaaagacctggatatgctgaaaagaatctgaggtacgatttgtccagaactgacaatggcaatcaagatgttaccgtgcatccaaaaccaatggaagtttctgtgaataatgttaacattgcgccaaatgagcatgctgaggtggttcccacaatgtctactgccatgactcgtgaatcaaatttacaagatgttccaagagaaagcacctctgatgatttagctccgaaagtggtttgttgccaacaaaagcttttggaaaacacaggagatgattcctgtaaaactttagaggtggttcaagattcaggcgatatattgtctgcgactccacgtggtcttcagatggcacacaatctatacccctatgacaacaaattggataaaccagatttgaagaaggaagcttttgctgatcaatcttcagctcttgggaatcctttaaaagattttgttattccagagcaatcttacatctggcagggtagctttgaggtatcaggacatggaaactcccctgaaatgttcaatgggtttcaagcttacttgtctacttgtgcctcgtccaaagttcgtgaagtaggtgaacaattacctgacaaaattcagctagcagaagtcccacggcattcctcatggccgctgcaatttaatgaagtaaatccaactgaagataatattgctctttttttctttgctaaagatgttgaaagttacgaaagggcatatgggaaactcttggataacatgcttcttggtgatttgtccctcaaagcaaatattgataacatggaacttcttatttttccatctgataagttgcctgagaggattcaacgttggaatggtttacttttcttttggggcattttttatgcccggaaagcaagtagtccactagagcttcctacaaataattgtccattagaacaaaccaatggacctgttatccagcatgatatgggttcatctaaggcacttcagcctttgggtatagatttgaatgagtgccctaatgatgatatatctgatccagctctttcacttggatcagagagtgagaaatttggtgcatctgtagattataatgttttatcagagtccaaacacgaggatagaaatctgaatgcaagtgaagtacatcatgaagaaactgctggcacaagacaaattatatgggggcaaccttctgtagctcccactgtaactaatcttcccactatctcaacaggagttcatgacatcgttccggattattcggctgctgcaaaagatagcacaggaacagcaggtggaaacaaaatggagaaagcagatcagaatgaagctctcttttgtttttcacagcaaccaggtgcaattggatcgatctcacatgagataaaacttaagaaacatggtcttctgccttcacattgtcattttagtggatcaaagatatgtgatgatcaaaccaaatcgactccaagttcagatatgggttctttggattctcacctcaccaacaaaaggcagaagacttatgggaaacactctacttgcatttttggagatgaaatgccacctattaaatgcttgtcgaagatacatcccttaccggctggacaggataatccagtcgatgttttacattgtcacaggtgtccttcagatcctgtctctcttaaaaaaacagtacctgatcatatcatcaacgtgctttcatctgacgatgaagattccccagaacctagtactagcttaaataaggcatcactgaaggcagatgagggctcctccgctttattgttactttccctatccatggtggcaacgaagcataatctttctggttcagatattgtagatgatgaaccactgtctctatctcttggattccccagtgttgtcgacgggagtgaagatcaggagatgaagcaatttctgccggagaagccaggcataaacacttaatgccccctttagatttgcgagtgtacagttttgtgctatgtttagctgtaaggagtttagacagggtagaagtatatggtataaccgttaaattatgaataattttcctttcttttctctcactgttatatgcatctgctgctgttgttagtgatactggtctgatgatgttattgcctgctgtatttatgtgatatatggtgttagtttctttaagacattattggtatgacataaaaggatagatcaaaacgtgaatgtttataaattcaatttgccatggcttaacttaccccaggttattaggtgcatcccaaatttgcacgtgtcgtctgtcgtgatgagtgtagttatgttcaagttgcctttgccaattattataatatgac

SEQ ID NO: 2379 - DNA, 4902 bp, Zea Mays
atggacgaaggcctctcggcaagtgaaggcaagatcctagtagaggcgtcttcgacggtcaccacaaggatgtaccaggatggaagaagagccgagtctgctcgctgcccacgctgggagttagggccggaggcctggccgatcggcgggggcggagggagggtaatgagggctccgcaggagcgtagcatgagggatctctacgatcgcacgcggcacaaagatatggcagctccagaggaatcagtggaagggtgcggtggaggatgcgcggagggatgggagcaacgggcactggcctctaagatggaggacaagactgtggtaaggaaaagattgatatcaagcaacaacactcgtgtcaaggcagagtctggcacctgtaatgtctgttatgctccctgctcctcttgtttacacccacgtagtcgatttgaggattcaaatgttgaatgtgcatcctctcagacatgctccacaaggtcggaagtaaagaacaatttacttgttcatagggagaaagggctctgtagtaaaggagataacgatgatgagtttagtgcaacctcagatcatgctttgtactctgtaactggtagaaacaaacttgttgcaacatcatccattgccgatgatttgtcagaggttgacatgccatcaaaacgcaggaggctgttgaatcaagacacaagactatctagagcagaataccttgatgacaacaactcatgtgttactggtatatcagcagaaggcaaacttcttgtggataagaaaaaactgtcaatttctgcatccagtcgagatttgaccgctaaagccaacagcatggctaaccacaacaaactaagaaatcaatgtgttgatgaatcaaagaaaggatctgatggttgtgaaatgcatcctagctcatctggtagattttcccctgtagattctcttgttatgacaaaaaagttgctgcgaacccagtcttctgtcagtgcattgagcagattatctcctaacaggcaggttcatgaatttgggaaagcagtggataatttatctcatcaaccttgtgagaaggcttctcttttgaagaataatgaagaaccacgagctgggcaattgaacccttgtatagctggtgaaaacaaccatggcacgctggcaggttacagtaatagacatgcggacaaaaatgatttctcattgaatgatctagacaatggcaccttgtgctcaaaagatgaaatccaagaacatggggacatcacatctaatgataatgataagaagaatgtgtgtgtcaaacaagattcggatcaagattgttcaatggatatatccaatgacagaaagttgaatacacaacatgatgtgatgacagactgtggcaattcagaaggtttgatagatttactgcatgcgagtgaagatggaaaaagttccagttggtgaatggttttgtgaagaatgccagcttaaggaagatcagaacaatacaagaagtaactatggtaacacagcggttaatgtgacagaaggaaagaatcaaaggacagaaagtcaaagcaagcttaaagcattgcaaattgttgtgcctgatttggatgctccgcaagtcacacacagcgcactgacagctgatcagtgtgatggtagtaaaagtttgcatttaacttcagctgatacacaaacacggctaaaggataccacaacagctgctgaaagattggatatgaagaacaaaaaaacattaagtgttgcaagatgtaacaaactgcaagttcttacatctgatttggacacacgaccacacagttatggaaaaccaacatctggagtctataacaagaagagtcgaagttcagattttttgttgaaccacaaaaagttgcaagtttctactgacatggagtcgccactgtcaagtgaaggcctacaaagtccacccatatcatccaagagacatgtagagagcatgtcgtcccctaagcctaggctcttcaagacgggtagccttggaaagcatgatgtcatctctcgtgataactcatttaaaaaatctaacaagggaggtttaacttcagttgataatgttccggtgagaactacccaggcggctaaaagttctgagaccttgtcacgatcatattccatggggaacatggtgaatgctaaagctcccattccttcagcaagaggccttttatccaagcagctatccttcaatagcaccaacaacggaccaaaagtcaagcagttggctgataaaatgtctagcaagttaagacctgcagaacattccccaagagatcctagagataaggaaccaataaaaaagattgtacaatcaggatctttcaaacgcgagggttcagattccgtagatgttggatcatcaaaacaaaagcaaacatttcatttgtctcgagatgaaaaaccaggagtactgaagccaataaaggaaaagaatttaacagaaagaagggcttcttttagtttgaaaaaaccaaacattccttcatctccaaggtctgacagctgtatgaagtcaggggaaagaaaaaatgatcagcatatttctggaacaaacatacttaaaagtagcaaaagacctggatatgctgaaaagaatctgaggtacgatttgtccagaactgacaatggcaatcaagatgttaccgtgcatccaaaaccaatggaagtttctggtaaagatgcttacggagtaaagacatctaatccactatttcgatcccaatgtgccaaaaagtatagatcaaatgatgttgaagatgatgatttacccatttcagtgaataatgttaacattgcgccaaatgagcatgctgaggtggttcccacaatgtctactgccatgactcgtgaatcaaatttacaagatgttccaagagaaagcacctctgatgatttagctccgaaagtggtttgttgccaacaaaagcttttggaaaacacaggagatgattcctgtaaaactttagaggtggttcaagattcaggcgatatattgtctgcgactccacgtggtcttcagatggcacacaatctatacccctatgacaacaaattggataaaccagatttgaagaaggaagcttttgctgatcaatcttcagctcttgggaatcctttaaaagattttgttattccagagcaatcttacatctggcagggtagctttgaggtatcaggacatggaaactcccctgaaatgttcaatgggtttcaagcttacttgtctacttgtgcctcgtccaaagttcgtgaagtaggtgaacaattacctgacaaaattcagctagcagaagtcccacggcattcctcatggccgctgcaatttaatgaagtaaatccaactgaagataatattgctctttttttctttgctaaagatgttgaaagttacgaaagggcatatgggaaactcttggataacatgcttcttggtgatttgtccctcaaagcaaatattgataacatggaacttcttatttttccatctgataagttgcctgagaggattcaacgttggaatggtttacttttcttttggggcattttttatgcccggaaagcaagtagtccactagagcttcctacaaataattgtccattagaacaaaccaatggacctgttatccagcatgatatgggttcatctaaggcacttcagcctttgggtatagatttgaatgagtgccctaatgatgatatatctgatccagctctttcacttggatcagagagtgagaaatttggtgcatctgtagattataatgttttatcagagtccaaacacgaggatagaaatctgaatgcaagtgaagtacatcatgaagaaactgctggcacaagacaaattatatgggggcaaccttctgtagctcccactgtaactaatcttcccactatctcaacaggagttcatgacatcgttccggattattcggctgctgcaaaagatagcacaggaacagcaggtggaaacaaaatggagaaagcagatcagaatgaagctctcttttgtttttcacagcaaccaggtgcaattggatcgatctcacatgagataaaacttaagaaacatggtcttctgccttcacattgtcattttagtggatcaaagatatgtgatgatcaaaccaaatcgactccaagttcagatatgggttctttggattctcacctcaccaacaaaaggcagaagacttatgggaaacactctacttgcatttttggagatgaaatgccacctattaaatgcttgtcgaagatacatcccttaccggctggacaggataatccagtcgatgttttacattgtcacaggtgtccttcagatcctgtctctcttaaaaaaacagtacctgatcatatcatcaacgtgctttcatctgacgatgaagattccccagaacctagtactagcttaaataaggcatcactgaaggcagatgagggctcctccgctttattgttactttccctatccatggtggcaacgaagcataatctttctggttcagatattgtagatgatgaaccactgtctctatctcttggattccccagtgttgtcgacgggagtgaagatcaggagatgaagcaatttctgccggagaagccagtatcaattaactttccatcagggttgaagattattttcatgaggaacagagcattcggataaggtaccgaaggatctcatctttccagatttttaaaaaaatttgttgaaggtaatgtgtatggttttatttgatgggtatggcaagctgcagattctcctttctggaaggcaatttaccatgctcttttcagttttggcaggttctatgtttccttaggataccgttcatgcacaagtcgccccccggcccctacactccc

SEQ ID NO: 2380 - DNA, 5252 bp, Zea Mays
atggacgaaggcctctcggcaagtgaaggcaagatcctagtagaggcgtcttcgacggtcaccacaaggatgtaccaggatggaagaagagccgagtctgctcgctgcccacgctgggagttagggccggaggcctggccgatcggcgggggcggagggagggtaatgagggctccgcaggagcgtagcatgagggatctctacgatcgcacgcggcacaaagatatggcagctccagaggaatcagtggaagggtgcggtggaggatgcgcggagggatgggagcaacgggcactggcctctaagatggaggacaagactgtggtaaggaaaagattgatatcaagcaacaacactcgtgtcaaggcagagtctggcacctgtaatgtctgttatgctccctgctcctcttgtttacacccacgtagtcgatttgaggattcaaatgttgaatgtgcatcctctcagacatgctccacaaggtcggaagtaaagaacaatttacttgttcatagggagaaagggctctgtagtaaaggagataacgatgatgagtttagtgcaacctcagatcatgctttgtactctgtaactggtagaaacaaacttgttgcaacatcatccattgccgatgatttgtcagaggttgacatgccatcaaaacgcaggaggctgttgaatcaagacacaagactatctagagcagaataccttgatgacaacaactcatgtgttactggtatatcagcagaaggcaaacttcttgtggataagaaaaaactgtcaatttctgcatccagtcgagatttgaccgctaaagccaacagcatggctaaccacaacaaactaagaaatcaatgtgttgatgaatcaaagaaaggatctgatggttgtgaaatgcatcctagctcatctggtagattttcccctgtagattctcttgttatgacaaaaaagttgctgcgaacccagtcttctgtcagtgcattgagcagattatctcctaacaggcaggttcatgaatttgggaaagcagtggataatttatctcatcaaccttgtgagaaggcttctcttttgaagaataatgaagaaccacgagctgggcaattgaacccttgtatagctggtgaaaacaaccatggcacgctggcaggttacagtaatagacatgcggacaaaaatgatttctcattgaatgatctagacaatggcaccttgtgctcaaaagatgaaatccaagaacatggggacatcacatctaatgataatgataagaagaatgtgtgtgtcaaacaagattcggatcaagattgttcaatggatatatccaatgacagaaagttgaatacacaacatgatgtgatgacagactgtggcaattcagaaggtttgatagatgttaatgtttgtgatatatgtggagatgtcggtagggagtatcttctagctacatgcaccagatgccttgagggagcagagcatacttactgcatgcgagtgaagatggaaaaagttccagttggtgaatggttttgtgaagaatgccagcttaaggaagatcagaacaatacaagaagtaactatggtaacacagcggttaatgtgacagaaggaaagaatcaaaggacagaaagtcaaagcaagcttaaagcattgcaaattgttgtgcctgatttggatgctccgcaagtcacacacagcgcactgacagctgatcagtgtgatggtagtaaaagtttgcatttaacttcagctgatacacaaacacggctaaaggataccacaacagctgctgaaagattggatatgaagaacaaaaaaacattaagtgttgcaagatgtaacaaactgcaagttcttacatctgatttggacacacgaccacacagttatggaaaaccaacatctggagtctataacaagaagagtcgaagttcagattttttgttgaaccacaaaaagttgcaagtttctactgacatggagtcgccactgtcaagtgaaggcctacaaagtccacccatatcatccaagagacatgtagagagcatgtcgtcccctaagcctaggctcttcaagacgggtagccttggaaagcatgatgtcatctctcgtgataactcatttaaaaaatctaacaagggaggtttaacttcagttgataatgttccggtgagaactacccaggcggctaaaagttctgagaccttgtcacgatcatattccatggggaacatggtgaatgctaaagctcccattccttcagcaagaggccttttatccaagcagctatccttcaatagcaccaacaacggaccaaaagtcaagcagttggctgataaaatgtctagcaagttaagacctgcagaacattccccaagagatcctagagataaggaaccaataaaaaagattgtacaatcaggatctttcaaacgcgagggttcagattccgtagatgttggatcatcaaaacaaaagcaaacatttcatttgtctcgagatgaaaaaccaggagtactgaagccaataaaggaaaagaatttaacagaaagaagggcttcttttagtttgaaaaaaccaaacattccttcatctccaaggtctgacagctgtatgaagtcaggggaaagaaaaaatgatcagcatatttctggaacaaacatacttaaaagtagcaaaagacctggatatgctgaaaagaatctgaggtacgatttgtccagaactgacaatggcaatcaagatgttaccgtgcatccaaaaccaatggaagtttctggtaaagatgcttacggagtaaagacatctaatccactatttcgatcccaatgtgccaaaaagtatagatcaaatgatgttgaagatgatgatttacccatttcagtgaataatgttaacattgcgccaaatgagcatgctgaggtggttcccacaatgtctactgccatgactcgtgaatcaaatttacaagatgttccaagagaaagcacctctgatgatttagctccgaaagtggtttgttgccaacaaaagcttttggaaaacacaggagatgattcctgtaaaactttagaggtggttcaagattcaggcgatatattgtctgcgactccacgtggtcttcagatggcacacaatctatacccctatgacaacaaattggataaaccagatttgaagaaggaagcttttgctgatcaatcttcagctcttgggaatcctttaaaagattttgttattccagagcaatcttacatctggcagggtagctttgaggtatcaggacatggaaactcccctgaaatgttcaatgggtttcaagcttacttgtctacttgtgcctcgtccaaagttcgtgaagtaggtgaacaattacctgacaaaattcagctagcagaagtcccacggcattcctcatggccgctgcaatttaatgaagtaaatccaactgaagataatattgctctttttttctttgctaaagatgttgaaagttacgaaagggcatatgggaaactcttggataacatgcttcttggtgatttgtccctcaaagcaaatattgataacatggaacttcttatttttccatctgataagttgcctgagaggattcaacgttggaatggtttacttttcttttggggcattttttatgcccggaaagcaagtagtccactagagcttcctacaaataattgtccattagaacaaaccaatggacctgttatccagcatgatatgggttcatctaaggcacttcagcctttgggtatagatttgaatgagtgccctaatgatgatatatctgatccagctctttcacttggatcagagagtgagaaatttggtgcatctgtagattataatgttttatcagagtccaaacacgaggatagaaatctgaatgcaagtgaagtacatcatgaagaaactgctggcacaagacaaattatatgggggcaaccttctgtagctcccactgtaactaatcttcccactatctcaacaggagttcatgacatcgttccggattattcggctgctgcaaaagatagcacaggaacagcaggtggaaacaaaatggagaaagcagatcagaatgaagctctcttttgtttttcacagcaaccaggtgcaattggatcgatctcacatgagataaaacttaagaaacatggtcttctgccttcacattgtcattttagtggatcaaagatatgtgatgatcaaaccaaatcgactccaagttcagatatgggttctttggattctcacctcaccaacaaaaggcagaagacttatgggaaacactctacttgcatttttggagatgaaatgccacctattaaatgcttgtcgaagatacatcccttaccggctggacaggataatccagtcgatgttttacattgtcacagtgttgtcgacgggagtgaagatcaggagatgaagcaatttctgccggagaagccagtatcaattaactttccatcagggttgaagattattttcatgaggaacagagcattcggataaggtaccgaaggatctcatctttccagatttttaaaaaaatttgttgaaggttctatgtttccttaggataccgttcatgcacaagtcgccccccggcccctacactcccacactactgaattaacaaaggaaaaatataccctttttttatgcacaagtagggcctgtgagatagacaaatttgttcatattctagttatataggacatgtgagaatcatttaatgtatcggacgaattggttctgacaggccctaaacacattgtaagtggtgaactagaacatgaacaaatttgtctacctcacaggtcctaattgcacatattgctgtttgttgtgtggtgtaagagcccaagttgtgttcatggcttaactaatgcaacaagtctgcatctcttgggtcagttgctcgcactggtggttgatttacagcttttgtttcttccagcatcaccagtaatttcaccttcactgttatgaattgagatatcaatttttcttgaattgtttcagagcaaatctgtggtgctccttatccttgtgctgttttaatccaattatgttcagtatagctccgacatgtcaacaaaatgttaaggggctgtttggatctcttaattttgatagaattgtaatttatttaatagagtaggttatttgatttggattttgatgtcccactactttctaaagtttaaatataagtc

SEQ ID NO: 2381 - DNA, 1219 bp, Zea Mays
agccattcctatccctaattcacagtacttgttgtttattatgtgctacatggagattcttctcgtacgtcttgttcatgtacgctatccattccttgcacttgcgctctctctctcccatcacactcgttcagtcttctgcagctcagtctcctgctgcacatcgcctcctctccctgtgcagcgcttcagctgtgtcaaccactcaaccccatccgggttcctggcgctcctcttctctggccgtcggtcttgtctccctctctcaagcacgacgtcacctgggcgctgcacacacctcctgctcccctcgccatggcatggatgccactgtatctgttcctgtgtcatgctcaagccatcacaggttggtgggttgtgcgctatgtcgagctacgccaagtccgctcctcaccgtcaagtacggagtcctacagcccctcctccaacctcgcaccacagtcctccaccatactaactgcctccctactccttgtgctaatctccacgtcccgcgccatacgccactggtacactagatgattatgcgaaatgaaaggcatgaatcaaaacggaccaccagatgatatcgatggaccaatccccagagggatgatcagatcaagtgccagaatgggagatgctcgccaagccagtatggtctatcaaacactaacatagtgtttatcccagggattcaggaaggtgaatccagatcgttgggagtttggaaacgagttattcctagcaagccagaagcatttgctaagaagcatcaagaggaggttgatgcttgtgcccatcccttctttgattagctactggaccccaaggtttggttgtcaagtgggccccaaggcacagatcgtggtgcaccccagggagcatggagggtgaaggggataattcaggtgagaacacggttagttagccatctcaatttattgctttggtgcgcctgtgatagaatttggggcgaaatattctgctaactttgttttcttaagattgttctaagcttttgatggtctgtaacagcaacttctactcgtgagatgttcctttttgttacaagctaactttatatgtcttacctaacttacgtatttctacacattgtttgatgaacttttgtatcctgtctttttgtttcatatcgttcgatcgatattctctaaattactctttagttacgactacaacctaacttagtgtcctg

SEQ ID NO: 2382 - DNA, 889 bp, Zea Mays
cgctatccattccttgcacttgcgctctctctctcccatcacactcgttcagtcttctgcagctcagtctcctgctgcacatcgcctcctctccctgtgcagcgcttcagctgtgtcaaccactcaaccccatccgggttcctggcgctcctcttctctggccgtcggtcttgtctccctctctcaagcacgacgtcacctgggcgctgcacacacctcctgctcccctcgccatggcatggatgccactgtatctgttcctgtgtcatgctcaagccatcacaggttggtgggttgtgcgctatgtcgagctacgccaagtccgctcctcaccgtcaagtacggagtcctacagcccctcctccaacctcgcaccacagtcctccaccatactaactgcctccctactccttgtgctaatctccacgtcccgcgccatacgccactggtacactagatgattatgcgaaatgaaaggcatgaatcaaaacggaccaccagatgatatcgatggaccaatccccagagggatgatcagatcaagtgccagaatgggagatgctcgccaagccagtatggtctatcaaacactaacatagtgtttatcccaggcaagccccggcgcatttaccccttccttatattttttttaaaaaaaaagacttttatacacttaagtctagcgaaatgtgtattaggtttatagaagttgcttgaaaaccctttgatgcattggctaccttgaaatccaagcctttatagataattctagtgaagtatcaaatatgatttacaaaattgcttagccctacctagagataatcttgcggatagagtttgtcctttgcactaatgcctagctcaggggttatcctgaggaaggatggct

SEQ ID NO: 2383 - DNA, 2888 bp, Zea Mays
ctgtagtccccttctttgccgatgactctataaggcttgcgacttggataaggcccagcttttctgtgtcagtacctgcaaaaattggcatattagactttactagttaggtgctcgtatgttgctacattttccattaatgcttaagtataatatataaaacacaaatatatgtgtgtttcgttggctaggttgattcgttgatgtaatgtgggtttgaaggcaacaaccatggtttgaatcccatttgtgcataattttagttcttttcccattaaatgtggacaagtaatccgtccatatccgatccgattacacccctagggaggaggtatcggactacagatagtgttgcggcccggctcggcagacatgacccatttgatagtaccggaccggtcctagagccgtgtcgtgcctaagacgccttctgggcccacagtgccggcccgacccggcacgattataatttttagattataatttttattttcaaagtataactatatgtttataatttcgatcttttatgtgataaaaacaaacatgagctctattggttcgatggtgggggctttgtttcgaacccaagcgaccacaattcaattacttcgtgcagctcgagggatgacccacgacgaaactcacgctttaaaggtgtggtgatattatctgaatgttggatatctatttgaaggaaaacttttcactgagtaaaaagcccgatgtggcaatgttgttgtaagttaattttattttccatcactttgcaaaaaaaatatgaattgatttcatagtggtacatcacgttgtttggagtgcaacaaacttaccaggattctattctgtctagatgaaacagtttaaggtagtgaagaagggtgtgatactaatttgtagtggtttgatcagatatgtagtacagaagggcgggcctggtgcagcggtagagcctaccgtctgtaaccggaaggtcccgggttcgagccccagcctctgcatattatgcgggtaaggcttggcgcttaaagatacccttccccagaccccgcacagtgcgggaagcctatggcactgggtacgcccttcttgatcagatgtgtagtagctgtttattgcattgatctcttcattttgttgtaaaaagttgcacttttggaagcatagtgtaattatgtgtctgtataatgtcagatttccatatggtttgtttgcttatggaatgtcatttagctttttcaacataacgaaggcaatccatgtattctgcatacaaacttgtttaagaatatagtaagcttccttcataggtatgctcgtacctttaggctagatgatagacataaacctaattgaatcagtgctattaattaacaacagattacttcagaatgcacgtaggtttcatgttgttgcttgtggcttgccagtgacaatatctcatatatttttttagtggtaaccatgtgctgctgacatattctttttgctagaactctttggctgcataaaaaatgtctatactgtattcaaacacaaagacaaaggatctatggagttgccttgaagaggggtccagtgaaccagttagaatactaatgcatctatggataaaatagaatactaatgcacggtcactactcttacaataagggttgaacccgaaaattgaagacttcgatcaaagttgtttacgaggtttgttttccaaattttgttgtaatttattatatttttggtcatgaaatcgcagcctccatattcatgggcatgtgcttgctcagaaaaatagtgagttgtgagcgattttttcttcatggttgcgtgattcaaaaacgacggttgcgtctgtcgaacgaagaacgttgcggcaattaagcatggtcactactctacaatgtcagaacaggcaaaggttgttgaaagatcaaaataaccagtaaccgggtcaagaattttagagacagatacccctttatttaagatcgtatgcttccccttttgttatgaacatggtgtttttatgtcttatcaggtagatcagtaactaagtttgtagaagcttgcaagaaggcaacaggagcttccatcaagggtgaatatcacagagagaacgccctccctacctgtcccttgattagtttcatatatataggtcctctttttgttgttgacattttaatataatttgatgcatgctgaggcgctatataataacacaaacgaagttttgttgtagacaaggtagatcaatctcgtgtatcaaccttcgtgatgtggcgtcacttgtactactgtgaaaggttgattgtgttttgctacctcttgcataaatgctaatggttctgttcctgttgtgcagggattcaggaaggtgaatccagatcgttgggagtttggaaacgagttattcctagcaagccagaagcatttgctaagaagcatcaagaggaggttgatgcttgtgcccatcccttctttgattagctactggaccccaaggtttggttgtcaagtgggccccaaggcacagatcgtggtgcaccccagggagcatggagggtgaaggggataattcaggtgagaacacggttagttagccatctcaatttattgctttggtgcgcctgtgatagaatttggggcgaaatattctgctaactttgttttcttaagattgttctaagcttttgatggtctgtaacagcaacttctactcgtgagatgttcctttttgttacaagctaactttatatgtcttacctaacttacgtatttctacacattgtttgatgaacttttgtatcctgtctttttgtttcatatcgttcgatcgatattctctaaattactctttagttacgactacaacctaacttagtgtcctg

SEQ ID NO: 2384 - DNA, 2415 bp, Zea Mays
ctgtagtccccttctttgccgatgactctataaggcttgcgacttggataaggcccagcttttctgtgtcagtacctgcaaaaattggcatattagactttactagttaggtgctcgtatgttgctacattttccattaatgcttaagtataatatataaaacacaaatatatgtgtgtttcgttggctaggttgattcgttgatgtaatgtgggtttgaaggcaacaaccatggtttgaatcccatttgtgcataattttagttcttttcccattaaatgtggacaagtaatccgtccatatccgatccgattacacccctagggaggaggtatcggactacagatagtgttgcggcccggctcggcagacatgacccatttgatagtaccggaccggtcctagagccgtgtcgtgcctaagacgccttctgggcccacagtgccggcccgacccggcacgattataatttttagattataatttttattttcaaagtataactatatgtttataatttcgatcttttatgtgataaaaacaaacatgagctctattggttcgatggtgggggctttgtttcgaacccaagcgaccacaattcaattacttcgtgcagctcgagggatgacccacgacgaaactcacgctttaaaggtgtggtgatattatctgaatgttggatatctatttgaaggaaaacttttcactgagtaaaaagcccgatgtggcaatgttgttgtaagttaattttattttccatcactttgcaaaaaaaatatgaattgatttcatagtggtacatcacgttgtttggagtgcaacaaacttaccaggattctattctgtctagatgaaacagtttaaggtagtgaagaagggtgtgatactaatttgtagtggtttgatcagatatgtagtacagaagggcgggcctggtgcagcggtagagcctaccgtctgtaaccggaaggtcccgggttcgagccccagcctctgcatattatgcgggtaaggcttggcgcttaaagatacccttccccagaccccgcacagtgcgggaagcctatggcactgggtacgcccttcttgatcagatgtgtagtagctgtttattgcattgatctcttcattttgttgtaaaaagttgcacttttggaagcatagtgtaattatgtgtctgtataatgtcagatttccatatggtttgtttgcttatggaatgtcatttagctttttcaacataacgaaggcaatccatgtattctgcatacaaacttgtttaagaatatagtaagcttccttcataggtatgctcgtacctttaggctagatgatagacataaacctaattgaatcagtgctattaattaacaacagattacttcagaatgcacgtaggtttcatgttgttgcttgtggcttgccagtgacaatatctcatatatttttttagtggtaaccatgtgctgctgacatattctttttgctagaactctttggctgcataaaaaatgtctatactgtattcaaacacaaagacaaaggatctatggagttgccttgaagaggggtccagtgaaccagttagaatactaatgcatctatggataaaatagaatactaatgcacggtcactactcttacaataagggttgaacccgaaaattgaagacttcgatcaaagttgtttacgagaaaaatagtgagttgtgagcgattttttcttcatggttgcgtgattcaaaaacgacggttgcgtctgtcgaacgaagaacgttgcggcaattaagcatggtcactactctacaatgtcagaacaggcaaaggtagatcagtaactaagtttgtagaagcttgcaagaaggcaacaggagcttccatcaaggggattcaggaaggtgaatccagatcgttgggagtttggaaacgagttattcctagcaagccagaagcatttgctaagaagcatcaagaggaggttgatgcttgtgcccatcccttctttgattagctactggaccccaaggtttggttgtcaagtgggccccaaggcacagatcgtggtgcaccccagggagcatggagggtgaaggggataattcaggtgagaacacggttagttagccatctcaatttattgctttggtgcgcctgtgatagaatttggggcgaaatattctgctaactttgttttcttaagattgttctaagcttttgatggtctgtaacagcaacttctactcgtgagatgttcctttttgttacaagctaactttatatgtcttacctaacttacgtatttctacacattgtttgatgaacttttgtatcctgtctttttgtttcatatcgttcgatcgatattctctaaattactctttagttacgactacaacctaacttagtgtcctg

SEQ ID NO: 2385 - DNA, 1014 bp, Zea Mays
gtacgttcccccaaaatcagtgaaaagttataaatgcgtgtcaaagctattgtctacatggaaaaaagtgttatcatatacacaaaatgcaccatgtagaggttcaatacatgaatcccagcgggcatcgtctaaataggagcagttagaccattggcgggaagctccagtgtcgaggggctgattaggagggacctgacgtcaacttggctcatgattgactgagcgtgggggtggacctggtcttcgataacgtccaattacttgtcgctccggacactggcttagccctcggcgataatggtgacgtcgatctcgtcaaagtgagagaccatctggccaaggccgattccacccctcgacaaatgccctcggcgacggtgcgctctccacacaatcgggcagctcccagaggcgatcaaccagaggcgcctcagtcgacaacagaggagagagatgggcgcacaccatgctaacaaccagacgaatcacttggagtttggtgctcctttccgagagaagggcatccgcccggtgccccgcagcaacggcattttcgcgagcaagcaagagcttgcatgtattctccgtggctgtagccttcgcttcatcctccgcgaccttcgtatcccgcgcttgagtgagaattttgcggacctctctggtcgcgtcgcgctccatcacaagttttgagactgcttgcaccagacgaacctttgcctcccatgaagatgactcggctagcccagcatgacactttactctgcggagtgcctctccgagttgggaaccctagtttcaaaggcgatctgcattgccacgagccccatcgcacttcgcatgcaaggatgatgtctcgcctcgaagatggtatatttctaaatgggggacgacaagctcgcgttcttcctcttcagtgtagacagcacccgcgcggagcaactctatccccacctgtgccgtttgcagtgcctccaccgagcctccgatcgtgcgagaaggtgctgggtaaat

SEQ ID NO: 2386 - DNA, 1774 bp, Zea Mays
gagttactttacctcccttgagcgaccactcttcccaagttcccatcccagtccgtcagtcaagcgagcgaaatcgaatggctcccctcttcgccgcggcgtcccacgcgtccctcctccccctctcctccctcgaccgccccgccgccggccacctagtccgtggcaccctcaggccccacacctcgagcctccgcctgcgccgccccccgggggcaaccgggcgcggccgcgggcgtggccgagggggcatcccagacgagtggggcgagcgctcgccgccggacaaccccgagccccccgcgcagcccgatcctcccatcgacgaagacgagtggggccgcgacgactctgccgagggcaactcacgccctatcgtcgtcgacgagtggggcgagcccggggtgcctgagcccgagccgccctccgccgcggacccgcctagcccctccgcagacgacgactggggaaaggagccggaggcgccggcgccggcccctgctccggcggcggaggaggacgagcaggaggtgaagagggaggagctcaagcggtgcctggtggacacggtgtacggctccgacctcggcttccgggcgtccacggaggtcagaggtgaggtcgtcgagctagtcacccagctcgaggcggttaaccctactactgctcccgtcgagtcgccggatctcctcgacggcaactggatcctcatatatacagcatattctgagcttctgcctattctagctgctggggcaacacctttggtcaaagtaaagcagatatcccaagaaattgactccaaaatcatgacgatagtcaatgcttcgacccttacgactccattcgcttcattttcattcagcgcaaccgcctctttcgaggttcaaagcccatcaaggatagaggaggggagctttcagcctccgacaatatcatcatccgtggatctacctcaacaagttgatatatttgggcagaagatcagcctggggccagtccagcaggcactgaatccattgcagcaagcatttgctagcattgctgggtccatttctgggcagccacccctcaaggtaccaattcccggcaacaacagagctcgatcctggctcttgactacctacctggacaaagacttaaggatctcgagaggcgatggaggcttgtttattcttgccaaagaggggagccctttgctagatcaattgtaaatctgtaattggttgctaccggaaaggatatccagaactccacaggtaacctaacagaggacgcctcacattgtatttatcaatcaatattgttgttggcggcactgttacatgtatggggccatgaaatcttataaatgaatatttagtcgataagaatcgagagctgaactgagactgatacaaacaaaacacttcaatgttcatctgatgtctgtccttttattgacacgcttgccggaccatgcccgtatgaaacatggtcattcagcctttttgacagcttctactcaccgaggtggcagaaacactccagatcgcgggaaatgaagactgcaagggagactgtgctgctaacaatgccgcgtttacagtttatgttgcaacaaaaactttaaaccaatgtagctccaaaattgcagacttttcagtttatgttgcatgaaagagttagccaaagtggctccaaaacatgggtaagtgactccatttcctaaagattaggacacgatcacctgactgcagcagtgcaacttgactgggactgaatcctaacagac

SEQ ID NO: 2387 - DNA, 1548 bp, Zea Mays
gagttactttacctcccttgagcgaccactcttcccaagttcccatcccagtccgtcagtcaagcgagcgaaatcgaatggctcccctcttcgccgcggcgtcccacgcgtccctcctccccctctcctccctcgaccgccccgccgccggccacctagtccgtggcaccctcaggccccacacctcgagcctccgcctgcgccgccccccgggggcaaccgggcgcggccgcgggcgtggccgagggggcatcccagacgagtggggcgagcgctcgccgccggacaaccccgagccccccgcgcagcccgatcctcccatcgacgaagacgagtggggccgcgacgactctgccgagggcaactcacgccctatcgtcgtcgacgagtggggcgagcccggggtgcctgagcccgagccgccctccgccgcggacccgcctagcccctccgcagacgacgactggggaaaggagccggaggcgccggcgccggcccctgctccggcggcggaggaggacgagcaggaggtgaagagggaggagctcaagcggtgcctggtggacacggtgtacggctccgacctcggcttccgggcgtccacggaggtcagaggtgaggtcgtcgagctagtcacccagctcgaggcggttaaccctactactgctcccgtcgagtcgccggatctcctcgacggcaactggatcctcatatatacagcatattctgagcttctgcctattctagctgctggggcaacacctttggtcaaagtaaagcagatatcccaagaaattgactccaaaatcatgacgatagtcaatgcttcgacccttacgactccattcgcttcattttcattcagcgcaaccgcctctttcgaggttcaaagcccatcaaggatagaggtccaatttaaggaggggagctttcagcctccgacaatatcatcatccgtggatctacctcaacaagttgatatatttgggcagaagatcagcctggggccagtccagcaggcactgaatccattgcagcaagcatttgctagcattgctgggtccatttctgggcagccacccctcaaggtaccaattcccggcaacaacagagctcgatcctggctcttgactacctacctggacaaagacttaaggatctcgagaggcgatggaggcttgtttattcttgccaaagaggggagccctttgctagatcaattgtaaatctgtaattggttgctaccggaaaggatatccagaactccacagcttctactcaccgaggtggcagaaacactccagatcgcgggaaatgaagactgcaagggagactgtgctgctaacaatgccgcgtttacagtttatgttgcaacaaaaactttaaaccaatgtagctccaaaattgcagacttttcagtttatgttgcatgaaagagttagccaaagtggctccaaaacatgggtaagtgactccatttcctaaagattaggacacgatcacctgactgcagcagtgcaacttgactgggactgaatcctaacagac

SEQ ID NO: 2388 - DNA, 1760 bp, Zea Mays
atggtgcgcaaggcaaaggttgagttcgatgagcagccaccggataacttcgacccgaagaacccatatgcggacccggtggctatgctggagtaccgggaacacctggtgcgggagaagtggatccagatcgagaccgccaagatcatccgggagcgcctccgctggtgctaccgcatcgaggggatcaaccaccaccagaagtgccgccacctcgtggaccagtacctagaggctacacgcggcgtgggttggggcaaagatgcccgaccgcccgagttacacgagcccaagaagatcatcgaggcggagtagctgctgcctcggcttctcgtgctgctgttcctggattggaggggttgcaactgctgcaggatttcggtcatttgacgccatccgtcgcccgtcgtcgctactcccatgcccggcttgttcttttccttttcctgtcctgaactagcctcaatatactggagaccaagagccgacagggaatgtctggatcgtgcaggaaccttgagagagatggctgatgctgcagacctagacgaccgatgatgcattatgacctaccacattgctctcctcatcggagtgtgcttgcaactgtattactgatttgatgcaggttactattgttgtaacattggctgcatcctttgcgatctcctttttcccccctcatcacatatgtgtacagtggcctgttcaatgcttcatagaagcatataggctgatgtctttttcatcactgtgcaacttgccaccaatattccatctctgtcgagtccaacacagatagaattgtactgtcttttttcaaagaggtgcagagatcaggcacaccaaagcagcagcagcatcctattgaagaccaggattttgaagaatctataactaatcaagaagcagaccattatgattgttggtacgagagcaggagatcaggtggcacgacaaaaagtaggctgagagcgcaaatgtattgttaagtaaccagggaggtatcagctaccatgtcttggacccgagaccgagactcatccagttcaaggagctcccgcgctcaccagtgtaggatcccctggcctggcagcccctggctttccctctctgaatgatgccacgtagcagatcaggaaaggagcaagaagacggaccagaggaggcggagggatggagagggatcggggccttcgacggcacatatgggaacgagtacgagatgggaacgggactgtcgagtggtggcggatcgggagcagatgttggcggcggagaagaagcctgaaatattcgtggaggttgagaagagcgcaaacggtatagggccacgcttctctgtgtctcaaatatcctacccttcaagttgggccccaaaacgtttagacaaattttattgaaatggggctcctgttggagctctccttttttgtttaggccctatattttaatttgtttctatgtttaaggctcctattggagttgctttacaaagccatttgtgatgctggtaattcattgcaatcactttggggccagtagtcacttgggaggggttaaccggaagtagagaatagaatataatagattgaatgctaaactggcaacgatttccatttaagtatttggaaggattttctcttgttgggcatgaatcctcatgtcctccagcaaatggtttgtgctgtcgtcatattacatgacttgaattatgaactggatacatgtgaaggtggcagcagtgttgttacgggctt

SEQ ID NO: 2389 - DNA, 1118 bp, Zea Mays
atggtgcgcaaggcaaaggttgagttcgatgagcagccaccggataacttcgacccgaagaacccatatgcggacccggtggctatgctggagtaccgggaacacctggtgcgggagaagtggatccagatcgagaccgccaagatcatccgggagcgcctccgctggtgctaccgcatcgaggggatcaaccaccaccagaagtgccgccacctcgtggaccagtacctagaggctacacgcggcgtgggttggggcaaagatgcccgaccgcccgagttacacgagcccaagaagatcatcgaggcggagtagctgctgcctcggcttctcgtgctgctgttcctggattggagggggaggtatcagctaccatgtcttggacccgagaccgagactcatccagttcaaggagctcccgcgctcaccagtgtaggatcccctggcctggcagcccctggctttccctctctgaatgatgccacgtagcagatcaggaaaggagcaagaagacggaccagaggaggcggagggatggagagggatcggggccttcgacggcacatatgggaacgagtacgagatgggaacgggactgtcgagtggtggcggatcgggagcagatgttggcggcggagaagaagcctgaaatattcgtggaggttgagaagagcgcaaacggtatagggccacgcttctctgtgtctcaaatatcctacccttcaagttgggccccaaaacgtttagacaaattttattgaaatggggctcctgttggagctctccttttttgtttaggccctatattttaatttgtttctatgtttaaggctcctattggagttgctttacaaagccatttgtgatgctggtaattcattgcaatcactttggggccagtagtcacttgggaggggttaaccggaagtagagaatagaatataatagattgaatgctaaactggcaacgatttccatttaagtatttggaaggattttctcttgttgggcatgaatcctcatgtcctccagcaaatggtttgtgctgtcgtcatattacatgacttgaattatgaactggatacatgtgaaggtggcagcagtgttgttacgggctt

SEQ ID NO: 2390 - DNA, 1040 bp, Zea Mays
cgcaaggcaaaggttgagttcgatgagcagccaccggataacttcgacccgaagaacccatatgcggacccggtggctatgctggagtaccgggaacacctggtgcgggagaagtggatccagatcgagaccgccaagatcatccgggagcgcctccgctggtgctaccgcatcgaggggatcaaccaccaccagaagtgccgccacctcgtggaccagtacctagaggctacacgcggcgtgggttggggcaaagatgcccgaccgcccgagttacacgggaggtatcagctaccatgtcttggacccgagaccgagactcatccagttcaaggagctcccgcgctcaccagtgtaggatcccctggcctggcagcccctggctttccctctctgaatgatgccacgtagcagatcaggaaaggagcaagaagacggaccagaggaggcggagggatggagagggatcggggccttcgacggcacatatgggaacgagtacgagatgggaacgggactgtcgagtggtggcggatcgggagcagatgttggcggcggagaagaagcctgaaatattcgtggaggttgagaagagcgcaaacggtatagggccacgcttctctgtgtctcaaatatcctacccttcaagttgggccccaaaacgtttagacaaattttattgaaatggggctcctgttggagctctccttttttgtttaggccctatattttaatttgtttctatgtttaaggctcctattggagttgctttacaaagccatttgtgatgctggtaattcattgcaatcactttggggccagtagtcacttgggaggggttaaccggaagtagagaatagaatataatagattgaatgctaaactggcaacgatttccatttaagtatttggaaggattttctcttgttgggcatgaatcctcatgtcctccagcaaatggtttgtgctgtcgtcatattacatgacttgaattatgaactggatacatgtgaaggtggcagcagtgttgttacgggctt

SEQ ID NO: 2391 - DNA, 1392 bp, Zea Mays
ggattcgataacagaaactacctgaattcaatgagttgcatgaagagatacagcgtttgccattcatccattgctcaagaacaaaaggattgcagatagagagctcgtttttcattagaattccgtttgggtcatgtcccactcttttgttcagacagactaaactagatgaagctgacttacccagaaaagatacctaaacaactggtttggaaagagctaggaggtcctcggcatgctatgggttgaaatccaactaaatcccctcatcaaattctgcatccagaaccagcagcattcgccagatactacaaccaactaaatcccctcatcgaattctgcatccagaatcagcagcattcgccagatatccagtgccatcaatcatcatcttatttcacgacaacatggttggcccctttctcctcctgttggttgcccacgccgtccttatggaccatctcccagaagaaatccgtgaggacagtctcgtatcctggcatcttggcgtagcccgggaagtagttgatgtcaatgacgagatagcggtcgccggcgcggacgtcgcggatcatgtcgaagttgaagagttgcaggcccagcgcgcggcggaggccgcccgcgatctggttgatgaatgcggcgggcggcacgacggcgtcctcgagactcttttcgccgtagtactcctccgccgtgcgctcagtggggaggttggagacctgggagaaggagacggatccctgggccgatgcgtcatcctcgggggacacgtcgggcaggctacggcgcttgacgcaagtgacgtggccgccgacgacgtagaccttgaagatgacgccgccatggagtccgaagtcggcgagcgcggcagcgtcgtagacgacgacctggctggggataccgaaagtgctgtcctggtcggcggcgtggtcgagctcggagacgacctggagcatggagatgcggttgtggaggcggtcgatggcgtggggcgggtcgacgatggggacggccgggtggcgcgcggcgaaggccacgagctgggcgcgccagtcgtctccgtagagcttgtggatgaggaggtggaagggcccttgctctgccaggggctgcgacgcatccacggggacgaggtccatgccccgcgacgccgcctgggccaccagcgacggctggatgaagctctgctgcttcttcggcgcgagcgcgtaaccgatgacgtagcgcggggggtgggtgacgccggaggagggctcggcggcggcgtcggaggccatcgggtcgggttcgggaggaatcgatcgatggagattgaaatttgttgggaaattaggtggtgatggataaagggtgaacgaatgattatataaagccagaaaagccaaaggt

SEQ ID NO: 2392 - DNA, 838 bp, Zea Mays
ccaatacgaaggatctctgggctccaaaaaaacacccgaactcatccgctcgggagcacatcgcgtctccattcctctcccagggcaggtgcaaggattgcaagtattcagagaacaaaaaagacttcagagcttaaggatgaaagaaacaagggtgatgatgaatttataaacaagcctcttccctactatggcaaccttgctacaatttttggcaatagtgttgcatcaggacgatttgcaaagacatcaaatgaccctcttgctgttgatgatggtgaagatgtgcaaaaggaagggtgtattgcaacatctagtgctgtccatgagaatgaccctgcagcaacatctgcaactaaaccatccaagaaggccaagagggaagacaatggtactgaattcttagttgaagcatttcagcatgccactcaaacactagccagtgccatcaaggaggcagcaaacaaacctttgccagctggtttgtttgaagctgtagacaatattccaggatttgagattgcgcacaagtccaagtattattctcatttggtttctaatcctgacattgcacatgctttcatggatgtgccattgctttacaaggtctctatgattaccgacttcgttaatgagaagttttaggctttatggtaatctaataatacatttcacaatttgtatggatctatgtaaggacctatgtttgtttgaaactatgtatggacatgtgtgtgatatgttatgaaacttatttttgacataacacttttgtgatggttgtatggatgagtcatgtgtaagattatggagtaattattatacattttatgatcta

SEQ ID NO: 2393 - DNA, 783 bp, Zea Mays
gggagcacatcgcgtctccattcctctcccagggtgcaaggattgcaagtattcagagaacaaaaaagacttcagagcttaaggatgaaagaaacaagggtgatgatgaatttataaacaagcctcttccctactatggcaaccttgctacaatttttggcaatagtgttgcatcaggacgatttgcaaagacatcaaatgaccctcttgctgttgatgatggtgaagatgtgcaaaaggaagggtgtattgcaacatctagtgctgtccatgagaatgaccctgcagcaacatctgcaactaaaccatccaagaaggccaagagggaagacaatggtactgaattcttagttgaagcatttcagcatgccactcaaacactagccagtgccatcaaggaggcagcaaacaaacctttgccagctggtttgtttgaagctgtagacaatattccaggatttgagattgcgcacaagtccaagtattattctcatttggtttctaatcctgacattgcacatgctttcatggatgtgccattgctttacaaggtctctatgattaccgacttcgttaatgagaagttttaggctttatggtaatctaataatacatttcacaatttgtatggatctatgtaaggacctatgtttgtttgaaactatgtatggacatgtgtgtgatatgttatgaaacttatttttgacataacacttttgtgatggttgtatggatgagtcatgtgtaagattatggagtaattattatacattttatgatcta

SEQ ID NO: 2394 - DNA, 835 bp, Zea Mays
attgcatcggggccattgacggcacacatgttcgagcctctgttcctaaggaaatggaggctgcattccgtgcccatgatgccctcattttaagagatgctttagaacgagaaaatggtcttcgtgtccctgaaggatgaaagaaacaagggtgatgatgaatttataaacaagcctcttccctactatggcaaccttgctacaatttttggcaatagtgttgcatcaggacgatttgcaaagacatcaaatgaccctcttgctgttgatgatggtgaagatgtgcaaaaggaagggtgtattgcaacatctagtgctgtccatgagaatgaccctgcagcaacatctgcaactaaaccatccaagaaggccaagagggaagacaatggtactgaattcttagttgaagcatttcagcatgccactcaaacactagccagtgccatcaaggaggcagcaaacaaacctttgccagctggtttgtttgaagctgtagacaatattccaggatttgagattgcgcacaagtccaagtattattctcatttggtttctaatcctgacattgcacatgctttcatggatgtgccattgctttacaaggtctctatgattaccgacttcgttaatgagaagttttaggctttatggtaatctaataatacatttcacaatttgtatggatctatgtaaggacctatgtttgtttgaaactatgtatggacatgtgtgtgatatgttatgaaacttatttttgacataacacttttgtgatggttgtatggatgagtcatgtgtaagattatggagtaattattatacattttatgatcta

SEQ ID NO: 2395 - DNA, 2733 bp, Zea Mays
gcacggcacggcaccgcaccgggagtccatccgtccgtccggcacgcacgcacgccctttgaatgccccctcccgcctgcctgctgcctctgacccggccccgtatcgtatgattcattgattcgtatctcctctcctctcccggctcggaataacccgtctctctcgcccgccctgtccttgccggccggccccggccccggtctcttctcttcttcttctttttcttcccgctatatatactgcgcgcctcaccttcccctctttgcaatccgtatcatcatcttggcctcgtcaatccaccaccaccgtcgtcgctgagctcctcctccggcttcgcttcgctgtcttgcctcctcctcggtcgaagaagaaaacatgtgtccgggatccgtggagtcgtcgtcggcggcggcggcgggcaagagcgtgtgcgtgatggacgccgcggggccgctgggccacgcgctcgtggaccgcctcctccggcgcgggtacaccgtccacgccgccacgtacgcccgcgacggggaggagggcgcggctgccgccgcgctgctcggccacctgtcgtgcgccgccgacgcgtgcaggcaccggctgaagctgttccgcgccgacccgttcgactaccacgccatcgccgacgccgtgcggggctgcgccggcgtcttctgcatgttcaacacgcccgacgaccaggcccaatgcgatgagtcgacggtggagacggaggtgcgcgcggcgcacaacgtgctggaggcgtgcgcgcagacggacgccatggagcgggtcgtcttcacctcctccgtcaccgccgtcgtctggagcggcgccggcgccggcgtcggcgcccacagggaggaggtcgccgacgagaggagctggagcgacctcgccttctgcaggaagttcaaggtgcgtacgagtgagcgactcgctgtttttttttaagttccgtttcatggattagtgccgcccgtgccgtgcataggcaactttcatcagacaacagtggttaccaacccccatgatttccatccaaccatcaaatcgaagccgatgggatgaggctgcggcgccctggaaggccacacggctgcttggccacttgccctgggtcgtcctcatcctgcagcccccggccgagcgatacctttcaccatcgatggtcgagtcgatccatcccttatccgttggctgtagcttcccgcacctgttttgtgtgtgggtgcctgcagtcgcgtgccactccagccctgcccctgccgcgcgacgcaagcgtgcctggaaatcagggttcttggtggccaaactccattttaaaggcgtccctgaaatatcccttccttaccttgatgagcacagcacaaaacaggtccattcagaatcaggcgttgtctacgagtcacagagctgtctctgtctctgtctcttgaggctggctgtacaagtccaagcctgtgcgcatcaaatgaggagtggcatcagacatcagactccagactgctgaagctgacctctcaactgtctacggctcgggattaggacacagaaagagagtcgagtagtaattaattaattaattaattaaaccaactaacaaacacgtacacgtcatcatcagacgcactaccacacaaccaacaccaagagtggttgctggttgcatgcatcttcttcgttttcgtcctccatgcatgtgcgtgaaacactgcatgcaggctccgatggacaaaaacgacaaacactgcatgccaactgctgtccgtgcgtgaaacacgattggggttgccgaccgaccggcacacgcacggacgcagccagcagacgacctgacctgacctgacctgtgctgtctgcctctgcgcgcatgcagctgtggcacgccctggccaagacgctgtcggagaagacggcgtgggcgctggccatggacaggggcgtcgacatggtggccatcaacgccggcctgctgctggccgcccccgggctcgggctcaccgccgcgcacccctacctaaagggcgcccccgacatgtacgacggcggcgtcctcgctaccgtcgacgtcggcttcctggccgacgcgcacgtcgccgcctacgagtcccccaccgcctacggccgctacctctgcttcagcaacgccgtctgccgtcccgaggacgccgtcaagctcgcccagatgctctcgccggccgcgccacgctcgccgccgccaagcgacgaactgaaggtgataccacagaggatccagggcaagaagctcaacaagctcatgctggagttcgccagcggggtatacggggagctggactaggaaggaactgccgtgccaggccacagatgatgcgatgcgactagggctgttgtattcttttgtacgtagtactatttgtagttttcgcccccctcacaaaaaaaaaggagggaaatctgtttggttggccaaaatgtgccatacgctcgctgtacatggccaaacacgccacgtgtgttgttgatacagcccctgccagcagcaggggtgggtggggatggggagagcatttcagtgatcgggttgccaacgaaatacaatatcatatctaggttcgtgagttacatcccatgcatgcgttacgtgacgcttatattgaactctgacaaacttgtagcgcacaattacaaacatgattacggaagaatcgtttcagggcaaattcgcgcaccaatggggctggtccgggg

SEQ ID NO: 2396 - DNA, 1425 bp, Zea Mays
gcacggcacggcaccgcaccgggagtccatccgtccgtccggcacgcacgcacgccctttgaatgccccctcccgcctgcctgctgcctctgacccggccccgtatcgtatgattcattgattcgtatctcctctcctctcccggctcggaataacccgtctctctcgcccgccctgtccttgccggccggccccggccccggtctcttctcttcttcttctttttcttcccgctatatatactgcgcgcctcaccttcccctctttgcaatccgtatcatcatcttggcctcgtcaatccaccaccaccgtcgtcgctgagctcctcctccggcttcgcttcgctgtcttgcctcctcctcggtcgaagaagaaaacatgtgtccgggatccgtggagtcgtcgtcggcggcggcggcgggcaagagcgtgtgcgtgatggacgccgcggggccgctgggccacgcgctcgtggaccgcctcctccggcgcgggtacaccgtccacgccgccacgtacgcccgcgacggggaggagggcgcggctgccgccgcgctgctcggccacctgtcgtgcgccgccgacgcgtgcaggcaccggctgaagctgttccgcgccgacccgttcgactaccacgccatcgccgacgccgtgcggggctgcgccggcgtcttctgcatgttcaacacgcccgacgaccaggcccaatgcgatgagtcgacggtggagacggaggtgcgcgcggcgcacaacgtgctggaggcgtgcgcgcagacggacgccatggagcgggtcgtcttcacctcctccgtcaccgccgtcgtctggagcggcgccggcgccggcgtcggcgcccacagggaggaggtcgccgacgagaggagctggagcgacctcgccttctgcaggaagttcaagcgacgaactgaaggtgataccacagaggatccagggcaagaagctcaacaagctcatgctggagttcgccagcggggtatacggggagctggactaggaaggaactgccgtgccaggccacagatgatgcgatgcgactagggctgttgtattcttttgtacgtagtactatttgtagttttcgcccccctcacaaaaaaaaaggagggaaatctgtttggttggccaaaatgtgccatacgctcgctgtacatggccaaacacgccacgtgtgttgttgatacagcccctgccagcagcaggggtgggtggggatggggagagcatttcagtgatcgggttgccaacgaaatacaatatcatatctaggttcgtgagttacatcccatgcatgcgttacgtgacgcttatattgaactctgacaaacttgtagcgcacaattacaaacatgattacggaagaatcgtttcagggcaaattcgcgcaccaatggggctggtccgggg

SEQ ID NO: 2397 - DNA, 988 bp, Zea Mays
gcacggcacggcaccgcaccgggagtccatccgtccgtccggcacgcacgcacgccctttgaatgccccctcccgcctgcctgctgcctctgacccggccccgtatcgtatgattcattgattcgtatctcctctcctctcccggctcggaataacccgtctctctcgcccgccctgtccttgccggccggccccggccccggtctcttctcttcttcttctttttcttcccgctatatatactgcgcgcctcaccttcccctctttgcaatccgtatcatcatcttggcctcgtcaatccaccaccaccgtcgtcgctgagctcctcctccggcttcgcttcgctgtcttgcctcctcctcggtcgaagaagaaaacatgtgtccgggatccgtggagtcgtcgtcggcggcggcggcgggcaagagcgtgtgcgtgatggacgccgcggggccgctgggccacgcgctcgtggaccgcctcctccggcgcgggtacaccgtccacgccgccacgtacgcccgcgacggggaggagggcgcggctgccgccgcgctgctcggccacctgtcgtgcgccgccgacgcgtgcaggcaccggctgaagctgttccgcgccgacccgttcgactaccacgccatcgccgacgccgtgcggggctgcgccggcgtcttctgcatgttcaacacgcccgacgaccaggcccaatgcgatgagtcgacggtggagacggaggtgcgcgcggcgcacaacgtgctggaggcgtgcgcgcagacggacgccatggagcgggtcgtcttcacctcctccgtcaccgccgtcgtctggagcggcgccggcgccggcgtcggcgcccacagggaggaggtcgccgacgagaggagctggagcgacctcgccttctgcaggaagttcaagacgagcaagctactgtggatcctgaggttcagctggtagagactgctgagcaggagctcgtggaaggcaa

SEQ ID NO: 2398 - DNA, 1073 bp, Zea Mays
gcacggcacggcaccgcaccgggagtccatccgtccgtccggcacgcacgcacgccctttgaatgccccctcccgcctgcctgctgcctctgacccggccccgtatcgtatgattcattgattcgtatctcctctcctctcccggctcggaataacccgtctctctcgcccgccctgtccttgccggccggccccggccccggtctcttctcttcttcttctttttcttcccgctatatatactgcgcgcctcaccttcccctctttgcaatccgtatcatcatcttggcctcgtcaatccaccaccaccgtcgtcgctgagctcctcctccggcttcgcttcgctgtcttgcctcctcctcggtcgaagaagaaaacatgtgtccgggatccgtggagtcgtcgtcggcggcggcggcgggcaagagcgtgtgcgtgatggacgccgcggggccgctgggccacgcgctcgtggaccgcctcctccggcgcgggtacaccgtccacgccgccacgtacgcccgcgacggggaggagggcgcggctgccgccgcgctgctcggccacctgtcgtgcgccgccgacgcgtgcaggcaccggctgaagctgttccgcgccgacccgttcgactaccacgccatcgccgacgccgtgcggggctgcgccggcgtcttctgcatgttcaacacgcccgacgaccaggcccaatgcgatgagtcgacggtggagacggaggtgcgcgcggcgcacaacgtgctggaggcgtgcgcgcagacggacgccatggagcgggtcgtcttcacctcctccgtcaccgccgtcgtctggagcggcgccggcgccggcgtcggcgcccacagggaggaggtcgccgacgagaggagctggagcgacctcgccttctgcaggaagttcaaggagaagagcaggtggtcgaagaggagccgcctaacactgaggctttcgacttgatctaggtggcgtctccgagtcaactttctggcgccaaggatagattttagaccctgttatatttatcttttatttttgtaagtcttccgctatgtaataaa

SEQ ID NO: 2399 - DNA, 2882 bp, Zea Mays
gtctgtgtcaatgacttgtttgcatgtttcttttctggtgctttgtccgcaaattctgatataaggaaatcttataaaagaagggagaagggaaaatggggaaaagaaaaattcctatatattaaagctatgcagctagacgcacagccacataggccacgtcgttcgaatttttgtaagccatccgatacaagatcgttggttaccaggcgtgggagcaaaggtagccaaccacacgacgggactcttccagatggagacgaaacaccacacggcggggaagaaaaagagggatcagatctcagacgccggcgtccgtctccgccaagctgcatcgcctcaaacgctttgtcccggccatcgcgccggccatggccgccatgtcgaagaaggcgactctccatccctttcgagttccgagctcattctcccctccgcccctagcctcacgccacgtcccgcggaccgtactatagcctccacagccgtggtcgctcggccacacgtatcggtcgcttcgcatgccatcgctgcggcgacagtcgtgatacctgccttcgtcagcaacacgtcccaacccgactaagcgtcccgggccaccgcgatacttcatttccgaaatcgctgcggcggcagcagttatgcatgccttgctccaaatatataacactgtgagactgagtagcaaatcaagttgaagtcatcggaagttgtcaaacctcttttttttctcttttttgtatgttttttagagtccaatttggctggacctaaaaataatggctacgacttggtccaccctggcttccaacatatgaaacttcttgcgtcttcattaaattgtgctaataaaatgtgtgtttcgttttgttttgtcctgctacaggggtgaactatatgtgggaacactgaacctgcaaccgagactgtagcgattcgacaatatcacaagaggatcatacttctactccatgacaactgtaacctactagagctgaaagaaatacagagcctataagaaggaaatgtatgagatgcaaccaatgtacagtaagcaacttaccatatttatttatgacaattgttccaagaattaataagtattccagtgagcgtctcaaaaatggaatcaagagatgagatggtaactagctgaaaacagtaataattagaaacccaagagcgattttgcgacgccctgctgtgagccgaccctagcagtcaaggcttcgtaaatcagatttatctgtcaggtacaatcacaggaaatgttgtggcaaaggtatggcttaagagaaatcatgtacctagatgatttgttgtctatacgattagatggtgctgttcaccttcaattttttcaaatttggcaccactccagtcaccaaccatacatagaaaagttttagtgaagtcaatgaagcaaacattttaatatttcattctatcaataaaagtgtagttttgcttacgataagacctccataaacaataaacacgggtaaatgagagtattgatggttggaatgagtggtggtagcagaatgatatctacatacattggttttaggtaccagcaccttattttttttaataaaaatatgtgtgaacttggaactttttaatatgtgaggaagatgggtagatactgttgttgtgggcagggcagggcacccgagcaaaagcatagatgcgaatggggatgaatatgggttagctctcttcccctatttattggagttggagggatacactgctgctatggtttggtctgtgatgtcgtctcattagaaaaacatttgcttggcttgtatctcatttcctttctcattagaggacttaaactgagcacatgtttggcttatgcgcaatgtatgtggcaagcaaaagcaaatattatcctattaatgtgctcctactaacctgctctgcccacaatttattatgggtagatattgttccaatttattatgcatgttggcttcttgcagggaatgaatacatcttccgtttatatcaattgtgacttagatgtatgtcagtcttagtatgactattaagttgtgacatgaatgtgaattcgataatgtatttcataacttcatctacactacagatgtattgtgttattgttcccattcaccattgaaagtagttgttagatccaaattgatttcacttttaccaagtgatgttgttgctgcttccttataagtgttgctcccatttgattcgtcagattactggcttctgctactttcgagtagtgctgctactttcgagtagtgctgctgctttcgagtggtgttgttgctttcaagttgaagtgagttgttgttgacttccacaacaagctgctacttttagcgaaagtgagtacaaaacaggttgttgttgcatctcgggcaaatagcaatgttgtttattctgctttcaaacagcagtgctggtgccaaaagaatgtttataagaaaattcaaaaccaaacaaaagttgacaacaaacatgatgccataacattctatttgctagcaccatccagaattttaaaaattcagtttgttgccatgaaacagtttgctgccaccgttcagaattcagccatgttcaagtttacaactgtgtgataaagtaaattcagtttgctaccaccatggcaccgtccaaaaatgtatattttgacaaacatacacgaccagaacgatctattttgacaactttaacgagacatggcccattttgtagagcggcaatagagtgacccattttaacaaattcctcatcaaatgaattatctccatatttacttatttcatttctatattctcatgctttttacaaggtacacctatttatcctcttttcatgttatcaaagctcat

SEQ ID NO: 2400 - DNA, 2958 bp, Zea Mays
gcagctagacgcacagccacataggccacgtcgttcgaatttttgtaagccatccgatacaagatcgttggttaccaggcgtgggagcaaaggtagccaaccacacgacgggactcttccagatggagacgaaacaccacacggcggggaagaaaaagagggatcagatctcagacgccggcgtccgtctccgccaagctgcatcgcctcaaacgctttgtcccggccatcgcgccggccatggccgccatgtcgaagaaggcgactctccatccctttcgagttccgagctcattctcccctccgcccctagcctcacgccacgtcccgcggaccgtactatagcctccacagccgtggtcgctcggccacacgtatcggtcgcttcgcatgccatcgctgcggcgacagtcgtgatacctgccttcgtcagcaacacgtcccaacccgactaagcgtcccgggccaccgcgatacttcatttccgaaatcgctgcggcggcagcagttatgcatgccttgctccaaatatataacactgggtgaactatatgtgggaacactgaacctgcaaccgagactgtagcgattcgacaatatcacaagaggatcatacttctactccatgacaactgtaacctactagagctgaaagaaatacagagcctataagaaggaaatgtatgagatgcaaccaatgtacttctttgccactccttaacttatagtagcattttatgatttgctctctttgaccaattcgtgcctaacttgcaattgaaccaccaaatggtttcagactattttctggattaagctggatcatttgttttctaaagttcaattaattgttatgtcattactcaattcatatcactaatcatatagagcatattctatacttccgtctatattcttttataatgtatacacatatcaagattcaaattttgaaatatgtgaccaataaattgtttatacctactataatactacattcattcactaatgcaggtacagtaagcaacttaccatatttatttatgacaattgttccaagaattaataagtattccagtgagcgtctcaaaaatggaatcaagaggtgaggaaagacatcgccccagttctgtagaggatgccttcgttttcctcgggttttgttgtgtgtcctgcttaccaagcattgatatcaattcgccgatttgatagatgagatggtaactagctgaaaacagtaataattagaaacccaagagcgattttgcgacgccctgctgtgagccgaccctagcagtcaaggcttcgtaaatcagatttatctgtcaggtacaatcacaggaaatgttgtggcaaaggtatggcttaagagaaatcatgtacctagatgatttgttgtctatacgattagatggtgctgttcaccttcaattttttcaaatttggcaccactccagtcaccaaccatacatagaaaagttttagtgaagtcaatgaagcaaacattttaatatttcattctatcaataaaagtgtagttttgcttacgataagacctccataaacaataaacacgggtaaatgagagtattgatggttggaatgagtggtggtagcagaatgatatctacatacattggttttaggtaccagcaccttattttttttaataaaaatatgtgtgaacttggaactttttaatatgtgaggaagatgggtagatactgttgttgtgggcagggcagggcacccgagcaaaagcatagatgcgaatggggatgaatatgggttagctctcttcccctatttattggagttggagggatacactgctgctatggtttggtctgtgatgtcgtctcattagaaaaacatttgcttggcttgtatctcatttcctttctcattagaggacttaaactgagcacatgtttggcttatgcgcaatgtatgtggcaagcaaaagcaaatattatcctattaatgtgctcctactaacctgctctgcccacaatttattatgggtagatattgttccaatttattatgcatgttggcttcttgcagggaatgaatacatcttccgtttatatcaattgtgacttagatgtatgtcagtcttagtatgactattaagttgtgacatgaatgtgaattcgataatgtatttcataacttcatctacactacagatgtattgtgttattgttcccattcaccattgaaagtagttgttagatccaaattgatttcacttttaccaagtgatgttgttgctgcttccttataagtgttgctcccatttgattcgtcagattactggcttctgctactttcgagtagtgctgctactttcgagtagtgctgctgctttcgagtggtgttgttgctttcaagttgaagtgagttgttgttgacttccacaacaagctgctacttttagcgaaagtgagtacaaaacaggttgttgttgcatctcgggcaaatagcaatgttgtttattctgctttcaaacagcagtgctggtgccaaaagaatgtttataagaaaattcaaaaccaaacaaaagttgacaacaaacatgatgccataacattctatttgctagcaccatccagaattttaaaaattcagtttgttgccatgaaacagtttgctgccaccgttcagaattcagccatgttcaagtttacaactgtgtgataaagtaaattcagtttgctaccaccatggcaccgtccaaaaatgtatattttgacaaacatacacgaccagaacgatctattttgacaactttaacgagacatggcccattttgtagagcggcaatagagtgacccattttaacaaattcctcatcaaatgaattatctccatatttacttatttcatttctatattctcatgctttttacaaggtacacctatttatcctcttttcatgttatcaaagctcat

SEQ ID NO: 2401 - DNA, 2733 bp, Zea Mays
gcagctagacgcacagccacataggccacgtcgttcgaatttttgtaagccatccgatacaagatcgttggttaccaggcgtgggagcaaaggtagccaaccacacgacgggactcttccagatggagacgaaacaccacacggcggggaagaaaaagagggatcagatctcagacgccggcgtccgtctccgccaagctgcatcgcctcaaacgctttgtcccggccatcgcgccggccatggccgccatgtcgaagaaggcgactctccatccctttcgagttccgagctcattctcccctccgcccctagcctcacgccacgtcccgcggaccgtactatagcctccacagccgtggtcgctcggccacacgtatcggtcgcttcgcatgccatcgctgcggcgacagtcgtgatacctgccttcgtcagcaacacgtcccaacccgactaagcgtcccgggccaccgcgatacttcatttccgaaatcgctgcggcggcagcagttatgcatgccttgctccaaatatataacactgtgagactgagtagcaaatcaagttgaagtcatcggaagttgtcaaacctcttttttttctcttttttgtatgttttttagagtccaatttggctggacctaaaaataatggctacgacttggtccaccctggcttccaacatatgaaacttcttgcgtcttcattaaattgtgctaataaaatgtgtgtttcgttttgttttgtcctgctacaggggtgaactatatgtgggaacactgaacctgcaaccgagactgtagcgattcgacaatatcacaagaggatcatacttctactccatgacaactgtaacctactagagctgaaagaaatacagagcctataagaaggaaatgtacagtaagcaacttaccatatttatttatgacaattgttccaagaattaataagtattccagtgagcgtctcaaaaatggaatcaagagatgagatggtaactagctgaaaacagtaataattagaaacccaagagcgattttgcgacgccctgctgtgagccgaccctagcagtcaaggcttcgtaaatcagatttatctgtcaggtacaatcacaggaaatgttgtggcaaaggtatggcttaagagaaatcatgtacctagatgatttgttgtctatacgattagatggtgctgttcaccttcaattttttcaaatttggcaccactccagtcaccaaccatacatagaaaagttttagtgaagtcaatgaagcaaacattttaatatttcattctatcaataaaagtgtagttttgcttacgataagacctccataaacaataaacacgggtaaatgagagtattgatggttggaatgagtggtggtagcagaatgatatctacatacattggttttaggtaccagcaccttattttttttaataaaaatatgtgtgaacttggaactttttaatatgtgaggaagatgggtagatactgttgttgtgggcagggcagggcacccgagcaaaagcatagatgcgaatggggatgaatatgggttagctctcttcccctatttattggagttggagggatacactgctgctatggtttggtctgtgatgtcgtctcattagaaaaacatttgcttggcttgtatctcatttcctttctcattagaggacttaaactgagcacatgtttggcttatgcgcaatgtatgtggcaagcaaaagcaaatattatcctattaatgtgctcctactaacctgctctgcccacaatttattatgggtagatattgttccaatttattatgcatgttggcttcttgcagggaatgaatacatcttccgtttatatcaattgtgacttagatgtatgtcagtcttagtatgactattaagttgtgacatgaatgtgaattcgataatgtatttcataacttcatctacactacagatgtattgtgttattgttcccattcaccattgaaagtagttgttagatccaaattgatttcacttttaccaagtgatgttgttgctgcttccttataagtgttgctcccatttgattcgtcagattactggcttctgctactttcgagtagtgctgctactttcgagtagtgctgctgctttcgagtggtgttgttgctttcaagttgaagtgagttgttgttgacttccacaacaagctgctacttttagcgaaagtgagtacaaaacaggttgttgttgcatctcgggcaaatagcaatgttgtttattctgctttcaaacagcagtgctggtgccaaaagaatgtttataagaaaattcaaaaccaaacaaaagttgacaacaaacatgatgccataacattctatttgctagcaccatccagaattttaaaaattcagtttgttgccatgaaacagtttgctgccaccgttcagaattcagccatgttcaagtttacaactgtgtgataaagtaaattcagtttgctaccaccatggcaccgtccaaaaatgtatattttgacaaacatacacgaccagaacgatctattttgacaactttaacgagacatggcccattttgtagagcggcaatagagtgacccattttaacaaattcctcatcaaatgaattatctccatatttacttatttcatttctatattctcatgctttttacaaggtacacctatttatcctcttttcatgttatcaaagctcat

SEQ ID NO: 2402 - DNA, 3066 bp, Zea Mays
gcagctagacgcacagccacataggccacgtcgttcgaatttttgtaagccatccgatacaagatcgttggttaccaggcgtgggagcaaaggtagccaaccacacgacgggactcttccagatggagacgaaacaccacacggcggggaagaaaaagagggatcagatctcagacgccggcgtccgtctccgccaagctgcatcgcctcaaacgctttgtcccggccatcgcgccggccatggccgccatgtcgaagaaggcgactctccatccctttcgagttccgagctcattctcccctccgcccctagcctcacgccacgtcccgcggaccgtactatagcctccacagccgtggtcgctcggccacacgtatcggtcgcttcgcatgccatcgctgcggcgacagtcgtgatacctgccttcgtcagcaacacgtcccaacccgactaagcgtcccgggccaccgcgatacttcatttccgaaatcgctgcggcggcagcagttatgcatgccttgctccaaatatataacactgtgagactgagtagcaaatcaagttgaagtcatcggaagttgtcaaacctcttttttttctcttttttgtatgttttttagagtccaatttggctggacctaaaaataatggctacgacttggtccaccctggcttccaacatatgaaacttcttgcgtcttcattaaattgtgctaataaaatgtgtgtttcgttttgttttgtcctgctacaggggtgaactatatgtgggaacactgaacctgcaaccgagactgtagcgattcgacaatatcacaagaggatcatacttctactccatgacaactgtaacctactagagctgaaagaaatacagagcctataagaaggaaatgtatgagatgcaaccaatgtacttctttgccactccttaacttatagtagcattttatgatttgctctctttgaccaattcgtgcctaacttgcaattgaaccaccaaatggtttcagactattttctggattaagctggatcatttgttttctaaagttcaattaattgttatgtcattactcaattcatatcactaatcatatagagcatattctatacttccgtctatattcttttataatgtatacacatatcaagattcaaattttgaaatatgtgaccaataaattgtttatacctactataatactacattcattcactaatgcaggtacagtaagcaacttaccatatttatttatgacaattgttccaagaattaataagtattccagtgagcgtctcaaaaatggaatcaagagatgagatggtaactagctgaaaacagtaataattagaaacccaagagcgattttgcgacgccctgctgtgagccgaccctagcagtcaaggcttcgtaaatcagatttatctgtcaggtacaatcacaggaaatgttgtggcaaaggtatggcttaagagaaatcatgtacctagatgatttgttgtctatacgattagatggtgctgttcaccttcaattttttcaaatttggcaccactccagtcaccaaccatacatagaaaagttttagtgaagtcaatgaagcaaacattttaatatttcattctatcaataaaagtgtagttttgcttacgataagacctccataaacaataaacacgggtaaatgagagtattgatggttggaatgagtggtggtagcagaatgatatctacatacattggttttaggtaccagcaccttattttttttaataaaaatatgtgtgaacttggaactttttaatatgtgaggaagatgggtagatactgttgttgtgggcagggcagggcacccgagcaaaagcatagatgcgaatggggatgaatatgggttagctctcttcccctatttattggagttggagggatacactgctgctatggtttggtctgtgatgtcgtctcattagaaaaacatttgcttggcttgtatctcatttcctttctcattagaggacttaaactgagcacatgtttggcttatgcgcaatgtatgtggcaagcaaaagcaaatattatcctattaatgtgctcctactaacctgctctgcccacaatttattatgggtagatattgttccaatttattatgcatgttggcttcttgcagggaatgaatacatcttccgtttatatcaattgtgacttagatgtatgtcagtcttagtatgactattaagttgtgacatgaatgtgaattcgataatgtatttcataacttcatctacactacagatgtattgtgttattgttcccattcaccattgaaagtagttgttagatccaaattgatttcacttttaccaagtgatgttgttgctgcttccttataagtgttgctcccatttgattcgtcagattactggcttctgctactttcgagtagtgctgctactttcgagtagtgctgctgctttcgagtggtgttgttgctttcaagttgaagtgagttgttgttgacttccacaacaagctgctacttttagcgaaagtgagtacaaaacaggttgttgttgcatctcgggcaaatagcaatgttgtttattctgctttcaaacagcagtgctggtgccaaaagaatgtttataagaaaattcaaaaccaaacaaaagttgacaacaaacatgatgccataacattctatttgctagcaccatccagaattttaaaaattcagtttgttgccatgaaacagtttgctgccaccgttcagaattcagccatgttcaagtttacaactgtgtgataaagtaaattcagtttgctaccaccatggcaccgtccaaaaatgtatattttgacaaacatacacgaccagaacgatctattttgacaactttaacgagacatggcccattttgtagagcggcaatagagtgacccattttaacaaattcctcatcaaatgaattatctccatatttacttatttcatttctatattctcatgctttttacaaggtacacctatttatcctcttttcatgttatcaaagctcat

SEQ ID NO: 2403 - DNA, 2401 bp, Zea Mays
gcagctagacgcacagccacataggccacgtcgttcgaatttttgtaagccatccgatacaagatcgttggttaccaggcgtgggagcaaaggtagccaaccacacgacgggactcttccagatggagacgaaacaccacacggcggggaagaaaaagagggatcagatctcagacgccggcgtccgtctccgccaagctgcatcgcctcaaacgctttgtcccggccatcgcgccggccatggccgccatgtcgaagaaggcgactctccatccctttcgagttccgagctcattctcccctccgcccctagcctgggtgaactatatgtgggaacactgaacctgcaaccgagactgtagcgattcgacaatatcacaagaggatcatacttctactccatgacaactgtaacctactagagctgaaagaaatacagagcctataagaaggaaatgtacagtaagcaacttaccatatttatttatgacaattgttccaagaattaataagtattccagtgagcgtctcaaaaatggaatcaagaggtgaggaaagacatcgccccagttctgtagaggatgccttcgttttcctcgggttttgttgtgtgtcctgcttaccaagcattgatatcaattcgccgatttgatagatgagatggtaactagctgaaaacagtaataattagaaacccaagagcgattttgcgacgccctgctgtgagccgaccctagcagtcaaggcttcgtaaatcagatttatctgtcaggtacaatcacaggaaatgttgtggcaaaggtatggcttaagagaaatcatgtacctagatgatttgttgtctatacgattagatggtgctgttcaccttcaattttttcaaatttggcaccactccagtcaccaaccatacatagaaaagttttagtgaagtcaatgaagcaaacattttaatatttcattctatcaataaaagtgtagttttgcttacgataagacctccataaacaataaacacgggtaaatgagagtattgatggttggaatgagtggtggtagcagaatgatatctacatacattggttttaggtaccagcaccttattttttttaataaaaatatgtgtgaacttggaactttttaatatgtgaggaagatgggtagatactgttgttgtgggcagggcagggcacccgagcaaaagcatagatgcgaatggggatgaatatgggttagctctcttcccctatttattggagttggagggatacactgctgctatggtttggtctgtgatgtcgtctcattagaaaaacatttgcttggcttgtatctcatttcctttctcattagaggacttaaactgagcacatgtttggcttatgcgcaatgtatgtggcaagcaaaagcaaatattatcctattaatgtgctcctactaacctgctctgcccacaatttattatgggtagatattgttccaatttattatgcatgttggcttcttgcagggaatgaatacatcttccgtttatatcaattgtgacttagatgtatgtcagtcttagtatgactattaagttgtgacatgaatgtgaattcgataatgtatttcataacttcatctacactacagatgtattgtgttattgttcccattcaccattgaaagtagttgttagatccaaattgatttcacttttaccaagtgatgttgttgctgcttccttataagtgttgctcccatttgattcgtcagattactggcttctgctactttcgagtagtgctgctactttcgagtagtgctgctgctttcgagtggtgttgttgctttcaagttgaagtgagttgttgttgacttccacaacaagctgctacttttagcgaaagtgagtacaaaacaggttgttgttgcatctcgggcaaatagcaatgttgtttattctgctttcaaacagcagtgctggtgccaaaagaatgtttataagaaaattcaaaaccaaacaaaagttgacaacaaacatgatgccataacattctatttgctagcaccatccagaattttaaaaattcagtttgttgccatgaaacagtttgctgccaccgttcagaattcagccatgttcaagtttacaactgtgtgataaagtaaattcagtttgctaccaccatggcaccgtccaaaaatgtatattttgacaaacatacacgaccagaacgatctattttgacaactttaacgagacatggcccattttgtagagcggcaatagagtgacccattttaacaaattcctcatcaaatgaattatctccatatttacttatttcatttctatattctcatgctttttacaaggtacacctatttatcctcttttcatgttatcaaagctcat

SEQ ID NO: 2404 - DNA, 1576 bp, Zea Mays
cagttcccacgggtattccccatttacatctgtcaggagaggattttttcccatcacagtggggagaactttcctcgtctccatcccaaacgaaggaatttctcgcagaccatctctagctgcagctgcagcagccagccagacgtgtggcgaccagttaccatgggccacaacagatggcacacatatcatatgcacggctgcaacctgtcgctggctcgctgttgctccggcccttctggcgcctggttgtcacgagcaacctgccaggcagccggcggcttgctccagtgacccgttccaggcggcggcccttgagaagtttgagatgacaagcagccagccatcactctcatcattccggcgccccactcaggcagacgagacgcacaaggctggcacgtctcaagggctcaagtcttctgcaaaaacagaggctggactgaagatatcattaaacatggatgcatacagtccgtagcagaggaaaacaacaaaaaaaaattatcctgtggattcccagcacccttttccccatcgtgatgtgcttttctagttcctatcgaatccagattaaaattataatcagtaaagatcacacagattaggactgacttttaagtattcgatgctaaattttacttgcaggttccgccaaacaaagcagagggcgtcgctgccatcgcctctccggtctcttttggaagtgccctctgaattctaccggagaacaaagggaaaaagaaaagaaaaaaggcgacgaggtactccgccggtaaacaagtgcagtaaacgagtgatgacgcgaccatgacaggcactcaggctacttttctcggaccattagtgccagatcaacagatagacaggtctgctcggtaaccagaggacggtcgatggtttcagatttcgttgaccagtgaccagatccagtgacacaaggagccagagcatcactgctctccagctccgtgcaagtcaacggtctgtgggggacgacacgacacgataaaggaaagcagaagaaaattgcattgcgtttagatggaacatgccagatcacttcagttccttgcttggctgtagaaacctgtacctaatttcccaagctttcggctgacttgctggttctgcacgcgggcacgccactatgtacacaaggaaaaaaaataatcaattgtcacactcgtttttttatcttctccgagggcgtagcttgcattgcgagccaaataaaacaaggaggtgacgaagggtgagagaacatttcaagcatatccataccattctcaatgcttgtaagtcatccatgataacggggacatgggacacatgcttgccaatcaccaaatcccgtggaagttcggattttgtttatacagatcaaatcaacaaatgccaacacaccataaaaaacatttcagaaaaaaatgtccagaattggtctccatccgttaccaccaccaactggaggtgagcacaaacttcaggaggagaccatccagagtgcataatgtttacgaatctttaggcctagtttgagaaccccaattttccaagagattttcattttccc

SEQ ID NO: 2405 - DNA, 730 bp, Zea Mays
cacaaataatactaattggaacaagggccatcattggatcactccctctttagcactggataccaagggggtccagtagaacatttcatatattaattctaaacagaggacacagacaaagtataatatgccacacaaaatgatatacacagcatgagaagtcccagttggaaacacatttttttttctctggaacacatggcatagtgttcatcataacccagaagacaattcagatagcctgagagttcccactaggaaaagcacttgaactttggggactccaagcatagtgcgcatcaaaggacaccacttgatgaaagatcaatcaaaacaattatatgtcactgaaaatttcaaagatatgctgctataaaaggaatgtgtccccaataaaggtgtcgcgcaaccttatatagatgtaggtaagaaagaaaacaagctagtatgccatacaaaagtctgtacaactgtaactatacgaatatatttcctttaatatactgacatgggcatggacaatattttattttctatctgaaatccagaaaccaaaggtatacagtgtggtccctgcgagaagtgctgcttatgtcgattaccatgttgaactgcatataacccatttagtgatcagatcagaagatgctactgccacgcggccaaaatgagcaaaagagcaacctttgtatcatatgtatacgggcacaattagcacaggatggtatgg

SEQ ID NO: 2406 - DNA, 447 bp, Zea Mays
atggacgggcgggggccgggcgacgggggttgcgatggggggcgggcggatcctctggaggcgcatggagggtgtcttgggctgcggctgcggcgggcggtgggcgagctggtggtggtgctgcggcggcggtggggacggggtaccggcggtgagctgctggacgatgtcgcggaactggttcttgctgatgttgtagacctgcggctggggctggggagggcggtttgcggcgggctgtggctgcgggggcggcggcggcgtggccttgcggatggagcggccgagcttgttgacgccgaggtgcgggttctggctgccggcggaggtggtgctactggcactgctgctgttgttggaggtggtgcgatccatgggaacgggtcgggggtgaggactaggagccgattgattgggtggtcaattttgggaggagcagggagatga

SEQ ID NO: 2407 - DNA, 1484 bp, Zea Mays
atcaaatccatggcctttcttccacttctgttccatgatttggatcattccagggttcacactgacgctctctctctctcacacaacaccaaaaaaaaattgactgcttgctagagactggggatccatgtattctgttcactagtcttcaccaatccttccaacctaggacagatcttacgaaattcggattctcactacgatggttttcactcgggatcctacaatcattatcgccatcttgacaaatatgtctccttttgaatcttgaccaagcaatgagagctatggtcagtcgaccgtcgaggatccagaaggctgaggttgtctatcctgctggatgctgcgagtgcgagctgtgtccccacctccagcgcaaatgtgaaatgatgatgctttgtgcagaggctctccctccctcactctcttgtcctggcatccaacattccaactttccatatggaattgtgaaagaagggggccttttttttcttcttcagcttgcggcacagttggttaaggttgcttcttctgatggcaaaatggctgtatccatagctggacatgatgacagcaactgtgtatgatatggttcaagtgcattagttgcttgctcaacgttccaatggtggctcccttgtgatatcttggcgttgtctccttagatgctagcatggtgctctgttgagttgtttcttcagccttttcattcatgggccatcgatttcttcagcgggttcttcatttagcacttcaagagcaagcgcagctctggtaggaagtgcagctccagcagccaggagaatacaagtcatgatgcgttcatcacaaaatcagtgttcgttcaaatgtatagtgctcagatgggatctcaaatgggaccccagttcacccgtccgtcacaatctggacagacaccaaacaccaatgaaacacaggtatagttttgtagtatatttactttcatttacaattataatcatgcatcgttttatttgataatagggttctgagaccggacaaggaaacccacagatggacatatattggtcgatgccccctagaggacagattcttcctcctccacaaccaggcatgggatattggccgccaccaccatggggatatcctacacatccaatggggccttggggacgcccccatggccaacacagccactttcgtcaccagcggattccacaactcatcaagtgactcctccccctcacgataactttgtggacagatgtctcaattctagtggtggagctacaaacaacaatccgatgtcctgatcgagagcgatggagctaatgtttgaacttgtgtatttgaacttgtgaactataaatgtgaactatggatgtgaactatggatgtgaacttatgtatttggacttaattatgtgaatttgtgaacttatgtatttggacttgtgtgaatttgtgatatgaacatatatccatgtgtttgaaatctgtat

SEQ ID NO: 2408 - DNA, 4062 bp, Zea Mays
gggtggggtcgaaggggaggaggtgctgccgttgccgtagatgttggtctggacgcgccactcgtggccccgccggttgcccagcagctcgaagtccacctcgtcgtggttgccagggaacacgtccgcgttcgacagctgatcaatgcacacaacgcatacgcaacttaattttttaataaaaaatttacgtatatgttagatgcatataataaaaatttatataagtagtgttagatgtacgtatatgttattatgttagaccctcaaatagagagctaaagttcagcatataaatagtgtttagatgtaagtgctaaagtttagcacataaatatagaaagacatatatatctctaattaatgtgggatgtgaagaaagaactatggtgagaaggatatgagatatcttttctcaccctacatcagttttatctcactttagcatgtcttgaagagtgaaactgccaatgggtgctaaattttatcgatttatttttagcacattttaccactcgtgcttggatttctaagtgctaaaattttgctaaaagtgtagtgctaaattttagcaccattgatccaaacaagccctaatttaggaggaaatgattactaaatactattggtttcattctaaatttagatcgttttagacttctagagctaattattagtcagctaataaattgttagatggttttagctgggttagagcagttaacaactaatagctatttaagagatataactaataattaattgttctattatctgactcattctaaatctcttagctagatgctaattattagttttaaaggtttagaacatgtcttaagtatgacaacatatcagggtccgtttgcaaccatagtatttttctagttcgaagacaatactatggtatttgaggatatatggtattttagacaaaaaaaggagtttggaagactacttagaaaatttgtattttaaaccatggtttcatcgataccacaatctttttgggtctaaaaaactttcgcctagatcaaagcttttcgctggcgcatggctacagccttgccctttctccttccatcttatgctgcaaccaaaatattgtgtcttcaaacaggtgttggattagactattgtaaaatatatcatagttgtatcatgacattcataaactatggtattaaaactatggtttaaaaaaacagtgttcctaaataggctctcaggtgtaactgaacccattggcgtaattgtgcaaccaagacaagtggagatggggaggagctttttaaaaatatctaaagatagatgggtgggttgttttgaaaaagaatatttttaatatgtctagtcaatatgttattgtagtttgttaatatgtttagttattgtagtttgttaatatgtttagttcaagacaacctctttaatatatttctaagatttaaggtatctataaaagctgggtataaaaaaaatcaaaaatgacttataatttaaaatagaggaagtttgagagcaccctctctatcctaccttatatctcactttctttttcaaactccactctataaataatgtagtctacaacgtaaaacagtgttttgcatgaccatatacatgttatgctgatcgcggacttataaagaatggaccaatgcatgccaaagaaaaacaggatacaggaaacatagctagagtttaatgtttcttgttaaaaaaatgaagaacaactagaaacttgccaagcgtaacaaagtgtatcagcaaggacgtgacacgtgtccatgtagctttaagaatgatgatgatgatgccgccatgcgcggctagaagaaaggggagatgcgagaaattttgtaggcgccggctatatattccgtctttgttgtctgaagataatgtacatgcgggagtgcgtgacaggtacatgcctcctaccatctccaccacacgctactgatgttgtgtgctagcaaacgtaatggccgtgatcgtctttaatggatggtttttgctttcggtcagcaacgtaaccactactcttaacaaattaacaatcggctactgatcatgagccataaagcactgaggcaacgacgcacttgtagtcatcgagctacaaaagctaaggaggtgtttgaatgcactagagataatagttagtgactaaaattagttgaaatatccaaacaccatagctaatagttcagctattagctatttttagtaaattagttaatagttgagtagttatttgttagctagctaattttactaacaatttttggccaactaactattagttttagtgcattcaaacatcccctaagatggaaatacggacaataacaaatataacccgttacatccatcttgccgggtgggaaagctagaccatgatatacatgactttcttttgctgagattgatttgttgaccagagaattaggaaggatctatagaaagaaatctctttaaattcctctcttaatcctcttcaattccctggtcatcaattaactctaaaccagattcgattttgagtcatttctccattctctacccattccctcataataaaagaataaaaaaaactagtcaagcctgcatgaaaaaatggcttctctagctatggctactaataccatagctcagaactaggggaatgtatagaaaacttctaagctattgtttggttcatattttcttaaggaaatgaaaatatgatctcttaccggtggtaatggttataattatattggatactagtatctagtactacttaaaagagctcaaccaaacaaaagtattgatatccattatcctatataacccgtttgtgttatattttggcgaaccaaataccacaattttaggtaggcatggataacccttttgggtcgttgtcacagaaaacggaagaaaaaaacccaatatctagatagtttttttgcaaccactcttttctttccacggcgtactagctagggtactttctggtaaccaacttgtgtagtaggcacgccacacgcttcgtgtaagcaagtggcccggtgcacacatctatatcaacacattactgtgtgtatatttacacatgcatctattcattattatttattggggaatttattaattagcaatgtgtggtatggaagaagcctttaattattattttttaaaattaaaaatgggcttcatagcttttataagaagtatatgtaggcactcgtcaaattccacataaaaactttagactatgtatatgtacggatgaagaaatcaattaacatcgatcgaggagcaagtcatcctgagaacttttgctccatgccgcagttagtcttactatttgacatcatcaaccgcgacatataattaagcatctagacagggatatatatcgatcgataatggaattattcgaggtacggtggagataagaacgaagcgtcttacgtagaaggcgacgacgacaccggcggtgtgatggtcgggcagcttgatggaagcgctgaagaatccatggtggtaagacgatcgggacacgaacccggagcctggcggtgcatgggcatcatgattggtgaatcaacaagaagctactagaagaaacccgaatggagaagaagaggaggaagaaacaaatttgaagagcggggacgcagtagctagagctagctagctaggtaggtagctgcagaggattattccttctgtacgtcttaccggtgtggcggtcaagtttgaggcggacggagcggccgccgggcgacggtactaggttgccgccgccgaacagcggcatgtagccggcttcgaacaacgtcaccggcgacgacgcggccgcgagagccgccgcccagctgagcatcaggacggcgagagcagcactcgatgatgccatggctgctagcgaccgtatcccgcccgactagcgcacacgtcctatatatatatatgcccagcaaggagtcaagcccctgacaggttgcatacatttgctagctataaggctagggaagcaagcaagagctaccacggcctcgcgctctg

SEQ ID NO: 2409 - DNA, 1994 bp, Zea Mays
agccaaatcattcacgtattcatcttcaagccagccgtctccttatcctgcgatgccgctcacctgggctcatcttccagccgccctctccgcccagcagcagagcacaccatcctctcaactcggatccccaagccctcgcctccagctcttgccacggcatccatcccctgctcggacctccacccggccgcgtcctcgccggtggccagcgccgctgcatcgcccttcctagcgtcggccttggcaccgcttccccgagcgccccagtcgagctcgcccatcctctgctctagccctttctccacgccgtcgctgagctcgcccctcccctcagccatggacacgacgacctgcagcccttcttggtggccaagcccatcttcctgctcgcgccccctcttttccacctctgcgcgtatcagctcgtccaacccccatggtgtttcctccctctcggctcccttgctccctccccatggcgttccccctggatgttggtgatctgttccccacggtgcaggcaaatgttctttccctccctgcagcagcaccttggtggttgtcgagcagcacgtcgcgcttgcgcagcctcggtcacgacgttgttcaccccgctaaccattggtgtcatacctcacgtgtcatgtgttcgccgaaatgcctaaacatgtagtctgtcgtcgtcgtatccacagtcaattttagtcatggtgagccgatttacttttgttgttagttggtttgttggtgaattgaatatgtattagtcacgatggttttcttgttcatagcgtcagtgtgttgtgtgacgatttctagatctgtagccgtagttttgtgctaatttcatatgtgtgtagtatgggagagatattccaggtgtttaataacttgggggcatagtcctagcgtgacgctcctcatgtgttcggtgatacacgtaaaccagacagcgtcgttgatttcatcatctcaagtcaaatttagttttggtgtgccatgaagtaatctcctgatctataagggtttcctgtgtactgatcctccacaacctttagggaagtatgggtcgaaagtgactaaattggttctatatgttataagtggtctatcggtgatgtgtaggttgggtttaatgtcttaagcaactcaccgataagctctattactattgattacattacatgtattgattttatgaagctgaagttctgtcttagtcctcgttatcttctaatgtttggtttagttctagattgcttatgactttattttagtctagccgagtatgactactctttcgtttattacacaagttccttagttaattgctaggcaagtgtgatgatatgttgtatgaaatatgcttggtgaacgcatatgcattgatatgattgtgttaataaaccatgaagggtagagttttgtttatggataaattacttatacaaagaacatgttaacacttgctgtttggactgcaggtatcattttagttacgtaggtaattgagtgaagtaaaccatgttttatgtaaacgtgttatatagaaaagttatagataactactttatcttgctggtgctaaaatttcatgaccataggtctagtagtttaaaagatatgattttcttaagtccagtttcagaatctgtctaaattctgtacatgtttcaaaaattggattgtttggctaagttaaattgagaatcagtcattagtaattataggagaattgtagtactttccttaacctttccaacaaattttggatcaccctttttggtgatctataaattaagttacaactgtttgagttaggatctctgaatctgtcccaatttggacagcagagcctttctcatgttttctgactttgctatatattaaattaacctaggatgttcataaatgaattgtagataattctattatctttctaaaaagtctaggatcacctgatttggatgtctgaaactccagttatgatt

SEQ ID NO: 2410 - DNA, 1862 bp, Zea Mays
agccaaatcattcacgtattcatcttcaagccagccgtctccttatcctgcgatgccgctcacctgggctcatcttccagccgccctctccgcccagcagcagagcacaccatcctctcaactcggatccccaagccctcgcctccagctcttgccacggcatccatcccctgctcggacctccacccggccgcgtcctcgccggtggccagcgccgctgcatcgcccttcctagcgtcggccttggcaccgcttccccgagcgccccagtcgagctcgcccatcctctgctctagccctttctccacgccgtcgctgagctcgcccctcccctcagccatggacacgacgacctgcagcccttcttggtggccaagcccatcttcctgctcgcgccccctcttttccacctctgcgcgtatcagctcgtccaacccccatggcaaatgttctttccctccctgcagcagcaccttggtggttgtcgagcagcacgtcgcgcttgcgcagcctcggtcacgacgttgttcaccccggggaacttggtacagccatccatggtatcagaatatgacctgggaggagaaggggacctgttcaaagctccagaagccatcatcgaggaaccgctgctcctgaactgtctgtctgattctgttcatttgttgttgtgtaggctgggcttgtgccaagcttgaatcctcttgtgaaggagtttctcaatgctgctgatgacaagcggaaggaagtcctctctaaaatagaagaggatgttgctaagctcagcggttctgcagccaaatctcgcgtctagaattgccgctagatgggggaggtgagcggctcctggtctcttcgatccaatgtaatggtcagctaagaagctacaagtgaatgccgaggagagcagcgatgacttggctaacccaccgaaggtagaggagaagcttggtgctgtccctcatggcctgtccaccgactctgaggttgcccagagggaagccgagtctatctctaggaagactctcaggagctcagccgagaagtttgagttccaagctgaggtttccagactcatggacatcatcatcaactcactctacagcaacaaggatatcttcctgagggagctcatatctaatgcctctgatgctggataagattaggttcctttcccttactgataaggaagttctgggtgaaggggacactgcaaagcttgagattcagattaagttggacaaagagaagaaaatcctctccattcgggataggggtattggtatgaccaaggaagatcttattaagaaccttggaacgattgctaaatctggcacttcaggaacaggagctgctcgagtctcttgtcgaagctgatacgagaaggcaggaaagagctaaaaagatggaagaaaagaaagtgtatctgcaactatacgaagcaatggaggcgttggtcaagatcaatctggagacgaacaagatcatggacttcatcaagtttgacgtcggcaacgtggtcatggtgactggcgggaggaacaccgggcgtgtaggagtcatcaagaacagggagaagcacaagggcagctttgagaccatccacgtgctgcttggagctttttgctatgtctagttttctcctatttgttgtacaggaaaacatagaatagaattcaaatttggtggtcgcaaaagtgtggagactttaattcatataaagttaggcttaacattagtgcaaacagttgtattttagtttagatttagagtacacttatgtatgcattgtttgacaatgtttatttatgatatattaaatggtacttatttatattatattaattataatgttgttcaat

SEQ ID NO: 2411 - DNA, 1787 bp, Zea Mays
agccaaatcattcacgtattcatcttcaagccagccgtctccttatcctgcgatgccgctcacctgggctcatcttccagccgccctctccgcccagcagcagagcacaccatcctctcaactcggatccccaagccctcgcctccagctcttgccacggcatccatcccctgctcggacctccacccggccgcgtcctcgccggtggccagcgccgctgcatcgcccttcctagcgtcggccttggcaccgcttccccgagcgccccagtcgagctcgcccatcctctgctctagccctttctccacgccgtcgctgagctcgcccctcccctcagccatggacacgacgacctgcagcccttcttggtggccaagcccatcttcctgctcgcgccccctcttttccacctctgcgcgtatcagctcgtccaacccccatggcaaatgttctttccctccctgcagcagcaccttggtggttgtcgagcagcacgtcgcgcttgcgcagcctcggtcacgacgttgttcaccccggggaacttggtacagccatccatggtatcagaatatgacctgggaggagaaggggacctgttcaaagctccagaagccatcatcgaggaaccgctgctcctgaactgtctgtctgattctgttcatttgttgttgtgtaggctgggcttgtgccaagcttgaatcctcttgtgaaggagtttctcaatgctgctgatgacaagcggaaggaagtcctctctaaaatagaagaggatgttgctaagctcagcggttctgcagccaactaagaagctacaagtgaatgccgaggagagcagcgatgacttggctaacccaccgaaggtagaggagaagcttggtgctgtccctcatggcctgtccaccgactctgaggttgcccagagggaagccgagtctatctctaggaagactctcaggagctcagccgagaagtttgagttccaagctgaggtttccagactcatggacatcatcatcaactcactctacagcaacaaggatatcttcctgagggagctcatatctaatgcctctgatgctggataagattaggttcctttcccttactgataaggaagttctgggtgaaggggacactgcaaagcttgagattcagattaagttggacaaagagaagaaaatcctctccattcgggataggggtattggtatgaccaaggaagatcttattaagaaccttggaacgattgctaaatctggcacttcaggaacaggagctgctcgagtctcttgtcgaagctgatacgagaaggcaggaaagagctaaaaagatggaagaaaagaaagtgtatctgcaactatacgaagcaatggaggcgttggtcaagatcaatctggagacgaacaagatcatggacttcatcaagtttgacgtcggcaacgtggtcatggtgactggcgggaggaacaccgggcgtgtaggagtcatcaagaacagggagaagcacaagggcagctttgagaccatccacgtgctgcttggagctttttgctatgtctagttttctcctatttgttgtacaggaaaacatagaatagaattcaaatttggtggtcgcaaaagtgtggagactttaattcatataaagttaggcttaacattagtgcaaacagttgtattttagtttagatttagagtacacttatgtatgcattgtttgacaatgtttatttatgatatattaaatggtacttatttatattatattaattataatgttgttcaat

SEQ ID NO: 2412 - DNA, 1964 bp, Zea Mays
agccaaatcattcacgtattcatcttcaagccagccgtctccttatcctgcgatgccgctcacctgggctcatcttccagccgccctctccgcccagcagcagagcacaccatcctctcaactcggatccccaagccctcgcctccagctcttgccacggcatccatcccctgctcggacctccacccggccgcgtcctcgccggtggccagcgccgctgcatcgcccttcctagcgtcggccttggcaccgcttccccgagcgccccagtcgagctcgcccatcctctgctctagccctttctccacgccgtcgctgagctcgcccctcccctcagccatggacacgacgacctgcagcccttcttggtggccaagcccatcttcctgctcgcgccccctcttttccacctctgcgcgtatcagctcgtccaacccccatggtgtttcctccctctcggctcccttgctccctccccatggcgttccccctggatgttggtgatctgttccccacggtgcaggcaaatgttctttccctccctgcagcagcaccttggtggttgtcgagcagcacgtcgcgcttgcgcagcctcggtcacgacgttgttcaccccgctaaccattggtgtcatacctcacgtgtcatgtgttcgccgaaatgcctaaacatgtagtctgtcgtcgtcgtatccacagtcaattttagtcatggggaacttggtacagccatccatggtatcagaatatgacctgggaggagaaggggacctgttcaaagctccagaagccatcatcgaggaaccgctgctcctgaactgtctgtctgattctgttcatttgttgttgtgtaggctgggcttgtgccaagcttgaatcctcttgtgaaggagtttctcaatgctgctgatgacaagcggaaggaagtcctctctaaaatagaagaggatgttgctaagctcagcggttctgcagccaactaagaagctacaagtgaatgccgaggagagcagcgatgacttggctaacccaccgaaggtagaggagaagcttggtgctgtccctcatggcctgtccaccgactctgaggttgcccagagggaagccgagtctatctctaggaagactctcaggagctcagccgagaagtttgagttccaagctgaggtttccagactcatggacatcatcatcaactcactctacagcaacaaggatatcttcctgagggagctcatatctaatgcctctgatgctggataagattaggttcctttcccttactgataaggaagttctgggtgaaggggacactgcaaagcttgagattcagattaagttggacaaagagaagaaaatcctctccattcgggataggggtattggtatgaccaaggaagatcttattaagaaccttggaacgattgctaaatctggcacttcaggaacaggagctgctcgagtctcttgtcgaagctgatacgagaaggcaggaaagagctaaaaagatggaagaaaagaaagtgtatctgcaactatacgaagcaatggaggcgttggtcaagatcaatctggagacgaacaagatcatggacttcatcaagtttgacgtcggcaacgtggtcatggtgactggcgggaggaacaccgggcgtgtaggagtcatcaagaacagggagaagcacaagggcagctttgagaccatccacgtgctgcttggagctttttgctatgtctagttttctcctatttgttgtacaggaaaacatagaatagaattcaaatttggtggtcgcaaaagtgtggagactttaattcatataaagttaggcttaacattagtgcaaacagttgtattttagtttagatttagagtacacttatgtatgcattgtttgacaatgtttatttatgatatattaaatggtacttatttatattatattaattataatgttgttcaat

SEQ ID NO: 2413 - DNA, 1662 bp, Zea Mays
caataagttataaactgttcaggattccctcgtaggcttttcatgttctggtactggatgtgcagttttgggaggcattgctacagagataggacttctagctgaaattgttgcccattgatcacgctttatcctattcctaagttatttgatgaatgttcatgctgtttgtgttctcagttgtcactatcaaataggtagttatccgagggtggtctcattgactgcagatctctaggtgatagctgggcatgaaggaaccagtttgcatctattcagacctacaaccttcaacttgcattgtgtttgttcagtgtcttctaccttgaagtagttaatgattagggtcattattgcaggtcttactgctattttttgcttgggcttgtcatcgtggattatgtgttgggggggaacttggtacagccatccatggtatcagaatatgacctgggaggagaaggggacctgttcaaagctccagaagccatcatcgaggaaccgctgctcctgaactgtctgtctgattctgttcatttgttgttgtgtaggctgggcttgtgccaagcttgaatcctcttgtgaaggagtttctcaatgctgctgatgacaagcggaaggaagtcctctctaaaatagaagaggatgttgctaagctcagcggttctgcagccaactaagaagctacaagtgaatgccgaggagagcagcgatgacttggctaacccaccgaaggtagaggagaagcttggtgctgtccctcatggcctgtccaccgactctgaggttgcccagagggaagccgagtctatctctaggaagactctcaggagctcagccgagaagtttgagttccaagctgaggtttccagactcatggacatcatcatcaactcactctacagcaacaaggatatcttcctgagggagctcatatctaatgcctctgatgctggataagattaggttcctttcccttactgataaggaagttctgggtgaaggggacactgcaaagcttgagattcagattaagttggacaaagagaagaaaatcctctccattcgggataggggtattggtatgaccaaggaagatcttattaagaaccttggaacgattgctaaatctggcacttcaggaacaggagctgctcgagtctcttgtcgaagctgatacgagaaggcaggaaagagctaaaaagatggaagaaaagaaagtgtatctgcaactatacgaagcaatggaggcgttggtcaagatcaatctggagacgaacaagatcatggacttcatcaagtttgacgtcggcaacgtggtcatggtgactggcgggaggaacaccgggcgtgtaggagtcatcaagaacagggagaagcacaagggcagctttgagaccatccacgtgctgcttggagctttttgctatgtctagttttctcctatttgttgtacaggaaaacatagaatagaattcaaatttggtggtcgcaaaagtgtggagactttaattcatataaagttaggcttaacattagtgcaaacagttgtattttagtttagatttagagtacacttatgtatgcattgtttgacaatgtttatttatgatatattaaatggtacttatttatattatattaattataatgttgttcaat

SEQ ID NO: 2414 - DNA, 1819 bp, Zea Mays
gttataaactgttcaggattccctcgtaggcttttcatgttctggtactggatgtgcagttttgggaggcattgctacagagataggacttctagctgaaattgttgcccattgatcacgctttatcctattcctaagttatttgatgaatgttcatgctgtttgtgttctcagttgtcactatcaaataggtagttatccgagggtggtctcattgactgcagatctctaggtgatagctgggcatgaaggaaccagtttgcatctattcagacctacaaccttcaacttgcattgtgtttgttcagtgtcttctaccttgaagtagttaatgattagggtcattattgcaggtcttactgctattttttgcttgggcttgtcatcgtggattatgtgttgggggtactaacttatccaatttactaattcttgtatatgaaccatgatacttgtgagactgcttcgaacctgtgacatggtgacttagagcaactctcgctattgtaccagccctgcttcaaacccgtgacatggtgacttgagacctctctcgctattgtaccaggggaacttggtacagccatccatggtatcagaatatgacctgggaggagaaggggacctgttcaaagctccagaagccatcatcgaggaaccgctgctcctgaactgtctgtctgattctgttcatttgttgttgtgtaggctgggcttgtgccaagcttgaatcctcttgtgaaggagtttctcaatgctgctgatgacaagcggaaggaagtcctctctaaaatagaagaggatgttgctaagctcagcggttctgcagccaactaagaagctacaagtgaatgccgaggagagcagcgatgacttggctaacccaccgaaggtagaggagaagcttggtgctgtccctcatggcctgtccaccgactctgaggttgcccagagggaagccgagtctatctctaggaagactctcaggagctcagccgagaagtttgagttccaagctgaggtttccagactcatggacatcatcatcaactcactctacagcaacaaggatatcttcctgagggagctcatatctaatgcctctgatgctggataagattaggttcctttcccttactgataaggaagttctgggtgaaggggacactgcaaagcttgagattcagattaagttggacaaagagaagaaaatcctctccattcgggataggggtattggtatgaccaaggaagatcttattaagaaccttggaacgattgctaaatctggcacttcaggaacaggagctgctcgagtctcttgtcgaagctgatacgagaaggcaggaaagagctaaaaagatggaagaaaagaaagtgtatctgcaactatacgaagcaatggaggcgttggtcaagatcaatctggagacgaacaagatcatggacttcatcaagtttgacgtcggcaacgtggtcatggtgactggcgggaggaacaccgggcgtgtaggagtcatcaagaacagggagaagcacaagggcagctttgagaccatccacgtgctgcttggagctttttgctatgtctagttttctcctatttgttgtacaggaaaacatagaatagaattcaaatttggtggtcgcaaaagtgtggagactttaattcatataaagttaggcttaacattagtgcaaacagttgtattttagtttagatttagagtacacttatgtatgcattgtttgacaatgtttatttatgatatattaaatggtacttatttatattatattaattataatgttgttcaat

SEQ ID NO: 2415 - DNA, 1787 bp, Zea Mays
gttataaactgttcaggattccctcgtaggcttttcatgttctggtactggatgtgcagttttgggaggcattgctacagagataggacttctagctgaaattgttgcccattgatcacgctttatcctattcctaagttatttgatgaatgttcatgctgtttgtgttctcagttgtcactatcaaataggtagttatccgagggtggtctcattgactgcagatctctaggtgatagctgggcatgaaggaaccagtttgcatctattcagacctacaaccttcaacttgcattgtgtttgttcagtgtcttctaccttgaagtagttaatgattagggtcattattgcaggtcttactgctattttttgcttgggcttgtcatcgtggattatgtgttgggggtactaacttatccaatttactaattcttgtatatgaaccatgatacttgtgagactgcttcgaacctgtgacatggtgacttagagcaactctcgctattgtaccagccctgcttcaaacccgtgacatggggaacttggtacagccatccatggtatcagaatatgacctgggaggagaaggggacctgttcaaagctccagaagccatcatcgaggaaccgctgctcctgaactgtctgtctgattctgttcatttgttgttgtgtaggctgggcttgtgccaagcttgaatcctcttgtgaaggagtttctcaatgctgctgatgacaagcggaaggaagtcctctctaaaatagaagaggatgttgctaagctcagcggttctgcagccaactaagaagctacaagtgaatgccgaggagagcagcgatgacttggctaacccaccgaaggtagaggagaagcttggtgctgtccctcatggcctgtccaccgactctgaggttgcccagagggaagccgagtctatctctaggaagactctcaggagctcagccgagaagtttgagttccaagctgaggtttccagactcatggacatcatcatcaactcactctacagcaacaaggatatcttcctgagggagctcatatctaatgcctctgatgctggataagattaggttcctttcccttactgataaggaagttctgggtgaaggggacactgcaaagcttgagattcagattaagttggacaaagagaagaaaatcctctccattcgggataggggtattggtatgaccaaggaagatcttattaagaaccttggaacgattgctaaatctggcacttcaggaacaggagctgctcgagtctcttgtcgaagctgatacgagaaggcaggaaagagctaaaaagatggaagaaaagaaagtgtatctgcaactatacgaagcaatggaggcgttggtcaagatcaatctggagacgaacaagatcatggacttcatcaagtttgacgtcggcaacgtggtcatggtgactggcgggaggaacaccgggcgtgtaggagtcatcaagaacagggagaagcacaagggcagctttgagaccatccacgtgctgcttggagctttttgctatgtctagttttctcctatttgttgtacaggaaaacatagaatagaattcaaatttggtggtcgcaaaagtgtggagactttaattcatataaagttaggcttaacattagtgcaaacagttgtattttagtttagatttagagtacacttatgtatgcattgtttgacaatgtttatttatgatatattaaatggtacttatttatattatattaattataatgttgttcaat

SEQ ID NO: 2416 - DNA, 983 bp, Zea Mays
agaagctacaagtgaatgccgaggagagcagcgatgacttggctaacccaccgaaggtagaggagaagcttggtgctgtccctcatggcctgtccaccgactctgaggttgcccagagggaagccgagtctatctctaggaagactctcaggagctcagccgagaagtttgagttccaagctgaggtttccagactcatggacatcatcatcaactcactctacagcaacaaggatatcttcctgagggagctcatatctaatgcctctgatgctggataagattaggttcctttcccttactgataaggaagttctgggtgaaggggacactgcaaagcttgagattcagattaagttggacaaagagaagaaaatcctctccattcgggataggggtattggtatgaccaaggaagatcttattaagaaccttggaacgattgctaaatctggcacttcaggaacaggagctgctcgagtctcttgtcgaagctgatacgagaaggcaggaaagagctaaaaagatggaagaaaagaaagtgtatctgcaactatacgaagcaatggaggcgttggtcaagatcaatctggagacgaacaagatcatggacttcatcaagtttgacgtcggcaacgtggtcatggtgactggcgggaggaacaccgggcgtgtaggagtcatcaagaacagggagaagcacaagggcagctttgagaccatccacgtgctgcttggagctttttgctatgtctagttttctcctatttgttgtacaggaaaacatagaatagaattcaaatttggtggtcgcaaaagtgtggagactttaattcatataaagttaggcttaacattagtgcaaacagttgtattttagtttagatttagagtacacttatgtatgcattgtttgacaatgtttatttatgatatattaaatggtacttatttatattatattaattataatgttgttcaat

SEQ ID NO: 2417 - DNA, 3386 bp, Zea Mays
ggttgctccaaccgaacctccctcctccccaccccccataaaagtaaccaccacccgcgtctcccccgttccgtcccgtcccgtcccgtttactccacccctcatctctccttccgcctcctcccccttccccccgcgggtggtcgccggccaccgccggtggggcccactgcccggtgctcccattgctggcctggccctccccaccgcctctgtccggccggcgtcgcgcgcgaaaccaaccgaccccaaggagagagagggagagtgagaggaacaggaggagaccgcctgcctcggatccccggcctctcccgcgcgccggggggacctccggaggtgaatgtgggacctgtgccgccggggatttctctagaggcttctccgacccaccgccctgcgacgcgaacgcgacatggtggagggtaggagctatctccctgcagaggtcaggaacggcctcgagaccctgaagcggaggaggctcgagagagtgcgtttgagtgctcagaacgaagctggcgacaatcctgctgtggctgcgagaagtggcggtgatgccttgcggagccccgctaactgtggagtcagattgcattccaacaacagtacaggtttacctggaaatgtccatgacaagagtccttttgcaaagcgcaaggtggagaagtttgatatgtccaaccttgagtggatagacaagattccagagtgccctgtgtattgtcccaccaaggaggaatttgaggatcccattgcatatatacagaagatttcacctgaggctgctaaatatggtatttgtaaaatcgtctctcctgtatgtgcgtctgttcctgccggtgttgtgctgatgaaggaacatcccaattttaagttcatgactagagttcagccccttcgactcgctgaatgggctgaggatgatacagtcactttcttcatgagtggaagaaagtacaccttccgggactatgagaaaatggcgaacaaagtgttctctaagaaatattccagctctagttgtctcccagctaggtatgtggaggaggagttctggcgtgaaattgcttttggcaaaatggatttcgtagaatatgcttgtgacgttgatgggagtgccttctcttcatctcctcatgatcaacttgggaaaagcaactggaacctcaagaatttttcatggctccccaattctgttctaagacttcttcagacgccaattccaggagtgacagatccaatgctttatattgggatgctcttcagcatgtttgcgtggcacgtggaagaccattacttgtacagcatcaattaccatcactgtggggcatttaaaacatggtatgggataccaggcgatgcggctcctgggtttgaaagggttgctagccagtacgtatataacaaggacattttgattggtgatggagaggatgcagcatttgatgtcctactagggaaaacaacaatgttccctccaaatgtcttgctagatcacaatgttcctgtctataaagctgtacaaagacctggagaatttgttattacttttcctcgttcttaccatgcaggcttcagtcatggcttcaattgtggagaggctgttaattttgctattggcgattggtttcctcttggttctctggctagcaagcgctatgcacttctgaacagaactccattgcttgcacatgaggagctactttgtcgttctgctgtgcttctatcccaaaagctgttgaactgtgatccaagatccttggacaagttggaacatccatattcccagaattgtgtgaaatcctgctttgtgcggttgatacgattccagcgacgtgctcgtggccttcttgctaaaatgggttctgaaatatgctataagccaaagacatttccaaaatctgtcctgtagcatttgtcggcgtgattgctatatcacacacgtgttgtgtagatgtaactttgatcctgtctgcctacatcatgaacaagaactgcggagctgcccttgtaagtccaatcgcgttgtctatgttagagaggacatactggagctagaggctctatcaagaaaatttgagcaggatgtcagctcgtataaggaaggaagttgcattagcccatgtaaggaggttgagatctctgatactactgatgaacaacttccaaatcttgggattactctggatttcgttaatagtaaagctggtagctcaggctttatgactgttgatggaggaaacagttcttctgcagtatcaattttgacatcttctgtgcatcatgaggcatataagcatacagaagcaagggcaataaatacatcaatgaccaaaggaacttacactatggatgagagttcatccggcatagatggtgcttgtaatgaacacggttcatgtaatgcttcagccatggaatgcagtgataattcggattcggagtgtgaaatcttccgagtcaagcgcaggtccacctcatttgacaaacctacttctgaagctaagacatcaaccttgtctgaacagcaggttctgaggcggctgaagaaggtacatcctgaagtacagcaagtcatcagtaagcgtcaagaagaatctggtaatggttcagttcgcgctgcccacatgagccagaaaagctcaaatcctgcccctgctgatgacgaaacagaggacatggctcccataatgtggagaataaagcggcgacagtcagaaacccaagatgctacatgtcctggtacgagaccgcagtcatatccgccttccagtggtggttctggagaagagtttgtggaaagaactagagatgctgcagtagaactccgtccaaaacgagtgaaaatccggctaccttctaatgccagtaggcagattgagcagcagcgcagttcagggcagagatttgctagggaggacaggttgccgcttggttttccacgtacattttagggaatcacagggcctccaatttgaggccactgggggcacgcttagaagatacacgtgataatattcttgttgctggaggttccgtgtcactgccgatagctctttgatgcctggctatcagtgacacagattaaagagaacctcgctaccttgatatgtccgctagtgtttagagcatgtagctagcttagctgttatctctctcactgtaccaacggcctttcccttgtaatttcctgtaaacaggcttagctgctacactatggctaactctattcttttgttggtttagccttaacgttaaattcaatgcatttcttttttggttagttggtacttgttatggtgttgctgctctcaactgtgggtggaatattctgatggcatgatactgattattgctgtcaatagtaacaactcggtttttac

SEQ ID NO: 2418 - DNA, 3238 bp, Zea Mays
ctcctgtagatctgcgtcaatttcctcctccactcgcgcgctttttcctccagtcgccgcggcaattaatcaccaccaacactactactagtagtatcgtatcgcctggtggagggtaggagctatctccctgcagaggtcaggaacggcctcgagaccctgaagcggaggaggctcgagagagtgcgtttgagtgctcagaacgaagctggcgacaatcctgctgtggctgcgagaagtggcggtgatgccttgcggagccccgctaactgtggagtcagattgcattccaacaacagtacaggtttacctggaaatgtccatgacaagagtccttttgcaaagcgcaaggtggagaagtttgatatgtccaaccttgagtggatagacaagattccagagtgccctgtgtattgtcccaccaaggaggaatttgaggatcccattgcatatatacagaagatttcacctgaggctgctaaatatggtatttgtaaaatcgtctctcctgtatgtgcgtctgttcctgccggtgttgtgctgatgaaggaacatcccaattttaagttcatgactagagttcagccccttcgactcgctgaatgggctgaggatgatacagtcactttcttcatgagtggaagaaagtacaccttccgggactatgagaaaatggcgaacaaagtgttctctaagaaatattccagctctagttgtctcccagctaggtatgtggaggaggagttctggcgtgaaattgcttttggcaaaatggatttcgtagaatatgcttgtgacgttgatgggagtgccttctcttcatctcctcatgatcaacttgggaaaagcaactggaacctcaagaatttttcatggctccccaattctgttctaagacttcttcagacgccaattccaggagtgacagatccaatgctttatattgggatgctcttcagcatgtttgcgtggcacgtggaagaccattacttgtacagcatcaattaccatcactgtggggcatttaaaacatggtatgggataccaggcgatgcggctcctgggtttgaaagggttgctagccagtacgtatataacaaggacattttgattggtgatggagaggatgcagcatttgatgtcctactagggaaaacaacaatgttccctccaaatgtcttgctagatcacaatgttcctgtctataaagctgtacaaagacctggagaatttgttattacttttcctcgttcttaccatgcaggcttcagtcatggcttcaattgtggagaggctgttaattttgctattggcgattggtttcctcttggttctctggctagcaagcgctatgcacttctgaacagaactccattgcttgcacatgaggagctactttgtcgttctgctgtgcttctatcccaaaagctgttgaactgtgatccaagatccttggacaagttggaacatccatattcccagaattgtgtgaaatcctgctttgtgcggttgatacgattccagcgacgtgctcgtggccttcttgctaaaatgggttctgaaatatgctataagccaaagacatttccaaaatctgtcctgtagcatttgtcggcgtgattgctatatcacacacgtgttgtgtagatgtaactttgatcctgtctgcctacatcatgaacaagaactgcggagctgcccttgtaagtccaatcgcgttgtctatgttagagaggacatactggagctagaggctctatcaagaaaatttgagcaggatgtcagctcgtataaggaaggaagttgcattagcccatgtaaggaggttgagatctctgatactactgatgaacaacttccaaatcttgggattactctggatttcgttaatagtaaagctggtagctcaggctttatgactgttgatggaggaaacagttcttctgcagtatcaattttgacatcttctgtgcatcatgaggcatataagcatacagaagcaagggcaataaatacatcaatgaccaaaggaacttacactatggatgagagttcatccggcatagatggtgcttgtaatgaacacggttcatgtaatgcttcagccatggaatgcagtgataattcggattcggagtgtgaaatcttccgagtcaagcgcaggtccacctcatttgacaaacctacttctgaagctaagacatcaaccttgtctgaacagcaggttctgaggcggctgaagaaggtacatcctgaagtacagcaagtcatcagtaagcgtcaagaagaatctggtaatggttcagttcgcgctgcccacatgagccagaaaagctcaaatcctgcccctgctgatgacgaaacagaggacatggctcccataatgtggagaataaagcggcgacagtcagaaacccaagatgctacatgtcctggtacgagaccgcagtcatatccgccttccagtggtggttctggagaagagtttgtggaaagaactagagatgctgcagtagaactccgtccaaaacgagtgaaaatccggctaccttctaatgccagtaggcagattgagcagcagcgcagttcagggcagagatttgctagggaggacaggttgccgcttggttttccacgtacattttagggaatcacaggtgctactaacctctacttgagcagacgaattctttgtttaggtacactgttaactacaaaacgtggtgacagaagggaggagtgggagggatcagttgcagactgactttagaattggcaggaaaggaagcggctatctaatcgattcttttgtgcagcagggcctccaatttgaggccactgggggcacgcttagaagatacacgtgataatattcttgttgctggaggttccgtgtcactgccgatagctctttgatgcctggctatcagtgacacagattaaagagaacctcgctaccttgatatgtccgctagtgtttagagcatgtagctagcttagctgttatctctctcactgtaccaacggcctttcccttgtaatttcctgtaaacaggcttagctgctacactatggctaactctattcttttgttggtttagccttaacgttaaattcaatgcatttcttttttggttagttggtacttgttatggtgttgctgctctcaactgtgggtggaatattctgatggcatgatactgattattgctgtcaatagtaacaactcggtttttac

SEQ ID NO: 2419 - DNA, 2065 bp, Zea Mays
caataacacctttattacccatcgaaaattcaaaattcacaacgaagcactagcaattgactatcattctaaattatatgctattatactgttataatgttatacaatatacaattatacactgtataattataatatcggccctgcagtaggtaagacgaccaactgccgactagggttgaatagtcgccctagtcgtcgactactcatcctaggtgatctaatcgcccataagcctacttgggtcaactagacaatttaaaaacattgaaccataccacttttttcctgcataaggtaatattctccagatgaatctgtttcactgcagtatgtacaccaacctaaatcagagtgaaaccaaagaatcagcaacagctacatccaaattaccatttgaatcatgaacccataaaccagagacgaaatactctagcaaagataaaagaacacaggctcagttcgttattacagagtaggtatttcagcaagaattaacatgaactaaactgagttctaaaacctcattggtagaatcaaccaactcaagaactgcagtttaatatacaccacctagacaagaccggctgacaaaactgagctggtatttgacttcccttcccaagtaattaattaatatattccttctatacaataataatgcaaagtatgaagagcataactacagtttagacaggtttactgagtcattttctcctgacgccctgaaacaatagtagtgaacggcgtaccttgaatgatcaaaattaaattgagaaacagtcaaacaatcaagtaattaatacaaagcaaaatcaggatttagttgtatgtacactccatgggcttgtcaagtactcactctatcctgaaatacaaggtacctaagaaattttaggaccaaataagaagtctgacaaaagaataaaatcattaattagttaatttggttgtcaacttggttaattttctagtaacaaatagtgtaaagatccatacaagcatgtcataccaatcacaggagtcattttgcgccagatggtgcttaaaaaggcatgcatggatgtggttgagcaacccggaaagtttataatttgggacaaattttgaaccttcaataccttgtatttcaggacggagacagcatacagaacaaagtggatagcataatcaacttaggactagtttggaaactcaaaccccttttcccacggtgagcaatcttagagggtgtaaattgaataagacatttagttatttatgtgaggttttccttctctgggtctggctccccttgtttacaaactagcccttagtgtatatgttttccttcctaattttagtttccaagaacagctatatttatgacaataacatgaatccacctaatgattctatagatgcaaggctagagctatttcttgtgtggtgtaaagtattttctttgtcattgttgaatatttaccatgtgccacaccatcatgcctaaggtttcgttctgcatatgctgcttgaagttaagcagattctgtataaacacattaaattaaatacttgatactaagattagagaagggcagacctggtgcagtggtgaggactgtctcaatgagtcaccaggtcacgggttcaaaacaacatctccgtatttgcgaggagaagacttgcctcggtttatctctttcacagactgtatgtgagagccttcagcactagatctggcctttttatactaagtttaagggagaaaaggagacagatgtcaaaacagcagaacacttaagaaactcagatctctgaggtaaactatttaagaattacgatagctactgttggataacacaagaaaagaggtgcagcaccttcttttagggcagtgtagcacctactgaatgcagaaagtcattgaggacccatgatccattagaactgcatatgttaagtttatgcagctgtgcatgaccaactgtagttggagagataatatgtttgttcagttgacataatatggcctatgaagctgagcatacaaggagatcactggacgagtctgacccatcgcttt

SEQ ID NO: 2420 - DNA, 778 bp, Zea Mays
gtaatgcttatgtactgttttagttgactagtgataaaagttttaactgatattaacattgacaatacatgggcaatagatgaggctatcatcagttcgaattctttctgtcttaggacatccaacatgatatactgggaagaaaaagatttttacacccttgtgaattccgccactttttacattctctgcaaattctgctagaagcattacttttgcactctccgtcttgtttgcagtttggtgttttcttctttggtatgtatacaagacagcctcaaatcatctcctaacaaaaaagggggttaatatcaggtgcatcttagcagatatgaaatatagtactatataagagagccacatgttacaagacaattgggttatagctacaagttagttatatgttctgccagcttcgttatatgttctgacatgagttacttttgtgttatgcagaaaaacaagaatcgtgagtgcaatggcaaatggaaggtgaaggcccttttgattgacaacttaggaaaagatggaatggaactcaaattttggtggtcggtcaagtgtgtagagttgaaatcatatatacttagttaggctcaaatttagcgcaaactgttggtgaccatgtttttcggttagtattttagtttttaaattggatttaaagtacacttatgtatgagttatttagcaatgcttatttatgagatattgaatgatacttatctacattatattaactatagtgttattaaatatatgtgtgtatgtatattat

SEQ ID NO: 2421 - DNA, 3205 bp, Zea Mays
gcaacctcaccctatggtatcctacttgaatccacaatctggactcatccttgatcttcagtaccgaagtgatagactgatagttgaagactgaacccctcaaagacttgatggttcctttccttccaaagtaacaaaatcactaagagcataaggcaatcaaaaccattgcaccctgacttatcaatctgttccctactctgaaaccaccaagtagcaagtttgctattggagtctggcatcactgcatgcaggcctagtggctgtaaggttgagaaccatacttccctgctaaaatgacagccaagcagtaggcatcactacatgcttgaatttgctgtaaatctttgttttcttggggtttttcttcaagggaaaagtacaatattttccgtttgctagtagaaagagtaaaatctttgtaaagcccattgctagactcaacggtacacatcaccacatgacggtggcagactgagagatggtcaggcatggtcaaccgggaaggtcaagtactcaagttacccatattttgtgtgtattcatggatgggaatgggctgacccaccctgtggcctcaaggcaaacttttagggatcatgagtcagcacattttacctaaaaagttgtagccttgctagtccattgggtagcacgagtcggctcaaatatttttctgctatcatgagctataaaaattatcaacgcctctaggtaagatgagataaaagattaaatagtatcatgataacacattaaggatattagcaacacattaaaaaaataagtttgaaagtgaatgagatttcaattttatctattttcaggatattccttgatctacttccaagtatagacttgcttaaaagttatgacaaatcatgcttgtttggaaaaacgaagaggatcaacaaatttgaaaaaatggattgtatgtgatgattggatcgacccatcttactctattgaccaatttcagactctgaggttggcccctgggaccattgaccttgctcttgtaggttggatcaaccttgcccattctcatttgtatgtgtatagtgtattagtgttacccggatacttgtgtcctagtttcttttctttttggcttgctaaattagagaacctacactagtgctaatggcatttggcattgtgccaaaaaaacatgtaaattcaaacaccatatacgcccgtgtctagcttaatatttgccatgtccccccattgtcttagtgaattgacaggtgatctaggaatcaggcatgctcaattaggaaggtcaactcaattaggaatcaagcatgctcagttttttgcatggttacttgcccaagaaaagatacaatgcaaaacaaatcttaggaagaagaggatacttgaggaagatggctgtgaagagtgtgggcaggtgaaacggcacgacacattatgctaggttgcagttatgccaaaatgttctggcaagcaatcggcatccaaattctagcggaccttgaagtgtctcaacttcatcgcgttgaaagacctacgaatatcccaaaagctgagttctcatcattcattcatctctgttgctggcaactatggaagcgtaggaacgctctggtctttcgtcaggaggcagcatcactaaaatgtctcctgcaacgatgcggcaacgaagctgaaatctggtgctacagccaccgaagcagagaactgggtgtgcgtgctgcctggcagatggtgttttccagtgcgaggcaataagatgtaaacagcaacccccaccccctcctcctccaaacaaaaaagaacaagctcggttcatgccgggttgtaaatgtaagctgtttgtatgtcactgcgagcaaacgacaatgaaatagaatgtcaggtggggagcatttccccattgagcttcaaaaaaaattctaaacaagacatggaatcatactttgagtttattagtgttacccatatactagtgtccttgtttagtaaaatcagagaacatacacatgggtcagattccaagtggtggttggcattaggcataaaaaacctgtgagtcaaacaccgcacctgctgacacacgtcggtttctaggaaggttaaccttataattctgaaaaaggcacatgatcattttgagtgtgtgtttggatctcataagattatgcaaacagtgatggtagaatctagatttaaaaagtgagatatgtttgaatccctgaattctaaagagagattaagtaatagggtggagatggataattggattataaggatccctcccccctaaaaaaaatccacttgtttgcatctcattttaattgtcacagttttgaaaagaaccaaacaaggccttattgttacgtagacattcgtatccattttttttcttttgccaaaccaaacaacctatactcacatcagattcctagtgacatttgacattgtccacaaggaacttgctaagccagggtctatttttagtttagatgtgtaaaagctgttgtgagatatgtgctatctagttaaaacaactatgaaacctacccttctcttctatctccctcgaaatatttgtaaaatgtctatctatttccagccatttggaaaagtagaaagctgaaagtcaaaagtagggtccaagatcgccagatgctacgaaaattgtactaggaagcagctatttttggaaaaaaaacaatttctgattctacctgctaggttggtgttctatttttaacaggggagagcaaaacatagcctcaaacaccccatacgggcacctcagacacgtgtacgttgtaccactgattccgacacctgcacccacgagcatgtaataccaatgtggaatacacacacttgtcttcagctagttgacacttgtcttcacctatctgacactattaaaatattgcatggttacctgatatgtaactaggtaaaactcaacgcttttgttcctattaaaagactatccagacttcagagcagtgtagaatggatttttttctcctaaatgaaactgattcaaactgatttccagatttgtgcgcggttttgttccgtactgtagtggcatagcagagtcgtccacatcaagcataagcataactaacttgggcaaggtagggaagaacgaatgaagtgactgtaagtggggtaggcaggaacctgaatgagatcgacgtgagggaaagccttg

SEQ ID NO: 2422 - DNA, 1030 bp, Zea Mays
tgcaccaagcccatttttcgtccgttcaatactgctccaggctcgatgagccggcccacatgaagatgaacaagtgaagagcatcagagcccagacttctttagagcccagcccacgtatagcacggagcccgcgacgagccgacccggcgagcctggccggccgggcggaccgaaccgaatagcgaaggcataagccatcagtttccaccgcacgtccgcaccccctctccggcgtgccgacggtatccatggcggcggtggtgcgcggcgtcttgaggggcatcaaggagaagggactcaccaacttcatccgcgacgtccgcgacgaaggatacttcaaatgccttctggacgggaaccttttgcaaacgaaaatccacaatattggcgcaacacttgtaggagttgacaagtttggtaacaaatattatgagaaactacatgacactcagtatggaaggcataggtgggtagaatatgcagagaaaggtcgttacaatgcatcccaagtgcctgctgaatggcatggatggctgcaccacatcacagatagcaccggggataagctgctgaaccagaagactgctaggtaccttgtagagcacaagcagaactactccggtgagggtgaagagcttatctaccactccaaggggcatgctttgaatccgggacaaagggactggacgaggtatcagccctgggagccaaagaaagagcaagcctagctcgtgagtacattgtggggaagctgctgaatgttttgcgttttcttgcattgcgctgggtcagctttgaggaatatctcatgcaggtgttactgacttcggttacgagacattgggtctatttgtttcagttttttttttgctgattctgaccgtcagaagttgttgtagaccaaacactaagcttttcagtcagcttttatatgaatcactttagtattacggggcgtttggatcccttcattttagaggaattggaattcactcaataaagtaacttatttagtttggaatttgaca

SEQ ID NO: 2423 - DNA, 606 bp, Zea Mays
tgcaccaagcccatttttcgtccgttcaatactgctccaggctcgatgagccggcccacatgaagatgaacaagtgaagagcatcagagcccagacttctttagagcccagcccacgtatagcacggagcccgcgacgagccgacccggcgagcctggccggccgggcggaccgaaccgaatagcgaaggcataagccatcagtttccaccgcacgtccgcaccccctctccggcgtgccgacggtatccatggcggcggtggtgcgcggcgtcttgaggggcatcaaggagaagggactcaccaacttcatccgcgacgtccgcgacgaaggatacttcaaatgccttctggacgggaaccttttgcaaacgaaaatccacaatattggcgcaacacttgtaggagttgacaagtttggtaacaaatattatgagaaactacatgacactcagtatggaaggcataggtgggtagaatatgcagagaaaggtcgttacaatgcatcccaagtgcctgctgaatggcatggatggctgcaccacatcacagatagcaccggggataaggcggtgtccaggccatcctacatgcggcatgcctgtcc

SEQ ID NO: 2424 - DNA, 896 bp, Zea Mays
caacgccacatcactaatgctgcataacactacaatcgcttatgcagcatatgcaagcgtggattcattttatcagcaaatgccttctggacgggaaccttttgcaaacgaaaatccacaatattggcgcaacacttgtaggagttgacaagtttggtaacaaatattatgagaaactacatgacactcagtatggaaggcataggtgggtagaatatgcagagaaaggtcgttacaatgcatcccaagtgcctgctgaatggcatggatggctgcaccacatcacagatagcaccggggataagctgctgaaccagaagactgctaggtaccttgtagagcacaagcagaactactccggtgagggtgaagagcttatctaccactccaaggggcatgctttgaatccgggacaaagggactggacgaggtatcagccctgggagccaaagaaagagcaagcctagctcgtgagtacattgtggggaagctgctgaatgttttgcgttttcttgcattgcgctgggtcaggtatcaccgagctgaatagcctctgggttattgcctggacgggacccaaataatgttgttctgaataccaatatattgtatatttgatcatcttttgacattgaaatgttgttgctgttgtaaaagcagctttgaggaatatctcatgcaggtgttactgacttcggttacgagacattgggtctatttgtttcagttttttttttgctgattctgaccgtcagaagttgttgtagaccaaacactaagcttttcagtcagcttttatatgaatcactttagtattacggggcgtttggatcccttcattttagaggaattggaattcactcaataaagtaacttatttagtttggaatttgaca

SEQ ID NO: 2425 - DNA, 2398 bp, Zea Mays
cgcaaggcaacgaaacacccacccaccccgccaactgctctcgggctctcggccttttcttttcctcattacggcctcggtccaccacctcctcttctcgcctgtgccttttgcccctgtgctcgccacacgcggcgcaaccgcccacccacccagccaggagaagaagatctccgtcgcctgctcttcgcttcgcttcgaatcggaggtgtcgagtagccagtggtgtccctatggattcagcttttagaagagctctcaatgagcctatgtgcttggaagaaaccgtcgtccaacaaggaattgaaaggtgcccattcctgaggaacatcaatgagcctacaagtttttccttctcgcaagaggagccaagggaccgattttcgaagatgggcctaattttgacatggcatttcgagttttccatggtagagatggggttgttccactttcagaagggtcattggcccagattgagaagccactgccaaagcccaatcctgagttcaacccattggcagccaaagcagcaaccatcagtctatctgcatttggagggtttttcagctttggtgacttctcaaataagcgcaataagaaaaactccaacaagaagaaccccaacaacctcccccagaataaaggccagcctaacaataacaaccatgaagcactgagcaacgagtggctggagatgggccaatgtccacttgcgaaatcttatagggcattaagtggaattgtgccacttgtcgcaaagatgatgacacccccagctggtatgaaacttaagtgcccacctgccgtggttgctgcccgcgcagcactatcccgcacagcctttgctaaggggcttcgccctcagcccctgccaacaaaaatactggtgattgcattgcttggtatggcagcaaatgttcctctgggcatctggagggagcacacacagaagttttcattgcagtggtttgccgcagtacatgctgcagtgccgttcatagggatgctcaggaaatctgtgctgatgcctaagacagccatggcccttactatagccgcctcgatattgggtcagacaatcgggtcaagagctgaacgtatcagactgaagagggccgcggcagcaaaattagcaagagagagccatggtgacgctgctgactacatcaaagcaccaatgagtctgaaaacagggaaccacactgttcagttttgggatccgctttccctcagagctgaaagcacagtggctgcaggtaccacagcagttcttgtccctgccatttctgctttcaactgatgacaggaatggattcattacgattgtaccagcatcgctggttggtgtattcttttttttctcctattctaaataatctgattgttgtatccattactgtacttttgagcttaagaaagaaatacttcacggcaaactcttcatcctgttttggtggccacatgacagcgaataaattagagaacacgttgagctgagaactttttactctcctttgaaatctgtctctggaaacacggatttccagccaatcgtcaatcgagcagtcacaattgcatgccatactgactttacagttatgtattctttgtattttataagacttatcatgataaagaaaatgttttgaaatgggatgtagaagcttttgctggtggtcaaaaaaaaaaaaacgaacagttaactgatctcaacgtaccacacctgaaatggtcaggactcaaaacgaaacagccggaccattctaacaccacaatgtaacaccagaaacacaaccaacaggttctagttgcctgctcgaatcaccatccagtcagtaaacaagatcaataagctactagtgctatggttggtttgacagctacaagcgacgaaaaacatctgcttgctgaagaacagacttaacattcgcacaaaatacaacttttcgactagtatatctcatcatctgggacatctggtgtaagaaacttctgtggatccttgtacagctcttcgtagttgtacttaggcttcaccctctccgggacaggctcaagtgggataatactgtctccatcgatcacgccatcaatgagtccataatcgacagcctcgagagggcccatgtaacgatctctgtcaatgtctttctctacctgctcaggagtgcggcctgtgaagcctgatacgatccgaatgacattcctcttgttggtcaatatctccttcgcttggacctctacatctagggcctgcccgcttgcacctccgacaggctgatggatcataatcctggtgttgggcatggcaaatcgcttgcccttcgtgccaccaccaaggattatagaagctgttgatccagctatgcccattccaatagtggacacgtctgccctc

SEQ ID NO: 2426 - DNA, 2381 bp, Zea Mays
ctgctctcgggctctcggccttttcttttcctcattacggcctcggtccaccacctcctcttctcgcctgtgccttttgcccctgtgctcgccacacgcggcgcaaccgcccacccacccagccaggagaagaagatctccgtcgcctgctcttcgcttcgcttcgaatcggaggtgtcgagtagccagtggtgtccctatggattcagcttttagaagagctctcaatgagcctatgtgcttggaagaaaccgtcgtccaacaaggaattgaaaggtgcccattcctgaggaacatcaatgagcctacaagtttttccttctcgtccgtcaacttccctattcccaggagccaagggaccgattttcgaagatgggcctaattttgacatggcatttcgagttttccatggtagagatggggttgttccactttcagaagggtcattggcccagattgagaagccactgccaaagcccaatcctgagttcaacccattggcagccaaagcagcaaccatcagtctatctgcatttggagggtttttcagctttggtgacttctcaaataagcgcaataagaaaaactccaacaagaagaaccccaacaacctcccccagaataaaggccagcctaacaataacaaccatgaagcactgagcaacgagtggctggagatgggccaatgtccacttgcgaaatcttatagggcattaagtggaattgtgccacttgtcgcaaagatgatgacacccccagctggtatgaaacttaagtgcccacctgccgtggttgctgcccgcgcagcactatcccgcacagcctttgctaaggggcttcgccctcagcccctgccaacaaaaatactggtgattgcattgcttggtatggcagcaaatgttcctctgggcatctggagggagcacacacagaagttttcattgcagtggtttgccgcagtacatgctgcagtgccgttcatagggatgctcaggaaatctgtgctgatgcctaagacagccatggcccttactatagccgcctcgatattgggtcagacaatcgggtcaagagctgaacgtatcagactgaagagggccgcggcagcaaaattagcaagagagagccatggtgacgctgctgactacatcaaagcaccaatgagtctgaaaacagggaaccacactgttcagttttgggatccgctttccctcagagctgaaagcacagtggctgcaggtaccacagcagttcttgtccctgccatttctgctttcaactgatgacaggaatggattcattacgattgtaccagcatcgctggttggtgtattcttttttttctcctattctaaataatctgattgttgtatccattactgtacttttgagcttaagaaagaaatacttcacggcaaactcttcatcctgttttggtggccacatgacagcgaataaattagagaacacgttgagctgagaactttttactctcctttgaaatctgtctctggaaacacggatttccagccaatcgtcaatcgagcagtcacaattgcatgccatactgactttacagttatgtattctttgtattttataagacttatcatgataaagaaaatgttttgaaatgggatgtagaagcttttgctggtggtcaaaaaaaaaaaaacgaacagttaactgatctcaacgtaccacacctgaaatggtcaggactcaaaacgaaacagccggaccattctaacaccacaatgtaacaccagaaacacaaccaacaggttctagttgcctgctcgaatcaccatccagtcagtaaacaagatcaataagctactagtgctatggttggtttgacagctacaagcgacgaaaaacatctgcttgctgaagaacagacttaacattcgcacaaaatacaacttttcgactagtatatctcatcatctgggacatctggtgtaagaaacttctgtggatccttgtacagctcttcgtagttgtacttaggcttcaccctctccgggacaggctcaagtgggataatactgtctccatcgatcacgccatcaatgagtccataatcgacagcctcgagagggcccatgtaacgatctctgtcaatgtctttctctacctgctcaggagtgcggcctgtgaagcctgatacgatccgaatgacattcctcttgttggtcaatatctccttcgcttggacctctacatctagggcctgcccgcttgcacctccgacaggctgatggatcataatcctggtgttgggcatggcaaatcgcttgcccttcgtgccaccaccaaggattatagaagctgttgatccagctatgcccattccaatagtggacacgtctgccctc

SEQ ID NO: 2427 - DNA, 2316 bp, Zea Mays
ctgctctcgggctctcggccttttcttttcctcattacggcctcggtccaccacctcctcttctcgcctgtgccttttgcccctgtgctcgccacacgcggcgcaaccgcccacccacccagccaggagaagaagatctccgtcgcctgctcttcgcttcgcttcgaatcggaggtgtcgagtagccagtggtgtccctatggattcagcttttagaagagctctcaatgagcctatgtgcttggaagaaaccgtcgtccaacaaggaattgaaaggcaagaggagccaagggaccgattttcgaagatgggcctaattttgacatggcatttcgagttttccatggtagagatggggttgttccactttcagaagggtcattggcccagattgagaagccactgccaaagcccaatcctgagttcaacccattggcagccaaagcagcaaccatcagtctatctgcatttggagggtttttcagctttggtgacttctcaaataagcgcaataagaaaaactccaacaagaagaaccccaacaacctcccccagaataaaggccagcctaacaataacaaccatgaagcactgagcaacgagtggctggagatgggccaatgtccacttgcgaaatcttatagggcattaagtggaattgtgccacttgtcgcaaagatgatgacacccccagctggtatgaaacttaagtgcccacctgccgtggttgctgcccgcgcagcactatcccgcacagcctttgctaaggggcttcgccctcagcccctgccaacaaaaatactggtgattgcattgcttggtatggcagcaaatgttcctctgggcatctggagggagcacacacagaagttttcattgcagtggtttgccgcagtacatgctgcagtgccgttcatagggatgctcaggaaatctgtgctgatgcctaagacagccatggcccttactatagccgcctcgatattgggtcagacaatcgggtcaagagctgaacgtatcagactgaagagggccgcggcagcaaaattagcaagagagagccatggtgacgctgctgactacatcaaagcaccaatgagtctgaaaacagggaaccacactgttcagttttgggatccgctttccctcagagctgaaagcacagtggctgcaggtaccacagcagttcttgtccctgccatttctgctttcaactgatgacaggaatggattcattacgattgtaccagcatcgctggttggtgtattcttttttttctcctattctaaataatctgattgttgtatccattactgtacttttgagcttaagaaagaaatacttcacggcaaactcttcatcctgttttggtggccacatgacagcgaataaattagagaacacgttgagctgagaactttttactctcctttgaaatctgtctctggaaacacggatttccagccaatcgtcaatcgagcagtcacaattgcatgccatactgactttacagttatgtattctttgtattttataagacttatcatgataaagaaaatgttttgaaatgggatgtagaagcttttgctggtggtcaaaaaaaaaaaaacgaacagttaactgatctcaacgtaccacacctgaaatggtcaggactcaaaacgaaacagccggaccattctaacaccacaatgtaacaccagaaacacaaccaacaggttctagttgcctgctcgaatcaccatccagtcagtaaacaagatcaataagctactagtgctatggttggtttgacagctacaagcgacgaaaaacatctgcttgctgaagaacagacttaacattcgcacaaaatacaacttttcgactagtatatctcatcatctgggacatctggtgtaagaaacttctgtggatccttgtacagctcttcgtagttgtacttaggcttcaccctctccgggacaggctcaagtgggataatactgtctccatcgatcacgccatcaatgagtccataatcgacagcctcgagagggcccatgtaacgatctctgtcaatgtctttctctacctgctcaggagtgcggcctgtgaagcctgatacgatccgaatgacattcctcttgttggtcaatatctccttcgcttggacctctacatctagggcctgcccgcttgcacctccgacaggctgatggatcataatcctggtgttgggcatggcaaatcgcttgcccttcgtgccaccaccaaggattatagaagctgttgatccagctatgcccattccaatagtggacacgtctgccctc

SEQ ID NO: 2428 - DNA, 2254 bp, Zea Mays
ctgctctcgggctctcggccttttcttttcctcattacggcctcggtccaccacctcctcttctcgcctgtgccttttgcccctgtgctcgccacacgcggcgcaaccgcccacccacccagccaggagaagaagatctccgtcgcctgctcttcgcttcgcttcgaatcggaggtgtcgagtagccagtggtgtccctatggattcagcttttagaagagctctcaatgagcctatgtgcttggaagaaaccgtcgtccaacaaggaattgaaaggtgcccattcctgaggaacatcaatgagcctacaagtttttccttctcgtccgtcaacttccctattcccgcaagaggagccaagggaccgattttcgaagatgggcctaattttgacatggcatttcgagttttccatggtagagatggggttgttccactttcagaagggtcattggcccagattgagaagccactgccaaagcccaatcctgagttcaacccattggcagccaaagcagcaaccatcagtctatctgcatttggagggtttttcagctttggtgacttctcaaataagcgcaataagaaaaactccaacaagaagaaccccaacaacctcccccagaataaaggccagcctaacaataacaaccatgaagcactgagcaacgagtggctggagatgggccaatgtccacttgcgaaatcttatagggcattaagtggaattgtgccacttgtcgcaaagatgatgacacccccagctgcaaatgttcctctgggcatctggagggagcacacacagaagttttcattgcagtggtttgccgcagtacatgctgcagtgccgttcatagggatgctcaggaaatctgtgctgatgcctaagacagccatggcccttactatagccgcctcgatattgggtcagacaatcgggtcaagagctgaacgtatcagactgaagagggccgcggcagcaaaattagcaagagagagccatggtgacgctgctgactacatcaaagcaccaatgagtctgaaaacagggaaccacactgttcagttttgggatccgctttccctcagagctgaaagcacagtggctgcaggtaccacagcagttcttgtccctgccatttctgctttcaactgatgacaggaatggattcattacgattgtaccagcatcgctggttggtgtattcttttttttctcctattctaaataatctgattgttgtatccattactgtacttttgagcttaagaaagaaatacttcacggcaaactcttcatcctgttttggtggccacatgacagcgaataaattagagaacacgttgagctgagaactttttactctcctttgaaatctgtctctggaaacacggatttccagccaatcgtcaatcgagcagtcacaattgcatgccatactgactttacagttatgtattctttgtattttataagacttatcatgataaagaaaatgttttgaaatgggatgtagaagcttttgctggtggtcaaaaaaaaaaaaacgaacagttaactgatctcaacgtaccacacctgaaatggtcaggactcaaaacgaaacagccggaccattctaacaccacaatgtaacaccagaaacacaaccaacaggttctagttgcctgctcgaatcaccatccagtcagtaaacaagatcaataagctactagtgctatggttggtttgacagctacaagcgacgaaaaacatctgcttgctgaagaacagacttaacattcgcacaaaatacaacttttcgactagtatatctcatcatctgggacatctggtgtaagaaacttctgtggatccttgtacagctcttcgtagttgtacttaggcttcaccctctccgggacaggctcaagtgggataatactgtctccatcgatcacgccatcaatgagtccataatcgacagcctcgagagggcccatgtaacgatctctgtcaatgtctttctctacctgctcaggagtgcggcctgtgaagcctgatacgatccgaatgacattcctcttgttggtcaatatctccttcgcttggacctctacatctagggcctgcccgcttgcacctccgacaggctgatggatcataatcctggtgttgggcatggcaaatcgcttgcccttcgtgccaccaccaaggattatagaagctgttgatccagctatgcccattccaatagtggacacgtctgccctc

SEQ ID NO: 2429 - DNA, 3315 bp, Zea Mays
gagcttggtatggcctcgatcgtgggaaataaagccacgggcgcttgcggcttctcctgttgactcacgtgtgagccagcaagcaaacccttaccccgtgcgccgccgccgttggaaaatttcgccgccgcgggtgagggaaggtatcggcggcctcggtgtgcgtgattggttgacggagaccgcggaattgctcaacgtcgcgcatcttccccacaacgccgtggtcgggattactcggatcgccgtgggccggtacgtgttcatacgttgtttcgaaaccactcgtacatgcgataggatgcattagatttaagcttggcggctaggattgctggattgcattttccggcaatggtgccaccgtgtaggagaggcgcggcaccgccgctactgctcgacgatggccgtgtgccgtcaaccgtaggatggcaactggccggccggaattaaagggaggatatcgcttcatatggcaaagtgatggccgtagatctgaacgcgaacggctcggattaaactacgcgtaccccttcgtcgcgttcaatctgaactgtggatccggaatcgtgggaaccaggatcaagttagattatttaaaatcggggtcgttgatttgttgattggcggtcacgatcgtgtaccgtttcgcgttataaatgatctaatctgacgcataggctgttgatccaacagttgtaatcggtcgatatcccttcgcgggtgcaaattgctaaagagcccctgcgttttcctaaatagaactcgctctccaccataacagtgccctgagtcttaagattttttacggcgagggcgcgaggcccctggcctttctggaattcgatgctcagtacagagaacaaaaaaaccagagaaaataaattagaaaatagattttagagcaaaaataattgctagaacttgtataaatcattgaaaattcacgtgaactccaaatggatccattccagtttctaaaattttgtaatattattgtttaccacctagagtctctgttttgacatgaaaacagtagtaaaattaatttctcacttaatcatatatcaaacacattaaacctttggaaattcataatttaaaatccataagggggcgtttggatcccttcattttaaaggaattggaattcactcaataaagtaacttatttagtttggaatttagcattccaccactttctaaagttcggatataagcctatctcaaattcatagggtggaggataggaaatgattttacacatgagtagaatttgtttctactcagtaacttacatgacactcttcgtttcactcctctatagtaaaaatgtagcatataaatatctagtacatcttgctaataatagtatacaaatatattttgtataaaagcgaattagcttaattgatatatgcctaaattattattattagaatggaattcaattccagtgatccaaacggggcgtaacttcaaagttaatgattcatgttcctatgatcttattttaatgtgtagatttttattatgcattttgtttacatgtttggtgtgatgttaatttttttatactatgtatgtttgtattgatgcgagtagacgagcaagctactgtggatcctgaggttcagcagatagaagttgctgagcaggagctcattgaagtcaagttgtgcctttgaccactttttagccaataatgttctttaatatcatttattcatgcataggtttaattctgatgggacccaataggtcaccctagactgtttatctctttatcttgtttacccctgaatcacttgggtagttttgctattgctttacatggttttgggttaatatttcattatatccatgttcctattattctgttatgttatttatgtttatgataagatcattatgttaatgagaacatggagaaccactcgagaaaacgtgccaacacatgagaggaatgggaccccttggcttactaattaggacagctactggaagactaccttacccgaaaggggcaagggaagtaggagagttgcatgcagggaggttcccgggttgattttgctacgatgacggtcagacgggggattcttgtaagtgctcttcccataactgtagcaggttttctgaagctagaggaactttgtaaaggcctcgtagtgttaccttgcctcgcctcctcggtagaggtgtatgagattgaccgtctcttggcagatgggtaacatgacttatgggtacagggtacaacctttacagagtgtaaacctggtatactagtcgtgctcacggtcatgagcgactgggacactcacatgattaatttatgtaacttaaattcaatttgtcatttgcatttgcatgggattatttattaattttgttgtattatttattatggtttggtatttacttacacttagtaactgctaataaaatttgaccaacttattaaacgcaatgctcagctttaacctctattgttgatcaaccttacacatcacataaactctcacctttgttcagttcatgcccactggtttccccacaacttgttgagctatgatcatgtgtgagctcacccttgctgtctcacaccccccacaggagaagaacaggtggttcaggaggagccacacaactaggagtttgatctgatctaggtggcgtctcccaattgacttattggcgccaaggatggatttagttcgttttatatttatattttatttttgtaagacttttgctatataataagtactctaatgttattgtgatatttatctctatacactctgttattatatatgttgtcttctttggcacatgtatgagatgcacccgactttgtcccttaaatccgggtgtgacaggggtctccttctctgccgaaggtcctcaagacggagatattgtatgtaagcaacataattgaatgccgaagctacagcgagcatgcgtaaaagtgtcgaaggatgacaacttcggcttaaagtggttacgaaggtcaacaggatgttgagccgaagaggaaaagactagttaatccctgatgttttgtattaggattatgtgtacatgttaaggtcacaaatgtatttttatccagactgtgtcccatgcttataaataggtgaacagtacccccgtactgttcatgctagaattgagattctactctcgttttctccttcgagcaagccgaaggtattaatgtaatatatattatacatcagttgttaatgtatggtatggatattagtgtttgtttaaatattgaatgcgaaatgagtgaaaatatag

SEQ ID NO: 2430 - DNA, 1702 bp, Zea Mays
ataaagccacgggcgcttgcggcttctcctgttgactcacgtgtgagccagcaagcaaacccttaccccgtgcgccgccgccgttggaaaatttcgccgccgcgggtgaggtgagagagtcggcagagtagacctagcgttcctcgctgccactgcctcaacatcgtgtctgggggtttcctcggatcacagggaaggtatcggcggcctcggtgtgcgtgattggttgacggagaccgcggaattgctcaacgtcgcgcatcttccccacaacgccgtggtcgggattactcggatcgccgtgggccgaacatggagaaccactcgagaaaacgtgccaacacatgagaggaatgggaccccttggcttactaattaggacagctactggaagactaccttacccgaaaggggcaagggaagtaggagagttgcatgcagggaggttcccgggttgattttgctacgatgacggtcagacgggggattcttgtaagtgctcttcccataactgtagcaggttttctgaagctagaggaactttgtaaaggcctcgtagtgttaccttgcctcgcctcctcggtagaggtgtatgagattgaccgtctcttggcagatgggtaacatgacttatgggtacagggtacaacctttacagagtgtaaacctggtatactagtcgtgctcacggtcatgagcgactgggacactcacatgattaatttatgtaacttaaattcaatttgtcatttgcatttgcatgggattatttattaattttgttgtattatttattatggtttggtatttacttacacttagtaactgctaataaaatttgaccaacttattaaacgcaatgctcagctttaacctctattgttgatcaaccttacacatcacataaactctcacctttgttcagttcatgcccactggtttccccacaacttgttgagctatgatcatgtgtgagctcacccttgctgtctcacaccccccacaggagaagaacaggtggttcaggaggagccacacaactaggagtttgatctgatctaggtggcgtctcccaattgacttattggcgccaaggatggatttagttcgttttatatttatattttatttttgtaagacttttgctatataataagtactctaatgttattgtgatatttatctctatacactctgttattatatatgttgtcttctttggcacatgtatgagatgcacccgactttgtcccttaaatccgggtgtgacaggggtctccttctctgccgaaggtcctcaagacggagatattgtatgtaagcaacataattgaatgccgaagctacagcgagcatgcgtaaaagtgtcgaaggatgacaacttcggcttaaagtggttacgaaggtcaacaggatgttgagccgaagaggaaaagactagttaatccctgatgttttgtattaggattatgtgtacatgttaaggtcacaaatgtatttttatccagactgtgtcccatgcttataaataggtgaacagtacccccgtactgttcatgctagaattgagattctactctcgttttctccttcgagcaagccgaaggtattaatgtaatatatattatacatcagttgttaatgtatggtatggatattagtgtttgtttaaatattgaatgcgaaatgagtgaaaatatag

SEQ ID NO: 2431 - DNA, 1620 bp, Zea Mays
aaatttgtgaatcaactatttaaaaagacaactggtgagctccagtacattcctaatgattgacgagtcacttcttttctactgaacaatttatgaagtaacacctgctaaaatgcaactatgctactgtactgtataatttgaagggaacacacactgttctcataaaagtgataatgtagtagtctttatatcaagataattatgttttagctacaaccactgtctattataatttagcaaaacaattacacaaaatattctcttttttatctactacataatacaatataatttgttataaaaaatatttgacagttaacaaccatattgtttgaatacgtaccctatatgtttttatcataacttcaggaaattaaaaaagattgacaacacccataagctcattttattcaccgaactcatagaaatctgaaacctgactgctaccataattctagcaaaaaagagtgctttctggctattaccaattccctctaaagcaccgatcttagacttaatatgaactatagtattggtggacttcacatcgagtagctgttttcatcatccaaacatggatctgcaaagaggataacagaaacagaaaacaatactaagtaaccttcgatatattgtgtcaaactttgcagtaaaagaacaccagagtaagaatgatggtacatgtacaaagcacaataaaataataaaaacaaatatagtaagcaccacacataaatcttaatcccttttgatattacccacttagcttcacaatgtacaacaacgttagtactcgagcaactcgtaccacaatctcatttgatactatagcaattactaccaagaatgttgatgaaatcttagggctactaaatgacttccaagaaccggaaaaagttgagcccttaaactcaagtctcacataatcatcaactacaaaagtcgacacagcatcctccctgtattctttcaacttaatctcctcttccctgctaggcaccatctccaagagttcggttccaaggctctctgcctgtcctgcttccaataatggtgaacagtcagaggaaacctgagcaactttgtaggaattcatggtgctccccgcagcatccttcctctatgcacctaacttgaactcagaaaggtacatgccaaatcatcatgagtagaaatcagatatccaagaaatacgtgtaggggggtaaaaacatggaacacaaatttatatttcaaccatgtgctacaggatacaacacatgatcatgcatgatacaggcaaattcatagataagcaaccaaccttactaaaaactagcatcctgccactcccattgtctagacaaatatctacacacagatcttaagttttgatctctacaaaccacaacttgcatggtctagatctgctagcgataatagtatacctgtggtagtcgcccttcatcttgaggtagaagaccttggactcggcggcattggttgaatggaagctatggaacaacaaaatcacaatggaacacgtgcgtactgagccacatccattgaaaatgaacgggggagaaatggcaagaagtatgatgacctgaaaaatgaagcattaccttttggtgattt

SEQ ID NO: 2432 - DNA, 1101 bp, Zea Mays
aacatattgatcaaatcccctgaccccagaatcataatatgtaacaagacaacaaccactataatacaaaacttgtaacaacatacccaatatcataatcttgtatatgattcatgcatgtacatgaaagtttcatgtaacataccatcatgtaaagatctcctgaaaccttgaactgcctcattattagtgtcaacattccaaacagcttgttgcatgacaaagacaaccattttctgtataaaaggttaacatagtgatgaagagataagctgtcgagaaacttgcaggtgaacattctcagcaatttatatataatattgaaggttcttgaaatgaagccgctagcgattttcttaggccattaataattatgctctagtagtttctctagtactatgatatttggatggctacgtacaataatagtagtagaaatatataccgctaggtggatggtggatttaatctgtattatttattattataaactggctagtaattaaggatggtatactgtatctagcacatcttctggaacagagttcaggtgatgcgaggaagcaggcacagacagaagcgccagcaacgagaccacgtgcaaccggatgcatgatttactcgtcaaaagaaaattcacgaggcaaatccgtagtacttgtgggtggcgaacaataatcaaatttaggcaccataaagattattaggatctgaccaaggcctaagattattctgcatggcgtaaggtggagccgccaagcaggacagttgtgataaactctgtctgtggaagtgtggagtggcaaatgatccatggcgttggacatcagcatccagaattctccgcctgcatgtcgaaagagagggggccgcactgtcgtcattgtgtcggagttgccgaccggcagcgctgcgaacaccgccgccgtgccgtgggcagagcaagcctgcatgatgcatgctggactgctggaggaaccacttgttgaagccgaacctggtgctagcgtcgctaaagtagaccgtgccatcgaaggcctcgattgccgtgtccgcgaacctggcggcggaacggtcggcgtgctggcgtcgctaaagtag

SEQ ID NO: 2433 - DNA, 226 bp, Zea Mays
ctcgctttggttgggcggcgagacgttgggcggtgactcggggaggccgaatccgcctccaggtggccatggaggcgagcagggagggtgggccatgggagcggcggcggtgtgaggaggagagtcgggggaggttggacggcggcgtgggaaggccggagccattgccgacgacggcacagatgaagcttgattgaggatctgtcgaggaagaggggagtggaga

SEQ ID NO: 2434 - DNA, 2176 bp, Zea Mays
ggcagcggcaggaggagccgtgtgggcgcgggtgcgtccgagagaggggaatcgggccgctgcttccggcgacgcagagcggcatgtctccgcctccccctggcggctccaatggccgccgccaccagcagcagcggcaggaggcggtttcgtccatggaatccggcggcggcgcgtcgggggcggcgaccaagcgcttcacctggaagggcccggtaatcgtcctagtcttcgagctgctggagagcatcgcgttctcgggcgtggctctcaacctggtggtgtacctggccacggtgctgcacgggagcaccgccttcaacgccgcccacgtcgacacctggaacggcaccaccttcatcgtccctgtcatcggcgccttcctcgccgacagctactggggcaagtacaggaccatcctcgcctccatcgtcttctacctcgtgggcctggtgctcctcaccgtgtccgccgcgatcccgtcgctgcggcctgccacggcgtgccagatgggggagtcgtgcgcgccggcgaccaagacgcagttctccgtcttcttcgccgcgctctacctcacctccatcggcacgggaggggtcaagtccgcgctgctccccttcggcgccgagcagtacgacgacgacgcgggccggccggagcggaagcaggcctttttcagctggttcttcgccgccatcaacctgggcatcttcgtcgccggcacgctcgtgtcgtggctggagcagaacgtgtcgtgggcgctcggcttcggcatcggcacggcctgcctgttcgtggccgcgctcgccttcgcggcgggtacgccctgctacagggtgcagatgccgacgggcagcccactcaaggacatcatcagggtgttcgtcgccgccttcaggaagcgcgacgtcaggatggaacgggacgagggcgcggcggtgctgctgcacgaagacgaagccgaagacgaagacgaagacggcgatagcgctggacagcagcagcgactggcgcgcaccaagggtctgcggtgccttgacaaggccgcggcgatcatcgtcatggacggagacaaggagcgggagagcgaatggtctctgtgcacggtgagcgaggtggagggcgtcaagatcctggtgcggatgcttcccatctggatgacgtgcgtgctgtacgcggcgtcgctggggcagatgaccaccaccttcatccagcaggggatggccatggacacgcggctgggcggccggttcaaggtgcccgtggcatcgttggtgtccgtggaggtggtgttcatgctcctgtgggtggcgctgcacgacgccgccatcatcccggcggcccggcggctgacggggcgccccggtgggctgacgcagctgcagcgcatgggcgtggggcggttcctggtggtgctggccctggggacggccgcgcttgtcgagaggcgccggctccgcgccatccacggcgggagcggcccgatgagcatcgtgtggcaggtgccgcagttcgtgctggtggcgggctccgacgttttctgcggcatcgcgcagctggagttcttctacggggaggcccccgccgcgatgcgcagcatctgctcggccttctccttcctggcgctgtcgctggggttctacgtcaactcgctggtggtgacgctggtggcggccgtgacgaagcggcccgggtggctggcgacggacctcgacaccggccacctggactactacttctggctctggaccatcatcagcgtcgccaacctgctgctctacatggtgctcgccgcccggtacacgcccaagcaggtcgccgctgccgtggtggagccgatgcgtcccagcaacagtggcggcagcgacgaatgattaatttggcacatcgatcgactgcaacttgatccgcttactatacagtaaaaaaacgagatatggtcgagtaggatacactacactgtacacctaacactagtagtaaaatggatgctccccagtcaacatttctttcagatcgacctgttattttgtgtttagttcagctcctcatgtaaagtgctattgttggtaaaaaaaaatagagcgtcaaccaaacgaataaaaattagaagatgttaattttatgctgtataattttcggtataaaatagataaaatgaaataaaatagagaga

SEQ ID NO: 2435 - DNA, 2517 bp, Zea Mays
gtgcgtccgagagaggggaatcgggccgctgcttccggcgacgcagtcactctgctccggcgctgacgagatgaaatgacatgaggagggagcggtcgagacggcgattgacgacgcaccgcacgccatcggatctgtcctctacttctgcctcatgttgactcctcggcgctcatccgcctattattttaaaatggagatgaagaatcgagatcgtccatgatccgtattcctccctcctcgttgactgccgcggccagcgatctggtcgtcaccttcctggaccgaccccaggccacggtgcagcagcctgcactctagtccgtgcgtgtcgcgtcgcgtctgcgggcggcattgcgtatcgtttctgtaggagcagaggagcagctgcctgaggcaattgttcccgtccccgcagagcggcatgtctccgcctccccctggcggctccaatggccgccgccaccagcagcagcggcaggaggcggtttcgtccatggaatccggcggcggcgcgtcgggggcggcgaccaagcgcttcacctggaagggcccggtaatcgtcctagtcttcgagctgctggagagcatcgcgttctcgggcgtggctctcaacctggtggtgtacctggccacggtgctgcacgggagcaccgccttcaacgccgcccacgtcgacacctggaacggcaccaccttcatcgtccctgtcatcggcgccttcctcgccgacagctactggggcaagtacaggaccatcctcgcctccatcgtcttctacctcgtgggcctggtgctcctcaccgtgtccgccgcgatcccgtcgctgcggcctgccacggcgtgccagatgggggagtcgtgcgcgccggcgaccaagacgcagttctccgtcttcttcgccgcgctctacctcacctccatcggcacgggaggggtcaagtccgcgctgctccccttcggcgccgagcagtacgacgacgacgcgggccggccggagcggaagcaggcctttttcagctggttcttcgccgccatcaacctgggcatcttcgtcgccggcacgctcgtgtcgtggctggagcagaacgtgtcgtgggcgctcggcttcggcatcggcacggcctgcctgttcgtggccgcgctcgccttcgcggcgggtacgccctgctacagggtgcagatgccgacgggcagcccactcaaggacatcatcagggtgttcgtcgccgccttcaggaagcgcgacgtcaggatggaacgggacgagggcgcggcggtgctgctgcacgaagacgaagccgaagacgaagacgaagacggcgatagcgctggacagcagcagcgactggcgcgcaccaagggtctgcggtgccttgacaaggccgcggcgatcatcgtcatggacggagacaaggagcgggagagcgaatggtctctgtgcacggtgagcgaggtggagggcgtcaagatcctggtgcggatgcttcccatctggatgacgtgcgtgctgtacgcggcgtcgctggggcagatgaccaccaccttcatccagcaggggatggccatggacacgcggctgggcggccggttcaaggtgcccgtggcatcgttggtgtccgtggaggtggtgttcatgctcctgtgggtggcgctgcacgacgccgccatcatcccggcggcccggcggctgacggggcgccccggtgggctgacgcagctgcagcgcatgggcgtggggcggttcctggtggtgctggccctggggacggccgcgcttgtcgagaggcgccggctccgcgccatccacggcgggagcggcccgatgagcatcgtgtggcaggtgccgcagttcgtgctggtggcgggctccgacgttttctgcggcatcgcgcagctggagttcttctacggggaggcccccgccgcgatgcgcagcatctgctcggccttctccttcctggcgctgtcgctggggttctacgtcaactcgctggtggtgacgctggtggcggccgtgacgaagcggcccgggtggctggcgacggacctcgacaccggccacctggactactacttctggctctggaccatcatcagcgtcgccaacctgctgctctacatggtgctcgccgcccggtacacgcccaagcaggtcgccgctgccgtggtggagccgatgcgtcccagcaacagtggcggcagcgacgaatgattaatttggcacatcgatcgactgcaacttgatccgcttactatacagtaaaaaaacgagatatggtcgagtaggatacactacactgtacacctaacactagtagtaaaatggatgctccccagtcaacatttctttcagatcgacctgttattttgtgtttagttcagctcctcatgtaaagtgctattgttggtaaaaaaaaatagagcgtcaaccaaacgaataaaaattagaagatgttaattttatgctgtataattttcggtataaaatagataaaatgaaataaaatagagaga

SEQ ID NO: 2436 - DNA, 2596 bp, Zea Mays
ctggagtatatcattgtggtagatggtactagcagtgttctgtgcagcgacgacagcagctgtcaataaaggaaagctagcttctgctctggcagtttgatcgatggccacacatccagtcgagatcactctgctccggcgctgacgagatgaaatgacatgaggagggagcggtcgagacggcgattgacgacgcaccgcacgccatcggatctgtcctctacttctgcctcatgttgactcctcggcgctcatccgcctattattttaaaatggagatgaagaatcgagatcgtccatgatccgtattcctccctcctcgttgactgccgcggccagcgatctggtcgtcaccttcctggaccgaccccaggccacggtgcagcagcctgcactctagtccgtgcgtgtcgcgtcgcgtctgcgggcggcattgcgtatcgtttctgtaggagcagaggagcagctgcctgaggcaattgttcccgtccccgcagagcggcatgtctccgcctccccctggcggctccaatggccgccgccaccagcagcagcggcaggaggcggtttcgtccatggaatccggcggcggcgcgtcgggggcggcgaccaagcgcttcacctggaagggcccggtaatcgtcctagtcttcgagctgctggagagcatcgcgttctcgggcgtggctctcaacctggtggtgtacctggccacggtgctgcacgggagcaccgccttcaacgccgcccacgtcgacacctggaacggcaccaccttcatcgtccctgtcatcggcgccttcctcgccgacagctactggggcaagtacaggaccatcctcgcctccatcgtcttctacctcgtgggcctggtgctcctcaccgtgtccgccgcgatcccgtcgctgcggcctgccacggcgtgccagatgggggagtcgtgcgcgccggcgaccaagacgcagttctccgtcttcttcgccgcgctctacctcacctccatcggcacgggaggggtcaagtccgcgctgctccccttcggcgccgagcagtacgacgacgacgcgggccggccggagcggaagcaggcctttttcagctggttcttcgccgccatcaacctgggcatcttcgtcgccggcacgctcgtgtcgtggctggagcagaacgtgtcgtgggcgctcggcttcggcatcggcacggcctgcctgttcgtggccgcgctcgccttcgcggcgggtacgccctgctacagggtgcagatgccgacgggcagcccactcaaggacatcatcagggtgttcgtcgccgccttcaggaagcgcgacgtcaggatggaacgggacgagggcgcggcggtgctgctgcacgaagacgaagccgaagacgaagacgaagacggcgatagcgctggacagcagcagcgactggcgcgcaccaagggtctgcggtgccttgacaaggccgcggcgatcatcgtcatggacggagacaaggagcgggagagcgaatggtctctgtgcacggtgagcgaggtggagggcgtcaagatcctggtgcggatgcttcccatctggatgacgtgcgtgctgtacgcggcgtcgctggggcagatgaccaccaccttcatccagcaggggatggccatggacacgcggctgggcggccggttcaaggtgcccgtggcatcgttggtgtccgtggaggtggtgttcatgctcctgtgggtggcgctgcacgacgccgccatcatcccggcggcccggcggctgacggggcgccccggtgggctgacgcagctgcagcgcatgggcgtggggcggttcctggtggtgctggccctggggacggccgcgcttgtcgagaggcgccggctccgcgccatccacggcgggagcggcccgatgagcatcgtgtggcaggtgccgcagttcgtgctggtggcgggctccgacgttttctgcggcatcgcgcagctggagttcttctacggggaggcccccgccgcgatgcgcagcatctgctcggccttctccttcctggcgctgtcgctggggttctacgtcaactcgctggtggtgacgctggtggcggccgtgacgaagcggcccgggtggctggcgacggacctcgacaccggccacctggactactacttctggctctggaccatcatcagcgtcgccaacctgctgctctacatggtgctcgccgcccggtacacgcccaagcaggtcgccgctgccgtggtggagccgatgcgtcccagcaacagtggcggcagcgacgaatgattaatttggcacatcgatcgactgcaacttgatccgcttactatacagtaaaaaaacgagatatggtcgagtaggatacactacactgtacacctaacactagtagtaaaatggatgctccccagtcaacatttctttcagatcgacctgttattttgtgtttagttcagctcctcatgtaaagtgctattgttggtaaaaaaaaatagagcgtcaaccaaacgaataaaaattagaagatgttaattttatgctgtataattttcggtataaaatagataaaatgaaataaaatagagaga

SEQ ID NO: 2437 - DNA, 1213 bp, Zea Mays
acagcgtgctggatctttcatacacaagatcaaattgtacctgggtggtgatgcttgggttggatgcagctgggaaaaccaccatactctataagcttcacattggtgaagttctctccactgtccctaccataggtttcaatgttgagaaggttcaatacaagaatgtagtgttcaccgtgtgggatgttggtggccaggagaagctcaggcccctgtggaggcactacttcaacaacactgatgctctgatttacgtggttgattcactggatagagagagaatcgggagagccagggcggagtttcaggctataatcaatgacccttttatgcttaacagtgtgttattggtgtttgctaacaagcaagacatgaggggagcaatgactccgatggaagtgtgtgagggccttgggctgtatgacctgacgaaccgcatctggcacatccagggcacctgtgctctaaaaggcgatggcctgtatgaagggttggactggctagcgactactctggacgaaatgcgtgcctctggacggttaacctcagcatcatcatcggcatcctgaatcacgtgtaacaggagggacaaacgatttgatcctcgtgatacgcccattgaaggatcatcttgtgattcaggctttgcgcgctttgttttcttttgtgtttccccaattgctgttggctatacatgtgtgctatgaactgggtggtgcatctggcaaggctaggtagtcagagttacagacgccggttccgtggtgacgatgtcagtacggtggtggtgtcgtactcgtctgctagtcggaagcaggcatcatcatccatctcgtcgcttgtgtgtgggagtgactgtaaatactaccactgatgacatggctctcgtggtttcttcgtctgaaactaaagaaacggaatcacatacgtacttgtgtgtgcgtcgtcgcctggagtcctgactcctgagtggtgacataaccatgcactagttgaactgcaagagacctagtactcgtatgctctgtgtagtgaaacgcaagtgatttgactggagactgaacgctgaaatgcaagtgatttcggtggaggctacggtttgcttgcttgtaagcgggcatgcgcggcggcccttttcctgccgctttggttttgcggccgtttggtatctgtcgagattttgtaaagaaacccaataagataacatgat

SEQ ID NO: 2438 - DNA, 778 bp, Zea Mays
ccacgttttccttcaatcagcgtacagttctcccctccttcctccagggttagatccagggaagacaactagatcgctcccacttcttcctcttgcctcctctgtgcttggatctatgtttccccacccccaatgctgatccttctcgcctcgatgtccaagagctccgatatgtcgtccaccgagccccggtgctcagatcacaacacatgccaaaggatttggcgggcgtagcagggtgtcgttcccacgggcatccctggatcaggattgtggaagtgagtgccatggggcaggagctagacgtgaaggtgccattgctgcatgatgagggtgtggattccatgaaagcatatgactgaattgagcttcttctaagcatttttttatgatggggcattcaaagctggtgaattggactagatattgagtttacaggagcagtcagggataatatgcatggttctgtaattagtgtggaaacctgagcaagacgtaaggcgtgtttctaaaaatgttcttaggaccagtaaatctacggacaacaaggaagattgtgcaacagaaggtgaaggaggatagaaggcagaagggggatggacgggcgacaacgacattggtgcggcgataaagttggtgagcacagaaggggagctaggtgtgccagtgacactggggcaacacagaagggggcaggcgacaaagtcaggtgtccactggcgaaggagacatctggaaactggaatcatgtagcctctgttctgcaaggtcgctaaat

SEQ ID NO: 2439 - DNA, 1011 bp, Zea Mays
cttcaatcagcgtacagttctcccctccttcctccagggttagatccagggaagacaactagatcgctcccacttcttcctcttgcctcctctgtgcttggatctatgtttccccacccccaatgctgatccttctcgcctcgatgtccaagagctccgatatgtcgtccaccgagccccggtgctcagatcacaacacgtgcgtgtcctcactctctctattcgcttacgcgtccgaatttgatgagctcggccggggtggctggctgtggtgggggcgcagatgccaaaggatttggcgggcgtagcagggtgtcgttcccacgggcatccctggatcaggattgtggaagtgagtgccatggggcaggagctagacgtgaaggtgccattgctgcatgatgagggtgtggattccatgaaagcatatgactgaattgagcttcttctaagcatttttttatgatggggcattcaaagctggtgaattggactagatattgagtttacaggagcagtcagggataatatgcatggttctgtaattagtgtggaaacctgagcaagacgcgtgtttctaaaaatgttcttaggaccagtaaatctacggacaacaaggaagattgtgcaacagaaggtgaaggaggatagaaggcagaagggggatggacgggcgacaacgacattggtgcggcgataaagttggtgagcacagaaggggagctaggtgtgccagtgacactggggcaacacagaagggggcaggcgacaaagtcagggtgagtacaataagggtacggcgacgacggagtcgagcgcttctaccttgtgtcgatccgatacaacgataatagaacagaagtggaattggattgttttagagagttgtggagttggattgtttggcgggatggtggatgtgtgctgtatttttgtcttcacgtatttattatttatttcaattctcatcatattcagtatatatataagaagacaaaaattgaggtgggg

SEQ ID NO: 2440 - DNA, 966 bp, Zea Mays
ccagggttagatccagggaagacaactagatcgctcccacttcttcctcttgcctcctctgtgcttggatctatgtttccccacccccaatgctgatccttctcgcctcgatgtccaagagctccgatatgtcgtccaccgagccccggtgctcagatcacaacacgtgcgtgtcctcactctctctattcgcttacgcgtccgaatttgatgagctcggccggggtggctggctgtggtgggggcgcagatgccaaaggatttggcgggcgtagcagggtgtcgttcccacgggcatccctggatcaggattgtggaagtgagtgccatggggcaggagctagacgtgaaggtgccattgctgcatgatgagggtgtggattccatgaaagcatatgactgaattgagcttcttctaagcatttttttatgatggggcattcaaagctggtgaattggactagatattgagtttacaggagcagtcagggataatatgcatggttctgtaattagtgtggaaacctgagcaagacgtaaggcgtgtttctaaaaatgttcttaggaccagtaaatctacggacaacaaggaagattgtgcaacagaaggcagaagggggatggacgggcgacaacgacattggtgcggcgataaagttggtgagcacagaaggggagctaggtgtgccagtgacactggggcaacacagaagggggcaggcgacaaagtcagggtgagtacaataagggtacggcgacgacggagtcgagcgcttctaccttgtgtcgatccgatacaacgataatagaacagaagtggaattggattgttttagagagttgtggagttggattgtttggcgggatggtggatgtgtgctgtatttttgtcttcacgtatttattatttatttcaattctcatcatattcagtatatatataagaagacaaaaattgaggtgggg

SEQ ID NO: 2441 - DNA, 726 bp, Zea Mays
gttagatccagggaagacaactagatcgctcccacttcttcctcttgcctcctctgtgcttggatctatgtttccccacccccaatgctgatccttctcgcctcgatgtccaagagctccgatatgtcgtccaccgagccccggtgctcagatcacaacacatgccaaaggatttggcgggcgtagcagggtgtcgttcccacgggcatccctggatcaggattgtggaagtgagtgccatggggcaggagctagacgtgaaggtgccattgctgcatgatgaggcgtgtttctaaaaatgttcttaggaccagtaaatctacggacaacaaggaagattgtgcaacagaaggtgaaggaggatagaaggcagaagggggatggacgggcgacaacgacattggtgcggcgataaagttggtgagcacagaaggggagctaggtgtgccagtgacactggggcaacacagaagggggcaggcgacaaagtcagggtgagtacaataagggtacggcgacgacggagtcgagcgcttctaccttgtgtcgatccgatacaacgataatagaacagaagtggaattggattgttttagagagttgtggagttggattgtttggcgggatggtggatgtgtgctgtatttttgtcttcacgtatttattatttatttcaattctcatcatattcagtatatatataagaagacaaaaattgaggtgggg

SEQ ID NO: 2442 - DNA, 1266 bp, Zea Mays
ctgtgcagtgctcactcccaagagctcccacgtatgccactatctacaccagcttttcaaccgctaaccgctgggtctctgcctttgtgcgcgctcggcattctgcgcagtagcgtccttcgctcagccgacgatggctacctcgccgttgtcctccaccactgggcgtcccctcgctgccggtctgttacaccgttccttgcgccctgctctgaccaggctcgcccaagtcgtgacctcgccgaatcgcgcctctgcttgacgccggtgatggccgccgttggtccctgcgtccttccccggtcgtctcacctcccctcgacgcccctattttttccctagctccggcgtccatcgtgtcctactccttccattcgcacagcactgctctggtggtcgtccaccccagcgcccagcgctgctctcgtctcgctgggctttgtctcgccaacgtcggtcgctgctccaactcacgttcgtggacgccgtatctgcgaccccgacaatccctacataatctgtgttttgtgtttgtcgccaaataaaatccctggcatttcggggagaggaagatgaagtcggctcttcgatcgctaggtgttcggtattgtgcacaaaccagaaattgatattttccatgcaaatatctaactggttcaaggtacgttaattgatcagatgatgcgtagaaccaaggccgaggtgaccacaagatgtcgttaagcgtgagcttcttcgcaacgtgatactgctgaatgaacttgaagattgggtgatcggatcaagtgccaggatgtgagattgtaacgccctgaatttggggtagattttttcttctttttactcaccaaattcaggcgttactctcttttctcttcctgtttcgctccttcttcccaatttcaaagcggtgtagtggtgtccgtattacgtataaacaaaaactaagttgtcatgggtgttgcatcatgccaaatcatatttctttgtttgatgtcgtgcttaatcgcgtgttttgctcagtctcgttccacgatttgaattccgatctgtggttgtgcgtgccatgggattttgacccgcggtgcggcccagcccggcccggccttggctcgcgcgcccctggcgtcctgtccctcccccatgcgcccccctctcctggtctctttccctcattcaattctccagcgcagcaacctcctctcccacctctcccccccgtggtgccctaggttttggagacggtgattaccggatttggaaccc

SEQ ID NO: 2443 - DNA, 2346 bp, Zea Mays
gcagtgctcactcccaagagctcccacgtatgccactatctacaccagcttttcaaccgctaaccgctgggtctctgcctttgtgcgcgctcggcattctgcgcagtagcgtccttcgctcagccgacgatggctacctcgccgttgtcctccaccactgggcgtcccctcgctgccggtctgttacaccgttccttgcgccctgctctgaccaggctcgcccaagtcgtgacctcgccgaatcgcgcctctgcttgacgccggtgatggccgccgttggtccctgcgtccttccccggtcgtctcacctcccctcgacgcccctattttttccctagctccggcgtccatcgtgtcctactccttccattcgcacagcactgctctggtggtcgtccaccccagcgcccagcgctgctctcgtctcgctgggctttgtctcgccaacgtcggtcgctgctccaactcacgttcgtggacgccgtatctgcgaccccgacaatccctacataatctgtgttttgtgtttgtcgccaaataaaatccctggcatttcggggagaggaagatgaagtcggctcttcgatcgctaggtgttcggtattgtgcacaaaccagaaattgatattttccatgcaaatatctaactggttcaaggtatggtgagctccattgctatccttgctaattaatttgatagatggattagaagggtattaatcgtaatgattattctatttgtagcttagatgcgcaggtgggtgttcgaaatatatattgggaccgacgccgttttagtattcgtgtggtgatttacgttttttctgtgttcatgcgtttgaatcgcaatatgcgattagtgaggaaggctagatggtgtaggcagtgaaggttcatggagcgttcgcttagtgttcgacaaaacgcccaaaccatgattcatcgtcaatttgcgattatcaaatcgttttggtcatggtaagcggatgggttattcgtgataactagatcattaaataaattaattgggtaatgtgatgatccttttatttagtatatgtgcgcttggtagctatggctagatccggtcatgtcaatgtgctgttgtgtggtaaaaatagcttagcgtagcactctcggatgttcggtaaaatggatgacctgtagatcatcgtcgatctcgttaattcgagttctaatgagttgtggtgcgcggactcattgccctggctatctggtttgttgtattgattatatatattaatcgcaatgattttcatattttttttaaaaaagcaagagtttcgtagaactctaggctatataataatattctacctgttagtttaagtctgaacaaggtgttttatttagtaaatgtgatatgcataatgatctaaaatagtaattctaaaagctaactgaaatagttttgttcattgttctaagcttctggtgtcctaagagggagagtctaagtattcttagtccttaagtgtcatgcgttagctaatgatggtataggacttgttcataatattattcttgatgtttaagttagatccgtttaagctagagtagtgtgctggttgtacttagtaatatctcaacatctagtgattgcttttaaatattattatgtgccccaccactaggtatttaattcactatcgtgtagcaacaattaggcttgtgttattcctctttatatttacccatgtgcattatgcacatcatttaggtacgttaattgatcagatgatgcgtagaaccaaggccgaggtgaccacaagatgtcgttaagcgtgagcttcttcgcaacgtgatactgctgaatgaacttgaagattgggtgatcggatcaagtgccaggatgtgagattgtaacgccctgaatttggggtagattttttcttctttttactcaccaaattcaggcgttactctcttttctcttcctgtttcgctccttcttcccaatttcaaagcggtgtagtggtgtccgtattacgtataaacaaaaactaagttgtcatgggtgttgcatcatgccaaatcatatttctttgtttgatgtcgtgcttaatcgcgtgttttgctcagtctcgttccacgatttgaattccgatctgtggttgtgcgtgccatgggattttgacccgcggtgcggcccagcccggcccggccttggctcgcgcgcccctggcgtcctgtccctcccccatgcgcccccctctcctggtctctttccctcattcaattctccagcgcagcaacctcctctcccacctctcccccccgtggtgccctaggttttggagacggtgattaccggatttggaaccc

SEQ ID NO: 2444 - DNA, 2689 bp, Zea Mays
gtccgtttggctcgccaccatttcttccctgcccttccctgtttcctggcctggctttataatctctcggtcgctactgattgcccgggtcactacttccttcggttttactatcccttcgtttccgctagccttctccttccagagcaaccgcgccattcgtctcctccgtctcgttcgtagtgcaacacatacagcctcgtctggtgaagtgaaagaacgacaagatctgtggtacggcggtgccggccgacatccacccactgtgctaccccttgcggttccagccagcgcagcgatcgattcccgctggccgctgccgtcggtgcctgcccggtcctccactcctcccgctactagtactagtaccagcacactccactgtccactccactgccagtgccatcccattcccatccgagctgcagcgctcgacgacggggagaatagcgtggcgtgggcggcgccatgaagtacagcaaggaagataagcccgagagggcgggcggcgccggcgcagggtccagggcggtgccggtggcgctcgtcgtcgtcgtgctctgcgccttctccttctacctgggcggcatctacagcacgggacggagcctgctggactccatccagccggcgccgacggctctcctcgccctcggcgccgccacgacgacccgccgtccctccgacgacggccaggctcggccggcactggcgtccacggccgccgtggcgttccccgagtgccccgccgactaccaggactacaccccctgcaccgaccccaagcgctggcggaggtacggcaactaccgcctcagcttcatggagcggcactgcccgccgccgcccgaccggcaccatgttccccaacggcgtcggcgcgtacgtggacctgatgcagggcctggtcccgggcatgcgcgacggcaccgtccgcaccgcgctcgacaccggctgcggcgtcgccagctggggcggcgacctgctggggcggggcatcctcaccgtgtcgctggcgcccagggacaaccacgaggcccaggtgcagttcgcgctggagcgcggcatcccggccatcctcggcatcatctccacgcagcgcctgccgttcccgtccgccgccttcgacatggcgcactgctcgcgctgcctcatcccctggaccgagttcggcggcctctacctcctggagatccaccgcgtcctccgcccgggcggcttctgggtgctctccggcccgcccgtcaactacgagaaccgctggcacggctggaacaccaccgcgcaggcgcagaaggccgacctggacaggctcaagaagatgctggccagcatgtgcttcaagctctacagcatgaagggggacatcgccgtgtggcagaagtccgccgacgcctgctacgacaagctcaccccggtcaccacgcccgccaagtgcgacgacagcgtcgaccccgacgccgcctggtacgtgcccatgcgctcctgcgtcacggctcccagccccaagtacaggaagctggggctcaacgccacgcccaagtggccccagaggctcagcgtcgccccggagcgcatcagcgtcgtcccgggcagcagcgccgccgccttcaagcaggacgacgcccggtggaagctcagggtcaagcactacaagacgctgctgccggcgctggggagcgacaagatcaggaacgtcatggacatgaacaccgtgtacggaggattcgcaggcagcctcatcaaggaccccgtctgggtcatgaacgtcgtctcctcctacggcccaaactccctcggcgtcgtctacgacagagggctcatcggcgtcaaccacgactggtgtgaggcgttctcgacatatccacgcacctatgacctgttgcatcttgatggcctgttcacagcagagtctcacaggtgcgagatgaagtacgtgctccttgagatggaccgtatccttcgtcccacgggctacgccataatccgggagagcacctacttcctcgattctgtggcacccattgccaaagggatgcgatggagctgcgagaagcacagcagcgagaacaaggccgacaaggacaagatcctcgtctgccagaaaaagctttgggcaggaaagcagtgacgagagaggatcatccttcttccttccgagtataaaaaagtaggcatccagatcggccaacaaggcaagaggcgcttcaatacacatggaagatgagcgagtacttctgatacaaagagtgttcggcagttattatcaaaataaataagccgagtaaaactccatataggatccaacagttaccatttttcattaatcacagtttaattctttttctgtaccgacagtttgtaggcaaggagtgggtcaattcatataccatatggtgagcaaatgtaagtttactccacactagatgtgtatagcttggttggtgctactgctatcgatgtaatagcgggccacgtatttacttcacatgttttgtggatcaatatactatgactgtgatgtcctaaagcgacggattttgttgagtgctgctatcagttgacgtcgcaatgcattgttcttgagcaagcaattcctctgaaattgaaatagaaacaaacaagaaaaaggaaccggtaatgcaatgtagccaaagggggcaaaaagaaaaaggaatctgagaatgac

SEQ ID NO: 2445 - DNA, 1843 bp, Zea Mays
gggtcactacttccttcggttttactatcccttcgtttccgctagccttctccttccagagcaaccgcgccattcgtctcctccgtctcgttcgtagtgcaacacatacagcctcgtctggtgaagtgaaagaacgacaagatctgtggtacggcggtgccggccgacatccacccactgtgctaccccttgcggttccagccagcgcagcgatcgattcccgctggccgctgccgtcggtgcctgcccggtcctccactcctcccgctactagtactagtaccagcacactccactgtccactccactgccagtgccatcccattcccatccgaggtaaacgcgtcaacgcgaccagctcacctcgtcatctcccattctctttcatatttgcatgcatctcggttctcggatgttcgtcccctgcgcctttttttcttcttctctgccaccccgcaccccgcaccccggtaataaaagtttaatttctcctcgcgttacagctgcagcgctcgacgacggggagaatagcgtggcgtgggcggcgccatgaagtacagcaaggaagataagcccgagagggcgggcggcgccggcgcagggtccagggcggtgccggtggcgctcgtcgtcgtcgtgctctgcgccttctccttctacctgggcggcatctacagcacgggacggagcctgctggactccatccagccggcgccgacggctctcctcgccctcggcgccgccacgacgacccgccgtccctccgacgacggccaggctcggccggcactggcgtccacggccgccgtggcgttccccgagtgccccgccgactaccaggactacaccccctgcaccgaccccaagcgctggcggaggattcgcaggcagcctcatcaaggaccccgtctgggtcatgaacgtcgtctcctcctacggcccaaactccctcggcgtcgtctacgacagagggctcatcggcgtcaaccacgactggtgtgaggcgttctcgacatatccacgcacctatgacctgttgcatcttgatggcctgttcacagcagagtctcacaggtgcgagatgaagtacgtgctccttgagatggaccgtatccttcgtcccacgggctacgccataatccgggagagcacctacttcctcgattctgtggcacccattgccaaagggatgcgatggagctgcgagaagcacagcagcgagaacaaggccgacaaggacaagatcctcgtctgccagaaaaagctttgggcaggaaagcagtgacgagagaggatcatccttcttccttccgagtataaaaaagtaggcatccagatcggccaacaaggcaagaggcgcttcaatacacatggaagatgagcgagtacttctgatacaaagagtgttcggcagttattatcaaaataaataagccgagtaaaactccatataggatccaacagttaccatttttcattaatcacagtttaattctttttctgtaccgacagtttgtaggcaaggagtgggtcaattcatataccatatggtgagcaaatgtaagtttactccacactagatgtgtatagcttggttggtgctactgctatcgatgtaatagcgggccacgtatttacttcacatgttttgtggatcaatatactatgactgtgatgtcctaaagcgacggattttgttgagtgctgctatcagttgacgtcgcaatgcattgttcttgagcaagcaattcctctgaaattgaaatagaaacaaacaagaaaaaggaaccggtaatgcaatgtagccaaagggggcaaaaagaaaaaggaatctgagaatgac

SEQ ID NO: 2446 - DNA, 1639 bp, Zea Mays
ctggcccagcccagttgttgggcgaacagagagtcgtcttgctctactctagtcgttcggtcttcactcgacaaaaggtgagggagtgcagtccggggacgggagggagaccaatcggagctgatggaggcagcggcggcgctgccgccggagagggatacgtcagcggactggggagatggcgtggtaccgctaggtttccgggtgaaggcatcctctcgcgagtcgccgtcacagaaggcggggaacgtgctggaggccgacctgcgctcccactgggccaccgccaccaacaccaaggaatggatcctccttgagctccaggaaccgtgcctcctctcccacatccgcatctacaacaaatccgtcctcgagtgggagctcactgccggactgcgatacaagcccgatgcattcgtcaagttgcgcccccgctgcgaggcccccaagcgcgacgtcgtctaccccgccaaccacaccccttgccgctaccttcgcatttcctgcctgcgcggcaaccccatcgccatcttcttcatccaactctttggcatccccgtgcctggcctcgaacctgagctccagccactgctcagctatttactcccgcaaatcacatcctccaaacaacccctttctcacaacatgcacctccagttgcttaaagatatctccaccaggctacctccatttcttccccaaattgaggctgaccttaatagtgtcgtggacaccccagaaagcagcgtgcggttcttggctctacttgctggtccattttatcctatccttcaccttataaatgaaagagatcctaccaaatctttgtttggttctgctgattcagatgccctcagaactagtccagcttctactccaacagtttcttcaaactttgaggcacaaccaaggagatcacggagtccatctgttcagcctgcttcatatttgctggcatttcgatctgaaacaactatgctcctcttaaggaaagcacataaagacaaaacccttggagttgtttgtgttcgagcatcgaaggtattgcaaaaactgttggagcctgagccatttttagacaaatcgatgtatactgatgtcatgctaccaaaccaagtctctgatgaaattcctaaaagcgatgctctcagcctagtacattctacagactactccagtatgtttggagaggaatttagcctgtcagagaatcagtttgatggttcattactgaatattttggatattgctgctgtggaagaaggcattcttcatgtactatatgcggctgcatcacagcctatgctatgtcgcaagcttgctgaaactacttcagacatttggtctgtcttaccacttgtccaagctctacttccagcacttcgtcctccaatcagttctggtcctattgaacatattgatgattcttttagccaatggaaccatccaaacattcagaatgctctctcccagattgttacaatgtcagtatcgtcatcagtttttcatcctcttctcagagcttgtgctggttatctttcatcctaccttccatcacatgtaaaaacggcttgtgttttgcttgacttgtgtcggggggcattgttatcatggataccaatgataacagcaaaggtct

SEQ ID NO: 2447 - DNA, 1650 bp, Zea Mays
cagagagtcgtcttgctctactctagtcgttcggtcttcactcgacaaaaggtgagggagtgcagtccggggacgggagggagaccaatcggagctgatggaggcagcggcggcgctgccgccggagagggatacgtcagcggactggggagatggcgtggtaccgctaggtttccgggtgaaggcatcctctcgcgagtcgccgtcacagaaggcggggaacgtgctggaggccgacctgcgctcccactgggccaccgccaccaacaccaaggaatggatcctccttgagctccaggaaccgtgcctcctctcccacatccgcatctacaacaaatccgtcctcgagtgggagctcactgccggactgcgatacaagcccgatgcattcgtcaagttgcgcccccgctgcgaggcccccaagcgcgacgtcgtctaccccgccaaccacaccccttgccgctaccttcgcatttcctgcctgcgcggcaaccccatcgccatcttcttcatccaactctttggcatccccgtgcctggcctcgaacctgagctccagccactgctcagctatttactcccgcaaatcacatcctccaaacaacccctttctcacaacatgcacctccagttgcttaaagatatctccaccaggctacctccatttcttccccaaattgaggctgctgtctgtttagttcaggctgaccttaatagtgtcgtggacaccccagaaagcagcgtgcggttcttggctctacttgctggtccattttatcctatccttcaccttataaatgaaagagatcctaccaaatctttgtttggttctgctgattcagatgccctcagaactagtccagcttctactccaacagtttcttcaaactttgaggcacaaccaaggagatcacggagtccatctgttcagcctgcttcatatttgctggcatttcgatctgaaacaactatgctcctcttaaggaaagcacataaagacaaaacccttggagttgtttgtgttcgagcatcgaaggtattgcaaaaactgttggagcctgagccatttttagacaaatcgatgtatactgatgtcatgctaccaaaccaagtctctgatgaaattcctaaaagcgatgctctcagcctagtacattctacagactactccagtatgtttggagaggaatttagcctgtcagagaatcagtttgatggttcattactgaatattttggatattgctgctgtggaagaaggcattcttcatgtactatatgcggctgcatcacagcctatgctatgtcgcaagcttgctgaaactacttcagacatttggtctgtcttaccacttgtccaagctctacttccagcacttcgtcctccaatcagttctggtcctattgaacatattgatgattcttttagccaatggaaccatccaaacattcagaatgctctctcccagattactatggctgcagattgttacaatgtcagtatcgtcatcagtttttcatcctcttctcagagcttgtgctggttatctttcatcctaccttccatcacatgtaaaaacggcttgtgttttgcttgacttgtgtcggggggcattgttatcatggataccaatgataacagcaaaggtct

SEQ ID NO: 2448 - DNA, 1629 bp, Zea Mays
cagagagtcgtcttgctctactctagtcgttcggtcttcactcgacaaaaggtgagggagtgcagtccggggacgggagggagaccaatcggagctgatggaggcagcggcggcgctgccgccggagagggatacgtcagcggactggggagatggcgtggtaccgctaggtttccgggtgaaggcatcctctcgcgagtcgccgtcacagaaggcggggaacgtgctggaggccgacctgcgctcccactgggccaccgccaccaacaccaaggaatggatcctccttgagctccaggaaccgtgcctcctctcccacatccgcatctacaacaaatccgtcctcgagtgggagctcactgccggactgcgatacaagcccgatgcattcgtcaagttgcgcccccgctgcgaggcccccaagcgcgacgtcgtctaccccgccaaccacaccccttgccgctaccttcgcatttcctgcctgcgcggcaaccccatcgccatcttcttcatccaactctttggcatccccgtgcctggcctcgaacctgagctccagccactgctcagctatttactcccgcaaatcacatcctccaaacaacccctttctcacaacatgcacctccagttgcttaaagatatctccaccaggctacctccatttcttccccaaattgaggctgaccttaatagtgtcgtggacaccccagaaagcagcgtgcggttcttggctctacttgctggtccattttatcctatccttcaccttataaatgaaagagatcctaccaaatctttgtttggttctgctgattcagatgccctcagaactagtccagcttctactccaacagtttcttcaaactttgaggcacaaccaaggagatcacggagtccatctgttcagcctgcttcatatttgctggcatttcgatctgaaacaactatgctcctcttaaggaaagcacataaagacaaaacccttggagttgtttgtgttcgagcatcgaaggtattgcaaaaactgttggagcctgagccatttttagacaaatcgatgtatactgatgtcatgctaccaaaccaagtctctgatgaaattcctaaaagcgatgctctcagcctagtacattctacagactactccagtatgtttggagaggaatttagcctgtcagagaatcagtttgatggttcattactgaatattttggatattgctgctgtggaagaaggcattcttcatgtactatatgcggctgcatcacagcctatgctatgtcgcaagcttgctgaaactacttcagacatttggtctgtcttaccacttgtccaagctctacttccagcacttcgtcctccaatcagttctggtcctattgaacatattgatgattcttttagccaatggaaccatccaaacattcagaatgctctctcccagattactatggctgcagattgttacaatgtcagtatcgtcatcagtttttcatcctcttctcagagcttgtgctggttatctttcatcctaccttccatcacatgtaaaaacggcttgtgttttgcttgacttgtgtcggggggcattgttatcatggataccaatgataacagcaaaggtct

SEQ ID NO: 2449 - DNA, 1614 bp, Zea Mays
cagagagtcgtcttgctctactctagtcgttcggtcttcactcgacaaaaggtgagggagtgcagtccggggacgggagggagaccaatcggagctgatggaggcagcggcggcgctgccgccggagagggatacgtcagcggactggggagatggcgtggtaccgctaggtttccgggtgaaggcatcctctcgcgagtcgccgtcacagaaggcggggaacgtgctggaggccgacctgcgctcccactgggccaccgccaccaacaccaaggaatggatcctccttgagctccaggaaccgtgcctcctctcccacatccgcatctacaacaaatccgtcctcgagtgggagctcactgccggactgcgatacaagcccgatgcattcgtcaagttgcgcccccgctgcgaggcccccaagcgcgacgtcgtctaccccgccaaccacaccccttgccgctaccttcgcatttcctgcctgcgcggcaaccccatcgccatcttcttcatccaactctttggcatccccgtgcctggcctcgaacctgagctccagccactgctcagctatttactcccgcaaatcacatcctccaaacaacccctttctcacaacatgcacctccagttgcttaaagatatctccaccaggctacctccatttcttccccaaattgaggctgaccttaatagtgtcgtggacaccccagaaagcagcgtgcggttcttggctctacttgctggtccattttatcctatccttcaccttataaatgaaagagatcctaccaaatctttgtttggttctgctgattcagatgccctcagaactagtccagcttctactccaacagtttcttcaaactttgaggcacaaccaaggagatcacggagtccatctgttcagcctgcttcatatttgctggcatttcgatctgaaacaactatgctcctcttaaggaaagcacataaagacaaaacccttggagttgtttgtgttcgagcatcgaaggtattgcaaaaactgttggagcctgagccatttttagacaaatcgatgtatactgatgtcatgctaccaaaccaagtctctgatgaaattcctaaaagcgatgctctcagcctagtacattctacagactactccagtatgtttggagaggaatttagcctgtcagagaatcagtttgatggttcattactgaatattttggatattgctgctgtggaagaaggcattcttcatgtactatatgcggctgcatcacagcctatgctatgtcgcaagcttgctgaaactacttcagacatttggtctgtcttaccacttgtccaagctctacttccagcacttcgtcctccaatcagttctggtcctattgaacatattgatgattcttttagccaatggaaccatccaaacattcagaatgctctctcccaggattgttacaatgtcagtatcgtcatcagtttttcatcctcttctcagagcttgtgctggttatctttcatcctaccttccatcacatgtaaaaacggcttgtgttttgcttgacttgtgtcggggggcattgttatcatggataccaatgataacagcaaaggtct

SEQ ID NO: 2450 - DNA, 1615 bp, Zea Mays
cagagagtcgtcttgctctactctagtcgttcggtcttcactcgacaaaaggtgagggagtgcagtccggggacgggagggagaccaatcggagctgatggaggcagcggcggcgctgccgccggagagggatacgtcagcggactggggagatggcgtggtaccgctaggtttccgggtgaaggcatcctctcgcgagtcgccgtcacagaaggcggggaacgtgctggaggccgacctgcgctcccactgggccaccgccaccaacaccaaggaatggatcctccttgagctccaggaaccgtgcctcctctcccacatccgcatctacaacaaatccgtcctcgagtgggagctcactgccggactgcgatacaagcccgatgcattcgtcaagttgcgcccccgctgcgaggcccccaagcgcgacgtcgtctaccccgccaaccacaccccttgccgctaccttcgcatttcctgcctgcgcggcaaccccatcgccatcttcttcatccaactctttggcatccccgtgcctggcctcgaacctgagctccagccactgctcagctatttactcccgcaaatcacatcctccaaacaacccctttctcacaacatgcacctccagttgcttaaagatatctccaccaggctacctccatttcttccccaaattgaggctgaccttaatagtgtcgtggacaccccagaaagcagcgtgcggttcttggctctacttgctggtccattttatcctatccttcaccttataaatgaaagagatcctaccaaatctttgtttggttctgctgattcagatgccctcagaactagtccagcttctactccaacagtttcttcaaactttgaggcacaaccaaggagatcacggagtccatctgttcagcctgcttcatatttgctggcatttcgatctgaaacaactatgctcctcttaaggaaagcacataaagacaaaacccttggagttgtttgtgttcgagcatcgaaggtattgcaaaaactgttggagcctgagccatttttagacaaatcgatgtatactgatgtcatgctaccaaaccaagtctctgatgaaattcctaaaagcgatgctctcagcctagtacattctacagactactccagtatgtttggagaggaatttagcctgtcagagaatcagtttgatggttcattactgaatattttggatattgctgctgtggaagaaggcattcttcatgtactatatgcggctgcatcacagcctatgctatgtcgcaagcttgctgaaactacttcagacatttggtctgtcttaccacttgtccaagctctacttccagagcacttcgtcctccaatcagttctggtcctattgaacatattgatgattcttttagccaatggaaccatccaaacattcagaatgctctctcccagattgttacaatgtcagtatcgtcatcagtttttcatcctcttctcagagcttgtgctggttatctttcatcctaccttccatcacatgtaaaaacggcttgtgttttgcttgacttgtgtcggggggcattgttatcatggataccaatgataacagcaaaggtct

SEQ ID NO: 2451 - DNA, 7301 bp, Zea Mays
cagagagtcgtcttgctctactctagtcgttcggtcttcactcgacaaaaggtgagggagtgcagtccggggacgggagggagaccaatcggagctgatggaggcagcggcggcgctgccgccggagagggatacgtcagcggactggggagatggcgtggtaccgctaggtttccgggtgaaggcatcctctcgcgagtcgccgtcacagaaggcggggaacgtgctggaggccgacctgcgctcccactgggccaccgccaccaacaccaaggaatggatcctccttgagctccaggaaccgtgcctcctctcccacatccgcatctacaacaaatccgtcctcgagtgggagctcactgccggactgcgatacaagcccgatgcattcgtcaagttgcgcccccgctgcgaggcccccaagcgcgacgtcgtctaccccgccaaccacaccccttgccgctaccttcgcatttcctgcctgcgcggcaaccccatcgccatcttcttcatccaactctttggcatccccgtgcctggcctcgaacctgagctccagccactgctcagctatttactcccgcaaatcacatcctccaaacaacccctttctcacaacatgcacctccagttgcttaaagatatctccaccaggctacctccatttcttccccaaattgaggctgaccttaatagtgtcgtggacaccccagaaagcagcgtgcggttcttggctctacttgctggtccattttatcctatccttcaccttataaatgaaagagatcctaccaaatctttgtttggttctgctgattcagatgccctcagaactagtccagcttctactccaacagtttcttcaaactttgaggcacaaccaaggagatcacggagtccatctgttcagcctgcttcatatttgctggcatttcgatctgaaacaactatgctcctcttaaggaaagcacataaagacaaaacccttggagttgtttgtgttcgagcatcgaaggtattgcaaaaactgttggagcctgagccatttttagacaaatcgatgtatactgatgtcatgctaccaaaccaagtctctgatgaaattcctaaaagcgatgctctcagcctagtacattctacagactactccagtatgtttggagaggaatttagcctgtcagagaatcagtttgatggttcattactgaatattttggatattgctgctgtggaagaaggcattcttcatgtactatatgcggctgcatcacagcctatgctatgtcgcaagcttgctgaaactacttcagacatttggtctgtcttaccacttgtccaagctctacttccaggaagctggccaatctcttgctcgttcacgtgcagcactgaagtatgttgtattggcaatttctgggcatatggatgatgtgctcacagaatataaagaagccatgcataagttacttttcgttctggagatgctagatccttttattgatccatctacaagtgccatggaagacacagtaatatttgatggtatctctgctatatatttggaaaagcaatcaagtgtatatgatattgccttaaatattatccatacagcagtaaagagagctgctgttctcccttctttagaacttgaatggcgacgaggagccattgccccaagtgtaattctctctatcttggatccgcacatgcctcttcctcctgacatagacctctgcaaaagttcagtgcatgagattgataaagtgcctttggctgttttggataatcatgcaccacagccatgcaacccagaaaatattgctgggcgagatgcatctgaaacaactattcgtcctgaaaattttgaacagtgcagctttctgtttgctcctgaagaattaaaccaatctgagttgactagtctttataccttgaaaggaaaaggccatgatgtaataactcaaacaagtctgaaccatgacattcctgaaggcagaagtaaagagaaactatcatctgaccctttcctgctagataatgttgttgcagctgattattttgattcacaggctgattatcaacagctggaaaactaccaggactgtgagttaagagctcaagaatttcatcgcatagcactcaacctatgcatgcaacaagaaccaacattagaagggcataatgctggaattgatgctttgctattagccgcagaatgttatgttaatccattttttctattgggattccagtctaatttagagcctctggacaagattgaacgtattcattcagagttgatgcaagggaatgcttcctctgtatcaaaaaatttgcacttgaaagatttcaacaaaaaaacaatctacaatttggagaacaagcgtgatagatctgttatagatttactcctacaagccgccagatttgactttgaatatcatggaaagatacctgaaggggaactatatccaaatattgctgaagatggcaagcgatctgtagaaatctcacctgaagctcttcagtttgctgatgctgtaactttggtccgaaagaaccaggctatgctgtgccactttattatgaagcaattccaaaggaaaggacacttgggtagtgaaattcttctccagagcttgttgttcctgttgcactcagcaactgatctattttgtccaccagagaatgtagttgatataattttgaagtctgctgaaagcctcaatgatcagcttacatgtctttacagtttttttagtgcagggaataagaaattggataggataaaaatacatggtctaagaagacgttggatgcttctccagaaactggttctggcttcatcaggcagtgatagtactagagaacttgccagaaataaaagagatggtttccattttagaagtttagtccctccatcaacatggatacaaaagatatctgatttctccatgttttctagcccactccctcgatttttcggatggatggcagtgtcttgctatgccaaggaatatttaaatgagaagctgtttcttgcttctgatttctcacagcttacatctttgctatcaatttacatggatgaactttgtttgatggatggagttgcaatcccgaaagtcaggtctgcaaaaggtgaacaatttagttgtacggacttgtttcttaaaaaggaaactactctgtcagaccaaccaagcatgaccgaacagtttaaaatcttacttccggagctacatttcttctttccaagcatgggtaaattgtttaatgcatttggggagagcatcttggaggctgttgggctacagttaaaatgtctgcccaatagtgcaataccagacgtcctttgttggttttctgagttgtgcttatggccttatctcgaacacattaaggagcatcttgtagttgcaaacggagttagttatataagaggaagtattgctgctaatgcaaaatcagttgtcttctacctacttgagtctattgttactgagcacttggaggctgttattcctgaaatgcccaggatagtgcacattcttgtgtctctctgtagagcttcttatactgatgtggccttcctaaaatctgtgctatgtctaatcaagccactcatctcctacttcttaaggaagggaactaatgaaacaaaagtactgggccatataaaggagggcagcaattttgagttgctttgttttgaagaattgtttgaaattgttcgctgtggtaaagattcggtggatacaactgaagataatattcaggcaccgttggtcatcttcattctgggatctatgtttcttgatttctcatttgagagaaggattgaaatgttaggctccttgttagtatggattgattgcatcagttccgatccaccatcgttattatgcaactatcttcaaggtttccagacacttctagatggttttgaagctgtgctaattcaaaatattgaactacttggtgtcggcatcctttctgcgacaaactcgtctatagaatcttctgattccttgggcattgatggcactatgctactagagaagaaggcacaagataatgaagaacaaacactaatgaaatccgtaacatactgtgagaacgatggaaatcataagggtcttcgtaatctgcatcctaatagtatcatagagttttgtggcaccctggagaagtttattttgcaccttacttcatatattgaggatagttggaaatggcaccatcagttggcctctaggatctctttgtctatggcaaagtgtttgttgtttgcaaaatttttgaagtccatagcgcaagaagacacaatatctagtagcagtgagcaagatgtcgctgtgaaaatttcctgtgagcttgcacaaaagcattggcaaagtgctcttgaaggtctaggagataccattttgataaatcaggaaacacagttctggcaggtggcatcagctatgcttgattatataatggggataccaaacgtccttgcttggggtaatgttcttaatactacatgctctgcggtcaagcacttctgctcccatgcacctaggctatcttggaggctgcagacagataagtggttgtcattattagtttcaggtggaattgagggcttcaaaaacagtgagatctgtttgattgatcttttctgtacaatgttgaatcattctgaaccagagcagcgttttgttgctgtacaacagcttgggaggattattaactcaacaagttctactgaagctgatttgaaatatccaaactatgaccaaaatttcctcatatctgtttcgacagtaacatcccttttggtaactcatacatgggacagagtagcagcattggctctccatgactcttctatgctattaaggaatcatgcaatggcattgcttactgaatatgtgccttttgttgataggaagcacctgcagtccttcctttcatccagtaacggtatcctgactggtttgggacaactttctggtgtaattgaagagggctattttacacgaatgtctttgctgttgttttctaaggcatgtctttattctaatcctgaagatatcgctttgatacctgaatgtgtttggcagaagttggaaaacatgcaaacatcaactggaggttttggatatatggagaaagatctctgcctagctctgtgccaactaaaaagtgaatcagatgctacaactgttgcaaaagttctttctggatgtaatagtcaaccagtcagccctgatttcaagagcatccgtgaatcaatccttcaggtgatgtcctctttgagttctattgaagcatactttgagttcttcgcagccagatctgcacaagaacatgaggaacttgaagaagctgagattgaattggagcttattgaaaaagagaagtcagttcctaactttgttgagcataccaatgatacgatggtgcttgccatgccatcatatgaccgtgatggtagtgaggttaataaacggctccagcaaatccgggaaaatattcggtccctggaaaggtctaggctgaaagaggaaattacagcgcgcagacaaaagaagctgcttctaagacatgcccgtgaaaagtacctagaagagacacgctccagggaaacggagcttatgcaagagctcgacagggaaagagctctcgagatggaacgtgaagtagaaaggcagcgtcaactggatattgagcgtgcaaagtctagggaactgcaattcaacattgatttggaaaaagagaaacaaactcagagagagcttcaacgcgaactggagcaagtcgagttggggcggtcatcaaggcgtgagttctctgccaatcccaacagggagaggtaccgcgaaagggatggtggaggcagagcacagcaggaggcggggagcctgaggtcttcgagcagccgaggccaggaggggggctctgcccaggcgcccgcaccggccgggccgggccctaccgtcatgctcgccgggtcaaggacgttctcgggggccaaccttccaacgattctgcagcctcgcgagcgcgctgccgacgaggacagcgcttgggccgaggacgctagcagcaacggagatcctgaactggacggcgtgaggccgcatgggccgcgaggcagcaggtcatcctcctctaggcaggttgcggagaggagggagcgggatggcactgctgccggcacgggcaggagagaagggaaatgggagaggaagcagcacccgtgactattccctgcttgtgttgtgcctaagcctaacggaggcttcctcaatcgcgttgtaattgtactcgtatgggcattggatcaggtggctgcttagtcaacggtaccgtgcattgataaaaaggttggatcatcgtatgggaacactaccaatcagctgcctgctcagtcaacagcaccattaccatcacactccgacttttgtcagatcccctaagggtgtgttcggttacaccaatccagaggggaggatttaaatccccttctagtcattttgactaagaggagatttaaacccctccaatgatgactagaggggatttaaacccttccaatctctctctggattggcctaaccgaacaagcccaaaaggcgctccatggcccacgctctcccttggctctgtcgactgccctcgtcctaagcactagcagcctgcttaggctttgttgggtttgacgtggattgagatggattaaagagattaaatatttttttatttaaatttgaataagagaggatttaattccctttagggcggctttggatgctgcattccctcagcctcggtaggccctcaggcgaattgatcatgatgggtcctctagactataaaaattctatgatatacaatggcgtagattagcacttcgtagataaatgatgatgtgcattccacctttgtggtagcacttggctaagtaattagaaaaactagtgtgagttaatcgggacaagcaaggtggaggagtacaggtgtagggaggtcctcgggtcggattgtctttttagcttttcggacgagggattcctatatcgccagcgggttctcttctctagtggaactttggaaaggcctcgtagtgctactctgtctcgctttctcggtagaggtgtatgtgaatcatggccacgtggcagatgggtatcacagcttgtgggtaaagatgtgcaatctttgtagagtgtaaaactgatatattagctgtgtttatggtcaagagcgactcagaactcttgtatgattaacttaatgaattaata

SEQ ID NO: 2452 - DNA, 940 bp, Zea Mays
atggaggcagcggcggcgctgccgccggagagggatacgtcagcggactggggagatggcgtggtaccgctaggtttccgggtgaaggcatcctctcgcgagtcgccgtcacagaaggcggggaacgtgctggaggccgacctgcgctcccactgggccaccgccaccaacaccaaggaatggatcctccttgagctccaggcacaaccaaggagatcacggagtccatctgttcagcctgcttcatatttgctggcatttcgatctgaaacaactatgctcctcttaaggaaagcacataaagacaaaacccttggagttgtttgtgttcgagcatcgaaggtattgcaaaaactgttggagcctgagccatttttagacaaatcgatgtatactgatgtcatgctaccaaaccaagtctctgatgaaattcctaaaagcgatgctctcagcctagtacattctacagactactccagtatgtttggagaggaatttagcctgtcagagaatcagtttgatggttcattactgaatattttggatattgctgctgtggaagaaggcattcttcatgtactatatgcggctgcatcacagcctatgctatgtcgcaagcttgctgaaactacttcagacatttggtctgtcttaccacttgtccaagctctacttccagcacttcgtcctccaatcagttctggtcctattgaacatattgatgattcttttagccaatggaaccatccaaacattcagaatgctctctcccagattgttacaatgtcagtatcgtcatcagtttttcatcctcttctcagagcttgtgctggttatctttcatcctaccttccatcacatgtaaaaacggcttgtgttttgcttgacttgtgtcggggggcattgttatcatggataccaatgataacagcaaaggtct

SEQ ID NO: 2453 - DNA, 3035 bp, Zea Mays
atgctgtatttgtatcctaccatacttctataggtcttgaacttttgctactatgccaaatgaagttatgctctaatttatttaccatttttgtgttaattctgttgaagggattaacctgtatttgggatgaaatgataagttattcacaactttgcaaaatatatcttattgcaatagtaccacctgacgaaaactgcaatttcttcctttgtgatatcctaaatcaacatcgacgatgtgtttactttttaagtaacttttaagattatttccactccatatttatattgcgaaccaattaaccaattaactttgttgtttatcgtgttggttaggaagctggccaatctcttgctcgttcacgtgcagcactgaagtatgttgtattggcaatttctgggcatatggatgatgtgctcacagaatataaagaagccatgcataagttacttttcgttctggagatgctagatccttttattgatccatctacaagtgccatggaagacacagtaatatttgatggtatctctgctatatatttggaaaagcaatcaagtgtatatgatattgccttaaatattatccatacagcagtaaagagagctgctgttctcccttctttagaacttgaatggcgacgaggagccattgccccaaggaagcacctgcagtccttcctttcatccagtaacggtatcctgactggtttgggacaactttctggtgtaattgaagagggctattttacacgaatgtctttgctgttgttttctaaggcatgtctttattctaatcctgaagatatcgctttgatacctgaatgtgtttggcagaagttggaaaacatgcaaacatcaactggaggttttggatatatggagaaagatctctgcctagctctgtgccaactaaaaagtgaatcagatgctacaactgttgcaaaagttctttctggatgtaatagtcaaccagtcagccctgatttcaagagcatccgtgaatcaatccttcaggtgatgtcctctttgagttctattgaagcatactttgagttcttcgcagccagatctgcacaagaacatgaggaacttgaagaagctgagattgaattggagcttattgaaaaagagaagtcagttcctaactttgttgagcataccaatgatacgatggtgcttgccatgccatcatatgaccgtgatggtagtgaggttaataaacggctccagcaaatccgggaaaatattcggtccctggaaaggtctaggctgaaagaggaaattacagcgcgcagacaaaagaagctgcttctaagacatgcccgtgaaaagtacctagaagagacacgctccagggaaacggagcttatgcaagagctcgacagggaaagagctctcgagatggaacgtgaagtagaaaggcagcgtcaactggatattgagcgtgcaaagtctagggaactgcaattcaacattgatttggaaaaagagaaacaaactcagagagagcttcaacgcgaactggagcaagtcgagttggggcggtcatcaaggcgtgagttctctgccaatcccaacagccgctccagggagaggtaccgcgaaagggatggtggaggcagagcacagcaggaggcggggagcctgaggtcttcgagcagccgaggccaggaggggggctctgcccaggcgcccgcaccggccgggccgggccctaccgtcatgctcgccgggtcaaggacgttctcgggggccaaccttccaacgattctgcagcctcgcgagcgcgctgccgacgaggacagcgcttgggccgaggacgctagcagcaacggagatcctgaactggacggcgtgaggccgcatgggccgcgaggcagcaggtcatcctcctctaggcaggttgcggagaggagggagcgggatggcactgctgccggcacgggcaggagagaagggaaatgggagaggaagcagcacccgtgactattccctgcttgtgttgtgcctaagcctaacggaggcttcctcaatcgcgttgtaattgtactcgtatgggcattggatcaggtggctgcttagtcaacggtaccgtgcattgataaaaaggttggatcatcgtatgggaacactaccaatcagctgcctgctcagtcaacagcaccattaccatcacactccgacttttgtcagatcccctaagggtgtgttcggttacaccaatccagaggggaggatttaaatccccttctagtcattttgactaagaggagatttaaacccctccaatgatgactagaggggatttaaacccttccaatctctctctggattggcctaaccgaacaagcccaaaaggcgctccatggcccacgctctcccttggctctgtcgactgccctcgtcctaagcactagcagcctgcttaggctttgttgggtttgacgtggattgagatggattaaagagattaaatatttttttatttaaatttgaataagagaggatttaattccctttagggcggctttggatgctgcattccctcagcctcggtaggccctcaggcgaattgatcatgatgggtcctctagactataaaaattctatgatatacaatggcgtagattagcacttcgtagataaatgatgatgtgcattccacctttgtggtagcacttggctaagtaattagaaaaactagtgtgagttaatcgggacaagcaaggtggaggagtacaggtgtagggaggtcctcgggtcggattgtctttttagcttttcggacgagggattcctatatcgccagcgggttctcttctctagtggaactttggaaaggcctcgtagtgctactctgtctcgctttctcggtagaggtgtatgtgaatcatggccacgtggcagatgggtatcacagcttgtgggtaaagatgtgcaatctttgtagagtgtaaaactgatatattagctgtgtttatggtcaagagcgactcagaactcttgtatgattaacttaatgaattaata

SEQ ID NO: 2454 - DNA, 6216 bp, Zea Mays
atgctgtatttgtatcctaccatacttctataggtcttgaacttttgctactatgccaaatgaagttatgctctaatttatttaccatttttgtgttaattctgttgaagggattaacctgtatttgggatgaaatgataagttattcacaactttgcaaaatatatcttattgcaatagtaccacctgacgaaaactgcaatttcttcctttgtgatatcctaaatcaacatcgacgatgtgtttactttttaagtaacttttaagattatttccactccatatttatattgcgaaccaattaaccaattaactttgttgtttatcgtgttggttaggaagctggccaatctcttgctcgttcacgtgcagcactgaagaagccatgcataagttacttttcgttctggagatgctagatccttttattgatccatctacaagtgccatggaagacacagtaatatttgatggtatctctgctatatatttggaaaagcaatcaagtgtatatgatattgccttaaatattatccatacagcagtaaagagagctgctgttctcccttctttagaacttgaatggcgacgaggagccattgccccaagtgtaattctctctatcttggatccgcacatgcctcttcctcctgacatagacctctgcaaaagttcagtgcatgagattgataaagtgcctttggctgttttggataatcatgcaccacagccatgcaacccagaaaatattgctgggcgagatgcatctgaaacaactattcgtcctgaaaattttgaacagtgcagctttctgtttgctcctgaagaattaaaccaatctgagttgactagtctttataccttgaaaggaaaaggccatgatgtaataactcaaacaagtctgaaccatgacattcctgaaggcagaagtaaagagaaactatcatctgaccctttcctgctagataatgttgttgcagctgattattttgattcacaggctgattatcaacagctggaaaactaccaggactgtgagttaagagctcaagaatttcatcgcatagcactcaacctatgcatgcaacaagaaccaacattagaagggcataatgctggaattgatgctttgctattagccgcagaatgttatgttaatccattttttctattgggattccagtctaatttagagcctctggacaagattgaacgtattcattcagagttgatgcaagggaatgcttcctctgtatcaaaaaatttgcacttgaaagatttcaacaaaaaaacaatctacaatttggagaacaagcgtgatagatctgttatagatttactcctacaagccgccagatttgactttgaatatcatggaaagatacctgaaggggaactatatccaaatattgctgaagatggcaagcgatctgtagaaatctcacctgaagctcttcagtttgctgatgctgtaactttggtccgaaagaaccaggctatgctgtgccactttattatgaagcaattccaaaggaaaggacacttgggtagtgaaattcttctccagagcttgttgttcctgttgcactcagcaactgatctattttgtccaccagagaatgtagttgatataattttgaagtctgctgaaagcctcaatgatcagcttacatgtctttacagtttttttagtgcagggaataagaaattggataggataaaaatacatggtctaagaagacgttggatgcttctccagaaactggttctggcttcatcaggcagtgatagtactagagaacttgccagaaataaaagagatggtttccattttagaagtttagtccctccatcaacatggatacaaaagatatctgatttctccatgttttctagcccactccctcgatttttcggatggatggcagtgtcttgctatgccaaggaatatttaaatgagaagctgtttcttgcttctgatttctcacagcttacatctttgctatcaatttacatggatgaactttgtttgatggatggagttgcaatcccgaaagtcaggtctgcaaaaggtgaacaatttagttgtacggacttgtttcttaaaaaggaaactactctgtcagaccaaccaagcatgaccgaacagtttaaaatcttacttccggagctacatttcttctttccaagcatgggtaaattgtttaatgcatttggggagagcatcttggaggctgttgggctacagttaaaatgtctgcccaatagtgcaataccagacgtcctttgttggttttctgagttgtgcttatggccttatctcgaacacattaaggagcatcttgtagttgcaaacggagttagttatataagaggaagtattgctgctaatgcaaaatcagttgtcttctacctacttgagtctattgttactgagcacttggaggctgttattcctgaaatgcccaggatagtgcacattcttgtgtctctctgtagagcttcttatactgatgtggccttcctaaaatctgtgctatgtctaatcaagccactcatctcctacttcttaaggaagggaactaatgaaacaaaagtactgggccatataaaggagggcagcaattttgagttgctttgttttgaagaattgtttgaaattgttcgctgtggtaaagattcggtggatacaactgaagataatattcaggcaccgttggtcatcttcattctgggatctatgtttcttgatttctcatttgagagaaggattgaaatgttaggctccttgttagtatggattgattgcatcagttccgatccaccatcgttattatgcaactatcttcaaggtttccagacacttctagatggttttgaagctgtgctaattcaaaatattgaactacttggtgtcggcatcctttctgcgacaaactcgtctatagaatcttctgattccttgggcattgatggcactatgctactagagaagaaggcacaagataatgaagaacaaacactaatgaaatccgtaacatactgtgagaacgatggaaatcataagggtcttcgtaatctgcatcctaatagtatcatagagttttgtggcaccctggagaagtttattttgcaccttacttcatatattgaggatagttggaaatggcaccatcagttggcctctaggatctctttgtctatggcaaagtgtttgttgtttgcaaaatttttgaagtccatagcgcaagaagacacaatatctagtagcagtgagcaagatgtcgctgtgaaaatttcctgtgagcttgcacaaaagcattggcaaagtgctcttgaaggtctaggagataccattttgataaatcaggaaacacagttctggcaggtggcatcagctatgcttgattatataatggggataccaaacgtccttgcttggggtaatgttcttaatactacatgctctgcggtcaagcacttctgctcccatgcacctaggctatcttggaggctgcagacagataagtggttgtcattattagtttcaggtggaattgagggcttcaaaaacagtgagatctgtttgattgatcttttctgtacaatgttgaatcattctgaaccagagcagcgttttgttgctgtacaacagcttgggaggattattaactcaacaagttctactgaagctgatttgaaatatccaaactatgaccaaaatttcctcatatctgtttcgacagtaacatcccttttggtaactcatacatgggacagagtagcagcattggctctccatgactcttctatgctattaaggaatcatgcaatggcattgcttactgaatatgtgccttttgttgataggaagcacctgcagtccttcctttcatccagtaacggtatcctgactggtttgggacaactttctggtgtaattgaagagggctattttacacgaatgtctttgctgttgttttctaaggcatgtctttattctaatcctgaagatatcgctttgatacctgaatgtgtttggcagaagttggaaaacatgcaaacatcaactggaggttttggatatatggagaaagatctctgcctagctctgtgccaactaaaaagtgaatcagatgctacaactgttgcaaaagttctttctggatgtaatagtcaaccagtcagccctgatttcaagagcatccgtgaatcaatccttcaggtgatgtcctctttgagttctattgaagcatactttgagttcttcgcagccagatctgcacaagaacatgaggaacttgaagaagctgagattgaattggagcttattgaaaaagagaagtcagttcctaactttgttgagcataccaatgatacgatggtgcttgccatgccatcatatgaccgtgatggtagtgaggttaataaacggctccagcaaatccgggaaaatattcggtccctggaaaggtctaggctgaaagaggaaattacagcgcgcagacaaaagaagctgcttctaagacatgcccgtgaaaagtacctagaagagacacgctccagggaaacggagcttatgcaagagctcgacagggaaagagctctcgagatggaacgtgaagtagaaaggcagcgtcaactggatattgagcgtgcaaagtctagggaactgcaattcaacattgatttggaaaaagagaaacaaactcagagagagcttcaacgcgaactggagcaagtcgagttggggcggtcatcaaggcccgctccagggagaggtaccgcgaaagggatggtggaggcagagcacagcaggaggcggggagcctgaggtcttcgagcagccgaggccaggaggggggctctgcccaggcgcccgcaccggccgggccgggccctaccgtcatgctcgccgggtcaaggacgttctcgggggccaaccttccaacgattctgcagcctcgcgagcgcgctgccgacgaggacagcgcttgggccgaggacgctagcagcaacggagatcctgaactggacggcgtgaggccgcatgggccgcgaggcagcaggtcatcctcctctaggcaggttgcggagaggagggagcgggatggcactgctgccggcacgggcaggagagaagggaaatgggagaggaagcagcacccgtgactattccctgcttgtgttgtgcctaagcctaacggaggcttcctcaatcgcgttgtaattgtactcgtatgggcattggatcaggtggctgcttagtcaacggtaccgtgcattgataaaaaggttggatcatcgtatgggaacactaccaatcagctgcctgctcagtcaacagcaccattaccatcacactccgacttttgtcagatcccctaagggtgtgttcggttacaccaatccagaggggaggatttaaatccccttctagtcattttgactaagaggagatttaaacccctccaatgatgactagaggggatttaaacccttccaatctctctctggattggcctaaccgaacaagcccaaaaggcgctccatggcccacgctctcccttggctctgtcgactgccctcgtcctaagcactagcagcctgcttaggctttgttgggtttgacgtggattgagatggattaaagagattaaatatttttttatttaaatttgaataagagaggatttaattccctttagggcggctttggatgctgcattccctcagcctcggtaggccctcaggcgaattgatcatgatgggtcctctagactataaaaattctatgatatacaatggcgtagattagcacttcgtagataaatgatgatgtgcattccacctttgtggtagcacttggctaagtaattagaaaaactagtgtgagttaatcgggacaagcaaggtggaggagtacaggtgtagggaggtcctcgggtcggattgtctttttagcttttcggacgagggattcctatatcgccagcgggttctcttctctagtggaactttggaaaggcctcgtagtgctactctgtctcgctttctcggtagaggtgtatgtgaatcatggccacgtggcagatgggtatcacagcttgtgggtaaagatgtgcaatctttgtagagtgtaaaactgatatattagctgtgtttatggtcaagagcgactcagaactcttgtatgattaacttaatgaattaata

SEQ ID NO: 2455 - DNA, 6271 bp, Zea Mays
atgctgtatttgtatcctaccatacttctataggtcttgaacttttgctactatgccaaatgaagttatgctctaatttatttaccatttttgtgttaattctgttgaagggattaacctgtatttgggatgaaatgataagttattcacaactttgcaaaatatatcttattgcaatagtaccacctgacgaaaactgcaatttcttcctttgtgatatcctaaatcaacatcgacgatgtgtttactttttaagtaacttttaagattatttccactccatatttatattgcgaaccaattaaccaattaactttgttgtttatcgtgttggttaggaagctggccaatctcttgctcgttcacgtgcagcactgaagtatgttgtattggcaatttctgggcatatggatgatgtgctcacagaatataaagaagccatgcataagttacttttcgttctggagatgctagatccttttattgatccatctacaagtgccatggaagacacagtaatatttgatggtatctctgctatatatttggaaaagcaatcaagtgtatatgatattgccttaaatattatccatacagcagtaaagagagctgctgttctcccttctttagaacttgaatggcgacgaggagccattgccccaagtgtaattctctctatcttggatccgcacatgcctcttcctcctgacatagacctctgcaaaagttcagtgcatgagattgataaagtgcctttggctgttttggataatcatgcaccacagccatgcaacccagaaaatattgctgggcgagatgcatctgaaacaactattcgtcctgaaaattttgaacagtgcagctttctgtttgctcctgaagaattaaaccaatctgagttgactagtctttataccttgaaaggaaaaggccatgatgtaataactcaaacaagtctgaaccatgacattcctgaaggcagaagtaaagagaaactatcatctgaccctttcctgctagataatgttgttgcagctgattattttgattcacaggctgattatcaacagctggaaaactaccaggactgtgagttaagagctcaagaatttcatcgcatagcactcaacctatgcatgcaacaagaaccaacattagaagggcataatgctggaattgatgctttgctattagccgcagaatgttatgttaatccattttttctattgggattccagtctaatttagagcctctggacaagattgaacgtattcattcagagttgatgcaagggaatgcttcctctgtatcaaaaaatttgcacttgaaagatttcaacaaaaaaacaatctacaatttggagaacaagcgtgatagatctgttatagatttactcctacaagccgccagatttgactttgaatatcatggaaagatacctgaaggggaactatatccaaatattgctgaagatggcaagcgatctgtagaaatctcacctgaagctcttcagtttgctgatgctgtaactttggtccgaaagaaccaggctatgctgtgccactttattatgaagcaattccaaaggaaaggacacttgggtagtgaaattcttctccagagcttgttgttcctgttgcactcagcaactgatctattttgtccaccagagaatgtagttgatataattttgaagtctgctgaaagcctcaatgatcagcttacatgtctttacagtttttttagtgcagggaataagaaattggataggataaaaatacatggtctaagaagacgttggatgcttctccagaaactggttctggcttcatcaggcagtgatagtactagagaacttgccagaaataaaagagatggtttccattttagaagtttagtccctccatcaacatggatacaaaagatatctgatttctccatgttttctagcccactccctcgatttttcggatggatggcagtgtcttgctatgccaaggaatatttaaatgagaagctgtttcttgcttctgatttctcacagcttacatctttgctatcaatttacatggatgaactttgtttgatggatggagttgcaatcccgaaagtcaggtctgcaaaaggtgaacaatttagttgtacggacttgtttcttaaaaaggaaactactctgtcagaccaaccaagcatgaccgaacagtttaaaatcttacttccggagctacatttcttctttccaagcatgggtaaattgtttaatgcatttggggagagcatcttggaggctgttgggctacagttaaaatgtctgcccaatagtgcaataccagacgtcctttgttggttttctgagttgtgcttatggccttatctcgaacacattaaggagcatcttgtagttgcaaacggagttagttatataagaggaagtattgctgctaatgcaaaatcagttgtcttctacctacttgagtctattgttactgagcacttggaggctgttattcctgaaatgcccaggatagtgcacattcttgtgtctctctgtagagcttcttatactgatgtggccttcctaaaatctgtgctatgtctaatcaagccactcatctcctacttcttaaggaagggaactaatgaaacaaaagtactgggccatataaaggagggcagcaattttgagttgctttgttttgaagaattgtttgaaattgttcgctgtggtaaagattcggtggatacaactgaagataatattcaggcaccgttggtcatcttcattctgggatctatgtttcttgatttctcatttgagagaaggattgaaatgttaggctccttgttagtatggattgattgcatcagttccgatccaccatcgttattatgcaactatcttcaaggtttccagacacttctagatggttttgaagctgtgctaattcaaaatattgaactacttggtgtcggcatcctttctgcgacaaactcgtctatagaatcttctgattccttgggcattgatggcactatgctactagagaagaaggcacaagataatgaagaacaaacactaatgaaatccgtaacatactgtgagaacgatggaaatcataagggtcttcgtaatctgcatcctaatagtatcatagagttttgtggcaccctggagaagtttattttgcaccttacttcatatattgaggatagttggaaatggcaccatcagttggcctctaggatctctttgtctatggcaaagtgtttgttgtttgcaaaatttttgaagtccatagcgcaagaagacacaatatctagtagcagtgagcaagatgtcgctgtgaaaatttcctgtgagcttgcacaaaagcattggcaaagtgctcttgaaggtctaggagataccattttgataaatcaggaaacacagttctggcaggtggcatcagctatgcttgattatataatggggataccaaacgtccttgcttggggtaatgttcttaatactacatgctctgcggtcaagcacttctgctcccatgcacctaggctatcttggaggctgcagacagataagtggttgtcattattagtttcaggtggaattgagggcttcaaaaacagtgagatctgtttgattgatcttttctgtacaatgttgaatcattctgaaccagagcagcgttttgttgctgtacaacagcttgggaggattattaactcaacaagttctactgaagctgatttgaaatatccaaactatgaccaaaatttcctcatatctgtttcgacagtaacatcccttttggtaactcatacatgggacagagtagcagcattggctctccatgactcttctatgctattaaggaatcatgcaatggcattgcttactgaatatgtgccttttgttgataggaagcacctgcagtccttcctttcatccagtaacggtatcctgactggtttgggacaactttctggtgtaattgaagagggctattttacacgaatgtctttgctgttgttttctaaggcatgtctttattctaatcctgaagatatcgctttgatacctgaatgtgtttggcagaagttggaaaacatgcaaacatcaactggaggttttggatatatggagaaagatctctgcctagctctgtgccaactaaaaagtgaatcagatgctacaactgttgcaaaagttctttctggatgtaatagtcaaccagtcagccctgatttcaagagcatccgtgaatcaatccttcaggtgatgtcctctttgagttctattgaagcatactttgagttcttcgcagccagatctgcacaagaacatgaggaacttgaagaagctgagattgaattggagcttattgaaaaagagaagtcagttcctaactttgttgagcataccaatgatacgatggtgcttgccatgccatcatatgaccgtgatggtagtgaggttaataaacggctccagcaaatccgggaaaatattcggtccctggaaaggtctaggctgaaagaggaaattacagcgcgcagacaaaagaagctgcttctaagacatgcccgtgaaaagtacctagaagagacacgctccagggaaacggagcttatgcaagagctcgacagggaaagagctctcgagatggaacgtgaagtagaaaggcagcgtcaactggatattgagcgtgcaaagtctagggaactgcaattcaacattgatttggaaaaagagaaacaaactcagagagagcttcaacgcgaactggagcaagtcgagttggggcggtcatcaaggcccgctccagggagaggtaccgcgaaagggatggtggaggcagagcacagcaggaggcggggagcctgaggtcttcgagcagccgaggccaggaggggggctctgcccaggcgcccgcaccggccgggccgggccctaccgtcatgctcgccgggtcaaggacgttctcgggggccaaccttccaacgattctgcagcctcgcgagcgcgctgccgacgaggacagcgcttgggccgaggacgctagcagcaacggagatcctgaactggacggcgtgaggccgcatgggccgcgaggcagcaggtcatcctcctctaggcaggttgcggagaggagggagcgggatggcactgctgccggcacgggcaggagagaagggaaatgggagaggaagcagcacccgtgactattccctgcttgtgttgtgcctaagcctaacggaggcttcctcaatcgcgttgtaattgtactcgtatgggcattggatcaggtggctgcttagtcaacggtaccgtgcattgataaaaaggttggatcatcgtatgggaacactaccaatcagctgcctgctcagtcaacagcaccattaccatcacactccgacttttgtcagatcccctaagggtgtgttcggttacaccaatccagaggggaggatttaaatccccttctagtcattttgactaagaggagatttaaacccctccaatgatgactagaggggatttaaacccttccaatctctctctggattggcctaaccgaacaagcccaaaaggcgctccatggcccacgctctcccttggctctgtcgactgccctcgtcctaagcactagcagcctgcttaggctttgttgggtttgacgtggattgagatggattaaagagattaaatatttttttatttaaatttgaataagagaggatttaattccctttagggcggctttggatgctgcattccctcagcctcggtaggccctcaggcgaattgatcatgatgggtcctctagactataaaaattctatgatatacaatggcgtagattagcacttcgtagataaatgatgatgtgcattccacctttgtggtagcacttggctaagtaattagaaaaactagtgtgagttaatcgggacaagcaaggtggaggagtacaggtgtagggaggtcctcgggtcggattgtctttttagcttttcggacgagggattcctatatcgccagcgggttctcttctctagtggaactttggaaaggcctcgtagtgctactctgtctcgctttctcggtagaggtgtatgtgaatcatggccacgtggcagatgggtatcacagcttgtgggtaaagatgtgcaatctttgtagagtgtaaaactgatatattagctgtgtttatggtcaagagcgactcagaactcttgtatgattaacttaatgaattaata

SEQ ID NO: 2456 - DNA, 6211 bp, Zea Mays
atgctgtatttgtatcctaccatacttctataggtcttgaacttttgctactatgccaaatgaagttatgctctaatttatttaccatttttgtgttaattctgttgaagggattaacctgtatttgggatgaaatgataagttattcacaactttgcaaaatatatcttattgcaatagtaccacctgacgaaaactgcaatttcttcctttgtgatatcctaaatcaacatcgacgatgtgtttactttttaagtaacttttaagattatttccactccatatttatattgcgaaccaattaaccaattaactttgttgtttatcgtgttggttaggaagctggccaatctcttgctcgttcacgtgcagcactgaagtatgttgtattggcaatttctgggcatatggatgatgtgctcacagaatataaagaagccatgcataagttacttttcgttctggagatgctagatccttttattgatccatctacaagtgccatggaagacacagtaatatttgatggtatctctgctatatatttggaaaagcaatcaagtgtatatgatattgccttaaatattatccatacagcagtaaagagagctgctgttctcccttctttagaacttgaatggcgacgaggagccattgccccaagtgtaattctctctatcttggatccgcacatgcctcttcctcctgacatagacctctgcaaaagttcagtgcatgagattgataaagtgcctttggctgttttggataatcatgcaccacagccatgcaacccagaaaatattgctgggcgagatgcatctgaaacaactattcgtcctgaaaattttgaacagtgcagctttctgtttgctcctgaagaattaaaccaatctgagttgactagtctttataccttgaaaggaaaaggccatgatgtaataactcaaacaagtctgaaccatgacattcctgaaggcagaagtaaagagaaactatcatctgaccctttcctgctagataatgttgttgcagctgattattttgattcacaggctgattatcaacagctggaaaactaccaggactgtgagttaagagctcaagaatttcatcgcatagcactcaacctatgcatgcaacaagaaccaacattagaagggcataatgctggaattgatgctttgctattagccgcagaatgttatgttaatccattttttctattgggattccagtctaatttagagcctctggacaagattgaacgtattcattcagagttgatgcaagggaatgcttcctctgtatcaaaaaatttgcacttgaaagatttcaacaaaaaaacaatctacaatttggagaacaagcgtgatagatctgttatagatttactcctacaagccgccagatttgactttgaatatcatggaaagatacctgaaggggaactatatccaaatattgctgaagatggcaagcgatctgtagaaatctcacctgaagctcttcagtttgctgatgctgtaactttggtccgaaagaaccaggctatgctgtgccactttattatgaagcaattccaaaggaaaggacacttgggtagtgaaattcttctccagagcttgttgttcctgttgcactcagcaactgatctattttgtccaccagagaatgtagttgatataattttgaagtctgctgaaagcctcaatgatcagcttacatgtctttacagtttttttagtgcagggaataagaaattggataggataaaaatacatggtctaagaagacgttggatgcttctccagaaactggttctggcttcatcaggcagtgatagtactagagaacttgccagaaataaaagagatggtttccattttagaagtttagtccctccatcaacatggatacaaaagatatctgatttctccatgttttctagcccactccctcgatttttcggatggatggcagtgtcttgctatgccaaggaatatttaaatgagaagctgtttcttgcttctgatttctcacagcttacatctttgctatcaatttacatggatgaactttgtttgatggatggagttgcaatcccgaaagtcaggtctgcaaaaggtgaacaatttagttgtacggacttgtttcttaaaaaggaaactactctgtcagaccaaccaagcatgaccgaacagtttaaaatcttacttccggagctacatttcttctttccaagcatgggtaaattgtttaatgcatttggggagagcatcttggaggctgttgggctacagttaaaatgtctgcccaatagtgcaataccagacgtcctttgttggttttctgagttgtgcttatggccttatctcgaacacattaaggagcatcttgtagttgcaaacggagttagttatataagaggaagtattgctgctaatgcaaaatcagttgtcttctacctacttgagtctattgttactgagcacttggaggctgttattcctgaaatgcccaggatagtgcacattcttgtgtctctctgtagagcttcttatactgatgtggccttcctaaaatctgtgctatgtctaatcaagccactcatctcctacttcttaaggaagggaactaatgaaacaaaagtactgggccatataaaggagggcagcaattttgagttgctttgttttgaagaattgtttgaaattgttcgctgtggtaaagattcggtggatacaactgaagataatattcaggcaccgttggtcatcttcattctgggatctatgtttcttgatttctcatttgagagaaggattgaaatgttaggctccttgttagtatggattgattgcatcagttccgatccaccatcgttattatgcaactatcttcaaggtttccagacacttctagatggttttgaagctgtgctaattcaaaatattgaactacttggtgtcggcatcctttctgcgacaaactcgtctatagaatcttctgattccttgggcattgatggcactatgctactagagaagaaggcacaagataatgaagaacaaacactaatgaaatccgtaacatactgtgagaacgatggaaatcataagggtcttcgtaatctgcatcctaatagtatcatagagttttgtggcaccctggagaagtttattttgcaccttacttcatatattgaggatagttggaaatggcaccatcagttggcctctaggatctctttgtctatggcaaagtgtttgttgtttgcaaaatttttgaagtccatagcgcaagaagacacaatatctagtagcagtgagcaagatgtcgctgtgaaaatttcctgtgagcttgcacaaaagcattggcaaagtgctcttgaaggtctaggagataccattttgataaatcaggaaacacagttctggcaggtggcatcagctatgcttgattatataatggggataccaaacgtccttgcttggggtaatgttcttaatactacatgctctgcggtcaagcacttctgctcccatgcacctaggctatcttggaggctgcagacagataagtggttgtcattattagtttcaggtggaattgagggcttcaaaaacagtgagatctgtttgattgatcttttctgtacaatgttgaatcattctgaaccagagcagcgttttgttgctgtacaacagcttgggaggattattaactcaacaagttctactgaagctgatttgaaatatccaaactatgaccaaaatttcctcatatctgtttcgacagtaacatcccttttggtaactcatacatgggacagagtagcagcattggctctccatgactcttctatgctattaaggaatcatgcaatggcattgcttactgaatatgtgccttttgttgataggaagcacctgcagtccttcctttcatccagtaacggtatcctgactggtttgggacaactttctggtgtaattgaagagggctattttacacgaatgtctttgctgttgttttctaaggaggttttggatatatggagaaagatctctgcctagctctgtgccaactaaaaagtgaatcagatgctacaactgttgcaaaagttctttctggatgtaatagtcaaccagtcagccctgatttcaagagcatccgtgaatcaatccttcaggtgatgtcctctttgagttctattgaagcatactttgagttcttcgcagccagatctgcacaagaacatgaggaacttgaagaagctgagattgaattggagcttattgaaaaagagaagtcagttcctaactttgttgagcataccaatgatacgatggtgcttgccatgccatcatatgaccgtgatggtagtgaggttaataaacggctccagcaaatccgggaaaatattcggtccctggaaaggtctaggctgaaagaggaaattacagcgcgcagacaaaagaagctgcttctaagacatgcccgtgaaaagtacctagaagagacacgctccagggaaacggagcttatgcaagagctcgacagggaaagagctctcgagatggaacgtgaagtagaaaggcagcgtcaactggatattgagcgtgcaaagtctagggaactgcaattcaacattgatttggaaaaagagaaacaaactcagagagagcttcaacgcgaactggagcaagtcgagttggggcggtcatcaaggcgtgagttctctgccaatcccaacagccgctccagggagaggtaccgcgaaagggatggtggaggcagagcacagcaggaggcggggagcctgaggtcttcgagcagccgaggccaggaggggggctctgcccaggcgcccgcaccggccgggccgggccctaccgtcatgctcgccgggtcaaggacgttctcgggggccaaccttccaacgattctgcagcctcgcgagcgcgctgccgacgaggacagcgcttgggccgaggacgctagcagcaacggagatcctgaactggacggcgtgaggccgcatgggccgcgaggcagcaggtcatcctcctctaggcaggttgcggagaggagggagcgggatggcactgctgccggcacgggcaggagagaagggaaatgggagaggaagcagcacccgtgactattccctgcttgtgttgtgcctaagcctaacggaggcttcctcaatcgcgttgtaattgtactcgtatgggcattggatcaggtggctgcttagtcaacggtaccgtgcattgataaaaaggttggatcatcgtatgggaacactaccaatcagctgcctgctcagtcaacagcaccattaccatcacactccgacttttgtcagatcccctaagggtgtgttcggttacaccaatccagaggggaggatttaaatccccttctagtcattttgactaagaggagatttaaacccctccaatgatgactagaggggatttaaacccttccaatctctctctggattggcctaaccgaacaagcccaaaaggcgctccatggcccacgctctcccttggctctgtcgactgccctcgtcctaagcactagcagcctgcttaggctttgttgggtttgacgtggattgagatggattaaagagattaaatatttttttatttaaatttgaataagagaggatttaattccctttagggcggctttggatgctgcattccctcagcctcggtaggccctcaggcgaattgatcatgatgggtcctctagactataaaaattctatgatatacaatggcgtagattagcacttcgtagataaatgatgatgtgcattccacctttgtggtagcacttggctaagtaattagaaaaactagtgtgagttaatcgggacaagcaaggtggaggagtacaggtgtagggaggtcctcgggtcggattgtctttttagcttttcggacgagggattcctatatcgccagcgggttctcttctctagtggaactttggaaaggcctcgtagtgctactctgtctcgctttctcggtagaggtgtatgtgaatcatggccacgtggcagatgggtatcacagcttgtgggtaaagatgtgcaatctttgtagagtgtaaaactgatatattagctgtgtttatggtcaagagcgactcagaactcttgtatgattaacttaatgaattaata

SEQ ID NO: 2457 - DNA, 1830 bp, Zea Mays
tacggacatatgcgttgtataaattggcacgtccacccccctcagatgttcccaagtcccggcccaacccatctgtagcactaggcaacagcgaagctgagctgagagctgtcactgcatctgcctcatctaccagatggtgatgatgtcgggacttgctgcctacggttcactaagtatgacaacgaccgggaacgcgccgttatcatggaatacacgggcaccgccggcgcgactcgctttccagaggcggcggcgcatgagtacgatcacggccacggtcacgtgcaggcgcgaggcggcgatgacggccccggagaaggcggacgtgctgcggtcgctagacgggtgggcggagtcgaacctgctgccgctgctgaagccggtggagcgggcatggcagccgcacgacctgctgccggactcggcgtcgccggggttccgcgaggcggtggacgagctgcgggcgcgggcgcgagagatccccgacgactactacgtgtgcctggtgggcaacatggtgacggaggaggccctccccacgtaccacgccgccctcaacagcttcgtgggctacgacagcccctccagcgccgacgcctgggcgcggtggtcccgcggctggaccgccgaggagaaccgccacggcgacctgctgaaccgctatctctacctgtgcggccgcgtcgacgtccggcgcgtggagcagaccatccaccacctcatcaacgccgggatgcgcctcgcctccgacaagtgcccctacaggggcttcatctacacggcgttccaggagcgcgccaccgccgtctcgcacggcaacacggcgcggcgcgccatggcgctgggcgacgccagcctggccaggatctgcggcgccatcgcgagcgacgagaagcggcacgaggcggcctacacccgggtggtggaccagctgttcgcgctcacgcccgacgccgccgtgcgcgcgctcgagtacatgatgagggagaggatcctcatgccggcctactacatgttcgacggccgggacccggacctgttccgccactacgccgccgtcgcgcagaggctcggcgtctacaccaccgccgactacgccgacctcgtccagttcttcgtcgacaggtggggcgtggcggacctaggccccggcctcaccggcgaggggaggcaggcgcaggactacgtctgccggttgcctgagagggtgcgcaggatggaccagctggacgcgcgacgaaggctgcagccccagactcgtcaggtccccttctcttggctgttcgacaggcacgtggagctgctgacctgacttgattggtcggcagtctgcagcccagctagcggtccttttgccccctttggcagagcccagagctatcaattctgttactgcgtctcctcctctacttctacttcctcctcgttggccactccgtagttccgtatgtgtctaccgtcaagtgactgactggaaccatgtactgtgtgtcagtcatcattcaatccatttggtgccgcagcgtgtcagaaaaattaaaagcaagcagcccaatgtcagcgagtactgtggctccaacgatatcccaaacttttacctcaattccttgtgtaccttcgcagatcaacctgtgtctggtggtacaaactgaaaaatgtagctttacttttcacttctatagtagaaagaagctatgtgttgatccagtttcgataaaactaaaaacgtttggtaaaacagagaagattcagtttcttttgtcaaaaatgtttggtacaacgattcatctcgatggtcaaaaaaagtaaaatatctaaaaatgtttg

SEQ ID NO: 2458 - DNA, 1802 bp, Zea Mays
gattctcgtcagatcggacttggttcctacaactttttcggcctggccaaccgtgctgtgcaggagagcagtgcagaggagagcgaggaggcgtgcgattgcttgctttgcttccgagtttcgacacgcgtgcccaggaatcggtcggattccccaatcccgtcaccatggccgcgccgccttctccttcgtcccgctccccgtcgagcgaggttgccgtccacagattcagcggcaccttggatgtatcatcatcgccctcaaggaccgagttgttgagcatggtgaagaagcactcacatttgattgggtggacgattattggtgccgaggatgatgcatcagatgtgggaatggatgataaattctggcatgaaatgcttgacctattctttgtgcgtggcaggcaatcaaaaagaagtgaagaggatgaccttgtcttctttgttaataacatgaaattgcatggttatggtttcaatgataacatggaagatccacctcccttttttgtacggagatgggctcccacgcttgaaaagatcagtattaatacagtggaggttgattgggagcgttcattctatttgaatttaatcgctcacacgtcgtacactgtcactgttgcaatatttggaattgaagatcttcgcaaccgtgcagtgaaaaacaaacagttgcctccagtttataaggttacaaaaaatgtatacgcgtctcctagccgtgtaaattttcatcttgacagaagaaaggctgtagaaacactaccggcatatcccaacatctttttctctgtagacgacttcgatgatacttttgatgctgtggtaaggttctgtgcaattatatcaaagttgtagttgtacaacattctgtccaggttttgtcagatcctgaacactgctattgtgtgattcttaacgcacatgatggggcagcatttcccgaagaaagtgagtgcaagaatcctgtttcaaatacacagcctggaatgagctgtggtagtgcccaagaaaaaccaccaaagagaactctcttctcagcttatgtgggctaccaaaatgttcgtggggcttatgatgcttgcagatcaaaatttgggagtttcctctcacttgggcatgaccacaataagctcgacagactttttatgaagggcccagaaggacgtggagaggtggaagtagctgtctctggcattgcagatcagagcagtgggaagtcgaagaaagatccaggagatagctttcgagtccttgttcacagagcagcttctgctgcatcaaagctagtgaagcatgcttatgagtcttcatctgctaacagacaaatggatgatgagcttgtccctctgaagtgttgcttgatgtctgtgtctcttccttgggactacattgcccacgatcttttgcacaaggacacacctccgatggatctgtgatagcaattccagatcttcactgccagtcatgggaggaatccaggcgtgatgagatgcaaggtaaagaatcgaagtggaattaggatgtagatgcttttagaccaaatatgtgaagtgtagggtttgtaatgtgcttgtgcacaggttaccatacaatgtaaatacaatgtacatatcatgcatgccttacagaacttgattgtatttcttgaacttgctgttttttccttagcaaataattcttcaatttgcattgatccatagtaggtgctatattcttatctgggatgtagtttgctctgcataggtataactgatacgtaactatgactatttaactagagtggttttgagtgac

SEQ ID NO: 2459 - DNA, 1734 bp, Zea Mays
agatcggacttggttcctacaactttttcggcctggccaaccgtgctgtgcaggagagcagtgcagaggagagcgaggaggcgtgcgattgcttgctttgcttccgagtttcgacacgcgtgcccaggaatcggtcggattccccaatcccgtcaccatggccgcgccgccttctccttcgtcccgctccccgtcgagcgaggttgccgtccacagattcagcggcaccttggatgtatcatcatcgccctcaaggaccgagttgttgagcatggtgaagaagcactcacatttgattgggtggacgattattggtgccgaggatgatgcatcagatgtgggaatggatgataaattctggcatgaaatgcttgacctattctttgtgcgtggcaggcaatcaaaaagaagtgaagaggatgaccttgtcttctttgttaataacatgaaattgcatggttatggtttcaatgataacatggaagatccacctcccttttttgtacggagatgggctcccacgcttgaaaagatcagtattaatacagtggaggttgattgggagcgttcattctatttgaatttaatcgctcacacgtcgtacactgtcactgttgcaatatttggaattgaagatcttcgcaaccgtgcagtgaaaaacaaacagttgcctccagtttataaggttacaaaaaatgtatacgcgtctcctagccgtgtaaattttcatcttgacagaagaaaggctgtagaaacactaccggcatatcccaacatctttttctctgtagacgacttcgatgatacttttgatgctgtggttttgtcagatcctgaacactgctattgtgtgattcttaacgcacatgatggggcagcatttcccgaagaaagtgagtgcaagaatcctgtttcaaatacacagcctggaatgagctgtggtagtgcccaagaaaaaccaccaaagagaactctcttctcagcttatgtgggctaccaaaatgttcgtggggcttatgatgcttgcagatcaaaatttgggagtttcctctcacttgggcatgaccacaataagctcgacagactttttatgaagggcccagaaggacgtggagaggtggaagtagctgtctctggcattgcagagcagtgggaagtcgaagaaagatccaggagatagctttcgagtccttgttcacagagcagcttctgctgcatcaaagctagtgaagcatgcttatgagtcttcatctgctaacagacaaatggatgatgagcttgtccctctgaagtgttgcttgatgtctgtgtctcttccttgggactacattgcccacgatcttttgcacaaggacacacctccgatggatctgtgatagcaattccagatcttcactgccagtcatgggaggaatccaggcgtgatgagatgcaaggtaaagaatcgaagtggaattaggatgtagatgcttttagaccaaatatgtgaagtgtagggtttgtaatgtgcttgtgcacaggttaccatacaatgtaaatacaatgtacatatcatgcatgccttacagaacttgattgtatttcttgaacttgctgttttttccttagcaaataattcttcaatttgcattgatccatagtaggtgctatattcttatctgggatgtagtttgctctgcataggtataactgatacgtaactatgactatttaactagagtggttttgagtgac

SEQ ID NO: 2460 - DNA, 1244 bp, Zea Mays
ctggccgagtatttttactacgaaaaagcttgaaaagatcagtattaatacagtggaggttgattgggagcgttcattctatttgaatttaatcgctcacacgtcgtacactgtcactgttgcaatatttggaattgaagatcttcgcaaccgtgcagtgaaaaacaaacagttgcctccagtttataaggttacaaaaaatgtatacgcgtctcctagccgtgtaaattttcatcttgacagaagaaaggctgtagaaacactaccggcatatcccaacatctttttctctgtagacgacttcgatgatacttttgatgctgtggttttgtcagatcctgaacactgctattgtgtgattcttaacgcacatgatggggcagcatttcccgaagaaagtgagtgcaagaatcctgtttcaaatacacagcctggaatgagctgtggtagtgcccaagaaaaaccaccaaagagaactctcttctcagcttatgtgggctaccaaaatgttcgtggggcttatgatgcttgcagatcaaaatttgggagtttcctctcacttgggcatgaccacaataagctcgacagactttttatgaagggcccagaaggacgtggagaggtggaagtagctgtctctggcattgcagatcagagcagtgggaagtcgaagaaagatccaggagatagctttcgagtccttgttcacagagcagcttctgctgcatcaaagctagtgaagcatgcttatgagtcttcatctgctaacagacaaatggatgatgagcttgtccctctgaagtgttgcttgatgtctgtgtctcttccttgggactacattgcccacgatcttttgcacaaggacacacctccgatggatctgtgatagcaattccagatcttcactgccagtcatgggaggaatccaggcgtgatgagatgcaaggtaaagaatcgaagtggaattaggatgtagatgcttttagaccaaatatgtgaagtgtagggtttgtaatgtgcttgtgcacaggttaccatacaatgtaaatacaatgtacatatcatgcatgccttacagaacttgattgtatttcttgaacttgctgttttttccttagcaaataattcttcaatttgcattgatccatagtaggtgctatattcttatctgggatgtagtttgctctgcataggtataactgatacgtaactatgactatttaactagagtggttttgagtgac

SEQ ID NO: 2461 - DNA, 440 bp, Zea Mays
ctggcttccctgagggagccaggagttggaatcaatctctcttggccgcgcagcctaggacacacctccgatggatctgtgatagcaattccagatcttcactgccagtcatgggaggaatccaggcgtgatgagatgcaaggtaaagaatcgaagtggaattaggatgtagatgcttttagaccaaatatgtgaagtgtagggtttgtaatgtgcttgtgcacaggttaccatacaatgtaaatacaatgtacatatcatgcatgccttacagaacttgattgtatttcttgaacttgctgttttttccttagcaaataattcttcaatttgcattgatccatagtaggtgctatattcttatctgggatgtagtttgctctgcataggtataactgatacgtaactatgactatttaactagagtggttttgagtgac

SEQ ID NO: 2462 - DNA, 1380 bp, Zea Mays
gtgatttttaattcttagtcttgttgatttaactttattttgctctatatataactgagttaaatgcataaatggtctctgaacttgtgaatggatgttacttagatccaagaattttgaaaatgcattttttgtctttaaacttgttaagtgatgtaccacattcttaagagcatcttcaacaatgtttcattggtgcccaatattaaaatatagggcgtatgctagaaaaaactactatagcagtgctttattttataaaatttcatcaaaaaatagggtagagggcgaagtgccctagatatgttataccttctcggccagccctacccctttgtcgtgtctgtggaacattcacgatactcttcctggtgactcccgccgtcgaaatgagctacacgctgatctccttgcacgtcctcacgcccctatcctcctattacaccctccccgcacaacaccaccctcctattgtgctctcccagcacaatgccaccctcatcctcctgtcgcgtgctcccctcagtaccagtggcgtatccatcctactaaagtatatagttttttgaattatttatttcctttgattcttatatgttgtagaatttaaaatgtaaactcatctatttattttggttttcataaaattggaccaccctaactttaaatcctggattcgccactactcagtatcgaccccatcttccgtcgatcctttaaggcagcgatgtagctgtaagatgcatcgttgggccttctaggggtgtagtcggcatgttctaggaaaggagcgaaaccgtccaataattccaagaggcgtgactaatgaagcagggttgcgaccatgactgaagcgtggaatggaacatgcctatcatgtgcatgcagatcgagagcctctcctagccatccatcgtgcaacataggtagctcgctagctagggaggagggagactattagctgcaaagcaagcaaaatctacgtccaatcatgcacggaggcgagcccggatgtggtgcatggtgagcataattgagaggaaagaaaaaagctcagtctttgacgacgttcctctagctcttcgattctccggggataagagtttggcgggcacatagtcacacaactattgtgcgccaaaaacttatttttgtataatcaactgatcaagggctttactgttggagcaaaaaatattgtttagtcccaaattagtttagtttatgcctctttttattttatagagcattattttagggaatattgttggagatgctctaaacctgtaaaaatggtgcaccataggtctatttttgaaccatattgaccactgtgatgtgccatttaacaagttcaagaacctaaaaatgttttttttc

SEQ ID NO: 2463 - DNA, 401 bp, Zea Mays
gagtcgccttccttccgcgctcgtcctgatcggtaggaggttacaagttggtgcaagccgatagattcggggaagttagttgggattcagtctgatccgagcttcaccatggtataaaacggtggtcggggcccttgcctcattagcatagcctgctatagggagccagaagccaacaaaatatgaagccagagcgcgcgagagagaagcatcgagtaaaattgacggattttgtggggcgtgctcgaggtctatcttgggatgagggagtatcagaccacctgggtgttgctcgtcggctcctgtcatcgaagaccagcctcttcacggcatctttgccgcagtgaggtcacgagaatctgaagatcatcctggtacctagaatctcgagtcccaggcaa

SEQ ID NO: 2464 - DNA, 664 bp, Zea Mays
tgcaagccgatagattcggggaagttagttgggattcagtctgatccgagcttcaccatggtataaaacggtggtcggggcccttgcctcattagcatagcctgctatagggagccagaagccaacaaaatatgaagccagagcgcgcgagagagaagcatcgagtaaaattgacggattttgtggggcgtgctcgaggtctatcttgggatgagggagtatcagaccacctgggtgttgctcgtcggctcctgtcatcgaagaccagcctcttcacggcatctttgccggtaagacatatgcttagtaaatcgatgtatactcctcgttctgtactcgtattagttccaatatccgagctcggagtgctggattagccgttctccggcgaggaagccgacgtaggtagttcctgtgttcagatttgggtagccgaaagggtaggagaaggggcttgccgctggtaccgccgccgtcgctgtctggggggctcgacgtgtgcccctgctagcgtattgttctcggcccctgcacgtgtagtggccgaccgtcctttcctagatcaattaggctctctacgatgcctccctccccatggatgtttagtgcgtttgtggcttagtgcccagggtcgaagaaagagataaggcacatttgatccaag

SEQ ID NO: 2465 - DNA, 2111 bp, Zea Mays
acaagaataagcagtaacaacaataatctagcctgcctgtccttagcgtagtcatgccatggcgggcgatgcgctcatcgtcatcgtcactagcttcctcctcgcgctgccgtcagcgacggcaataggcaaggtctgcggcaacgccggcaactacacggccaacggcaggtaccggtccaacctcgactccctcgccgcggccctcccagccaacacgtcctcgtcccctcagctcttcgccaacgccaccgccggccaggcccccgacgccgtgtacgcgctcgcgctctgccgcggcgacctgaccggcaacctcaccgggtgcagcgcctgcgtgaacggctcgttgcagtacgcgcggagggcgtgcccctacgccaaggccgccagcgtctacgacgacaactgcctcatcggctactccagcgccaacatcctcgtcccggcctataacgccacccgggacacgagcacgctcttcgactactggaacagcatgaccatcgccggcaacggcacactggtggccgcccacgtcgacgacctgctgacgcagactgcccagcaggctgcctccagcccgaggaggttcgtcacggcctacatggacggctccagcaacgccgtcatcccgacgctctactccctggcgcagtgcacgcccgacctgtcagccggcgactgcctggcctgcctccagcggatcctcggcttgctcaacgccacgacgtcgatgacgcagatcaggccgtcgtccggcgctccggcgccaccaccaccgtctccgacgacaaataaaggatctggggtgaagccttgggtaattgcggtgtctgtagcacctcctgtggcggtagtagcattctgcttcatcctttacaaccgtaggcaaaggagaaggttcagaagaggtagatctaaactacgacaaaagcatcctcgcaacaacttgaaaggagacgaactagattgggaaatggaaacagagctctcagagttttctgtttttgacttccatcagatattggaggctacagataacttctctgaagaaaataaacttggggaaggtgggtttggccccgtttataagggtcagtttcctgatggaactgagatagctgttaagagacttgcttcacattcagggcaaggttttgtagagttcaagaatgaagtacaactcatagcgaaactccaacacacaaatttggttaggctcttgggatgttgctctcagggagaggagaaaattttggtctatgaatacttgccaaacaaaagcttggacttctttatctttgatgaaaacaggaaatcgttactggattggaaaaagcgtctagcgataattgaaggaatagcagaaggacttctctacctgcataagcactcccgtttgcgtgtcattcatcgagatcttaaaccaagtaacattctcctggacagcgaaatgaatcctaaaatttcagactttgggttagcaaaaatatttagctcaaataacatcgaaggaagcactacaaggagagtggttggtacatatggttatatggctcccgagtatgcctctgagggcatcttctctatcaaatctgacgtattcagctttggcgttctcattcttgagatccttagcggaaaaaggaattccggcaaccacgattatggagatttcatcaatattctcggatatgcatggcaattgtatgaagaggcaagatggatggatctcgttgatgcctcattggtaccaatggatcactcatctgaaatcatgaggtgcatgaacattgcattgctgtgtgtacaagagaatgccgctgatcgaccagccatgttggatgttgttgcgatgctaagcaacaaggctaagaccctggctcagccgaaccacccagcgtatttcaatgtacgggtaggaaacgaagaggagtccactgctgctacggcgtcaggcagtatcaatgagatgaccgtatctgtcacaactggtagataatttttgtttgtacaaagtggttactgttgagcttatatatataattatccttttgataatgtgcaatgcagacatatttcattatatggggtatatgtttatttaa

SEQ ID NO: 2466 - DNA, 4018 bp, Zea Mays
gttttttcatttttacccgggtcgctgcaggccacaccatacccttgcttgccgcctacctgagcctcacctcatctcatcatcgcctccacctcaccagagaaatcctcctcctccctagtccctagccaattcttttttgtatcaaaccctctttccccatctcagatccctctcccgtcccagctcgatcctgcctgatggccgccgtaccgtacgccgctgctgccggacgctgaacgaccaggacaaccacctccgacgtccccccgtgtatccacgagatggtcgcggaggcggcgccgtcctcctcggcggcgatctggtcgctccgccgcgacgagatcactttcgaccgcctccacaagttttggagtgccctgtcatctcgtgcacggttcgtgtgagccaaggattcaggaagttgaagcagaagttcaggacccttcagttcatccttggggaggcctttcgacaacaaaggatggcatcctaactcttcttgattgcttcataaatgcaaaatcacttcatgagatccagaatgtatttgacaatgcacgtgctagagaacgtgaacgtgaaatgctttaccctgatgcatgtggtggcggtggcagaggatggattagtccagtgatgcctaactatggcaggggccatggaacacgagatacttgtgctttgcatactgcacatctttcttgtgacactctagtggatttttggtcggcactgggtgatgaaactagatcatcacttttaaggatgaaggaagaggacttcattgaaagactcatgcacaggttcgacagcaaaagattctgcagagactgcagaaggaatgttattcgtgaattcaaggaactcaaggaactaaagcgcatgcgaagggaacctcgctgcactagttggttttgtgttgcagataccacatttaactgtgaggtgtttgaggatgctattcttgttgattggcatcaatccttattggagcaagatggaatttaccatcatttcgagtgggctattggaacggatgaaggaaaatctgatattctaaactttgaaaatgtgggcatgattgggcaagtccacaggaaaggccttgatcttgatcagtttgaagactattttgttacactgagagcatgtaggctggatggccgccgtacagaattctgtgtgaaggcccatgccttgaagggccaatcttgtgttcaccggaggctaatcgtgggggatggatttgtgacaattacaaaaggtgaaagtattagaagtttctttgagcatgctgaagaagctgaggaagaggatgaagatgatgtagtggacagagacagcaatgaccctgatggtgatatcgctcatccacaaaagcatgctaagagccctgaacttgcaagagaatttcttctggatgctgctgcagtgatcttcaaagaacaggtcgagaaggctttcagagaaggtacagcgcggcaaaatgcacatagtgtttttgtgtcccttgctctaaaactgttagaagaacgagttcatgttgcttgcaaggaaataattacattggaaaaacagaccaagctacttgaggaagaagagaaagaaaaacgtgaagaagaagagcgcagggataggaggagaacaaaagaaagagaaaagaagaatagaagaaaagagaggctgaaaggaaaagacaaagataaagaaaaaatattggttcggtcaaaaaaaccaggtctttcaacattttctccgagcagccaagcagcaccaagtagtaatgagtctcaggatgttctagacttgagatattcagatagcgaagaggaagacaatgttgtggtcagggaacactatcctgattcttcagctgatcaatcttcaagcaaggatactgatgaacgaagcaatgagcatgaatgcagtgcaacagcagaatttgttccctcagattgtgatggctcattcttatgtgatgagtctaattcatcaagaaacttgagatttagatgggacttcccagaaaaagatgtcagttattggtatgaagattgtcgtgttgattctggagatactcaattgcagtctagggagaggatcagaaataacactagaagttacaacactgtatttaatacaaataaccgaacaagagacaagtacaacccctgcagctgtggccatcaagaagacttcagatatttttccacagcaactagatcaagtagggagacaaagatttccaggaaaacagtggctgagaaacccaggttgcaataccgcaggtgctatcctccagaaagcttcgctgtgtcaaatggacgtgttggtggtacaccaaacaagaacacaggtccaaagcaagtatgggagccaatggatgcaagaaagaagatagggaatgggagaggatcagaaataacaccagaaactactggtgctgctgatggttcagatcaagtggaatgctcaaaggacattagtgaatgtgagaagcttgaggtagtgtgtgaaacacttgctgaaacttgttgtgagatatctgcagaagcctgtaagtcagatcaaccatgtagacaaggtgagaaaaatcagtctgcttgcagcgatggatctaaatgcgtagataagccaaattgctgcttgacaaaggacactgttaggacaacaaatttaaccagttcagacagcttttcgtgtctaagtgagggagatagagacagcagcatgagtagcatgacctcactgagtgctcagaatgtagaatcttcatctacatctgattcagatgagtattcagacaggaacgatagcagcccaggcgatccaccagtgaagaatgtttctcgttcattacttgagatgtgtgcaggaaatggtttcagggagtaccaaccgaaaggcttgaaccctcctaatggcaaccaatttggatttatggtggcacctttacaggaccagatgttgcaccaacagaagatccatgcaccgccgtactcgtcaccatttgtggggttccacaatcaccccttggcagttccaacaaatgggtacttgccatatcctcagccaggtcacttctaccctggccttatgacccctgttggatgtggagtcgctggcagccaatgcgttgactttccaatgcagtacagcaataacattcatccttactcgggccccgaatttggttttctgcctgcaaaaccagttcacaagaccccagtgagcttccatgctgtgccagtgccaccactggccccgctgtgtagaagcgaggtgccagtggtgataaatcaagagaggcagcagggctctgcaccccctaaattcaaacaggcagtgctggtccctgagaacggctgttcagcagaagacaacaccttcaaacagaaaggtgatgacacagacagcacacccttctccttgttccagttcaacctgcctattgcccctcccaccctggcaacatccaaagaagagcaaagtggagcgatgccgtcaatggcactgccaccagctcagataactcgagcccagctgtgctccagggaggagaccaatgtcaaggagtacaaccttttctctgggtgtaacggagtgatgtttcagctcaactagaggcgaagaaaagtgagcagctattcaatatacatacatggtgaacgatttgtattctagtaaaacagaataaagtaggtcgaggtttttactgtgttgccctcgaatatttatttcttttttaattttgatttgttgtgcttcccctccctgtttttttgtgtgtatggaaaactgaaaagacagtgagtggtatagattctgcagttttgacacgagtctagtgtcactttttaccccccggatggttgtcatcttccaactaggctcgttcggtgtagctctgtcaattcattttggactgactgaatctgtagcagtttttactacagatacagtaccaagccgtttgttttaattaagggtcctagacatctccggttgctccccc

SEQ ID NO: 2467 - DNA, 4288 bp, Zea Mays
gtttgatttgattcgttggtctcctgtgggaagattctattatattggactgctccggcttctcagctggcgtggagtccctgtgatgaagttgggtgtgttacatggagatggaacagagtagcagacaagcgcttgactgaagaatctgattggttttccccatttggatatttggacgtgttgaattgagttgagggagctatttctgatgtgttgctgctatgctatagctgtccagagaagtgggagcaacctgaattgtgaaaatcgatctgtcatagctaactgcttggctgactggtcagattggtttgcctcgtttttggacaaacagaaggaatgaaggatgctttaagatgaatcccttactactggttttattgctgctaaccaaggagcagtgatggcggcaaaccaaactttggagagtattcactccttcctggtttgatcagccagcttcttgactcaagcatctgattagttagtcttattcagttttggagtgccctgtcatctcgtgcacggtacgaactgctaagacttgataaacagacccttattgagcatgctcgcaagaatttgtactgttcaaggtgcaacgggctgcttttggaaagtttcacacaaataatgatgtatgggaagtcactgcatcatgaaggttcgtgtgagccaaggattcaggaagttgaagcagaagttcaggacccttcagttcatccttggggaggcctttcgacaacaaaggatggcatcctaactcttcttgattgcttcataaatgcaaaatcacttcatgagatccagaatgtatttgacaatgcacgtgctagagaacgtgaacgtgaaatgctttaccctgatgcatgtggtggcggtggcagaggatggattagtccagtgatgcctaactatggcaggggccatggaacacgagatacttgtgctttgcatactgcacatctttcttgtgacactctagtggatttttggtcggcactgggtgatgaaactagatcatcacttttaaggatgaaggaagaggacttcattgaaagactcatgcacaggttcgacagcaaaagattctgcagagactgcagaaggaatgttattcgtgaattcaaggaactcaaggaactaaagcgcatgcgaagggaacctcgctgcactagttggttttgtgttgcagataccacatttaactgtgaggtgtttgaggatgctattcttgttgattggcatcaatccttattggagcaagatggaatttaccatcatttcgagtgggctattggaacggatgaaggaaaatctgatattctaaactttgaaaatgtgggcatgattgggcaagtccacaggaaaggccttgatcttgatcagtttgaagactattttgttacactgagagcatgtaggctggatggccgccgtacagaattctgtgtgaaggcccatgccttgaagggccaatcttgtgttcaccggaggctaatcgtgggggatggatttgtgacaattacaaaaggtgaaagtattagaagtttctttgagcatgctgaagaagctgaggaagaggatgaagatgatgtagtggacagagacagcaatgaccctgatggtgatatcgctcatccacaaaagcatgctaagagccctgaacttgcaagagaatttcttctggatgctgctgcagtgatcttcaaagaacaggtcgagaaggctttcagagaaggtacagcgcggcaaaatgcacatagtgtttttgtgtcccttgctctaaaactgttagaagaacgagttcatgttgcttgcaaggaaataattacattggaaaaacagaccaagctacttgaggaagaagagaaagaaaaacgtgaagaagaagagcgcagggataggaggagaacaaaagaaagagaaaagaagaatagaagaaaagagaggctgaaaggaaaagacaaagataaagaaaaaatattggttcggtcaaaaaaaccaggtctttcaacattttctccgagcagccaagcagcaccaagtagtaatgagtctcaggatgttctagacttgagatattcagatagcgaagaggaagacaatgttgtggtcagggaacactatcctgattcttcagctgatcaatcttcaagcaaggatactgatgaacgaagcaatgagcatgaatgcagtgcaacagcagaatttgttccctcagattgtgatggctcattcttatgtgatgagtctaattcatcaagaaacttgagatttagatgggacttcccagaaaaagatgtcagttattggtatgaagattgtcgtgttgattctggagatactcaattgcagtctagggagaggatcagaaataacactagaagttacaacactgtatttaatacaaataaccgaacaagagacaagtacaacccctgcagctgtggccatcaagaagacttcagatatttttccacagcaactagatcaagtagggagacaaagatttccaggaaaacagtggctgagaaacccaggttgcaataccgcaggtgctatcctccagaaagcttcgctgtgtcaaatggacgtgttggtggtacaccaaacaagaacacaggtccaaagcaagtatgggagccaatggatgcaagaaagaagatagggaatgggagaggatcagaaataacaccagaaactactggtgctgctgatggttcagatcaagtggaatgctcaaaggacattagtgaatgtgagaagcttgaggtagtgtgtgaaacacttgctgaaacttgttgtgagatatctgcagaagcctgtaagtcagatcaaccatgtagacaaggtgagaaaaatcagtctgcttgcagcgatggatctaaatgcgtagataagccaaattgctgcttgacaaaggacactgttaggacaacaaatttaaccagttcagacagcttttcgtgtctaagtgagggagatagagacagcagcatgagtagcatgacctcactgagtgctcagaatgtagaatcttcatctacatctgattcagatgagtattcagacaggaacgatagcagcccaggcgatccaccagtgaagaatgtttctcgttcattacttgagatgtgtgcaggaaatggtttcagggagtaccaaccgaaaggcttgaaccctcctaatggcaaccaatttggatttatggtggcacctttacaggaccagatgttgcaccaacagaagatccatgcaccgccgtactcgtcaccatttgtggggttccacaatcaccccttggcagttccaacaaatgggtacttgccatatcctcagccaggtcacttctaccctggccttatgacccctgttggatgtggagtcgctggcagccaatgcgttgactttccaatgcagtacagcaataacattcatccttactcgggccccgaatttggttttctgcctgcaaaaccagttcacaagaccccagtgagcttccatgctgtgccagtgccaccactggccccgctgtgtagaagcgaggtgccagtggtgataaatcaagagaggcagcagggctctgcaccccctaaattcaaacaggcagtgctggtccctgagaacggctgttcagcagaagacaacaccttcaaacagaaaggtgatgacacagacagcacacccttctccttgttccagttcaacctgcctattgcccctcccaccctggcaacatccaaagaagagcaaagtggagcgatgccgtcaatggcactgccaccagctcagataactcgagcccagctgtgctccagggaggagaccaatgtcaaggagtacaaccttttctctgggtgtaacggagtgatgtttcagctcaactagaggcgaagaaaagtgagcagctattcaatatacatacatggtgaacgatttgtattctagtaaaacagaataaagtaggtcgaggtttttactgtgttgccctcgaatatttatttcttttttaattttgatttgttgtgcttcccctccctgtttttttgtgtgtatggaaaactgaaaagacagtgagtggtatagattctgcagttttgacacgagtctagtgtcactttttaccccccggatggttgtcatcttccaactaggctcgttcggtgtagctctgtcaattcattttggactgactgaatctgtagcagtttttactacagatacagtaccaagccgtttgttttaattaagggtcctagacatctccggttgctccccc

SEQ ID NO: 2468 - DNA, 2636 bp, Zea Mays
ctgctgctggctcaactgtccgcgcatggctacagttagcagcacctgctgctgctgcgtggcgtcgtaggtcgagaaggctttcagagaaggtacagcgcggcaaaatgcacatagtgtttttgtgtcccttgctctaaaactgttagaagaacgagttcatgttgcttgcaaggaaataattacattggaaaaacagaccaagctacttgaggaagaagagaaagaaaaacgtgaagaagaagagcgcagggataggaggagaacaaaagaaagagaaaagaagaatagaagaaaagagaggctgaaaggaaaagacaaagataaagaaaaaatattggttcggtcaaaaaaaccaggtctttcaacattttctccgagcagccaagcagcaccaagtagtaatgagtctcaggatgttctagacttgagatattcagatagcgaagaggaagacaatgttgtggtcagggaacactatcctgattcttcagctgatcaatcttcaagcaaggatactgatgaacgaagcaatgagcatgaatgcagtgcaacagcagaatttgttccctcagattgtgatggctcattcttatgtgatgagtctaattcatcaagaaacttgagatttagatgggacttcccagaaaaagatgtcagttattggtatgaagattgtcgtgttgattctggagatactcaattgcagtctagggagaggatcagaaataacactagaagttacaacactgtatttaatacaaataaccgaacaagagacaagtacaacccctgcagctgtggccatcaagaagacttcagatatttttccacagcaactagatcaagtagggagacaaagatttccaggaaaacagtggctgagaaacccaggttgcaataccgcaggtgctatcctccagaaagcttcgctgtgtcaaatggacgtgttggtggtacaccaaacaagaacacaggtccaaagcaagtatgggagccaatggatgcaagaaagaagatagggaatgggagaggatcagaaataacaccagaaactactggtgctgctgatggttcagatcaagtggaatgctcaaaggacattagtgaatgtgagaagcttgaggtagtgtgtgaaacacttgctgaaacttgttgtgagatatctgcagaagcctgtaagtcagatcaaccatgtagacaaggtgagaaaaatcagtctgcttgcagcgatggatctaaatgcgtagataagccaaattgctgcttgacaaaggacactgttaggacaacaaatttaaccagttcagacagcttttcgtgtctaagtgagggagatagagacagcagcatgagtagcatgacctcactgagtgctcagaatgtagaatcttcatctacatctgattcagatgagtattcagacaggaacgatagcagcccaggcgatccaccagtgaagaatgtttctcgttcattacttgagatgtgtgcaggaaatggtttcagggagtaccaaccgaaaggcttgaaccctcctaatggcaaccaatttggatttatggtggcacctttacaggaccagatgttgcaccaacagaagatccatgcaccgccgtactcgtcaccatttgtggggttccacaatcaccccttggcagttccaacaaatgggtacttgccatatcctcagccaggtcacttctaccctggccttatgacccctgttggatgtggagtcgctggcagccaatgcgttgactttccaatgcagtacagcaataacattcatccttactcgggccccgaatttggttttctgcctgcaaaaccagttcacaagaccccagtgagcttccatgctgtgccagtgccaccactggccccgctgtgtagaagcgaggtgccagtggtgataaatcaagagaggcagcagggctctgcaccccctaaattcaaacaggcagtgctggtccctgagaacggctgttcagcagaagacaacaccttcaaacagaaaggtgatgacacagacagcacacccttctccttgttccagttcaacctgcctattgcccctcccaccctggcaacatccaaagaagagcaaagtggagcgatgccgtcaatggcactgccaccagctcagataactcgagcccagctgtgctccagggaggagaccaatgtcaaggagtacaaccttttctctgggtgtaacggagtgatgtttcagctcaactagaggcgaagaaaagtgagcagctattcaatatacatacatggtgaacgatttgtattctagtaaaacagaataaagtaggtcgaggtttttactgtgttgccctcgaatatttatttcttttttaattttgatttgttgtgcttcccctccctgtttttttgtgtgtatggaaaactgaaaagacagtgagtggtatagattctgcagttttgacacgagtctagtgtcactttttaccccccggatggttgtcatcttccaactaggctcgttcggtgtagctctgtcaattcattttggactgactgaatctgtagcagtttttactacagatacagtaccaagccgtttgttttaattaagggtcctagacatctccggttgctccccc

SEQ ID NO: 2469 - DNA, 2590 bp, Zea Mays
atgtcactggctagtgtggcacaggcacagaggccactggtggggtttcattggagcacactagattccagtcctatatacacaaatatcaattcgggatgacgcgagcaaagcaaacacatccaaatatcatacacacaaagtgccctagttaccaagctacttgaggaagaagagaaagaaaaacgtgaagaagaagagcgcagggataggaggagaacaaaagaaagagaaaagaagaatagaagaaaagagaggctgaaaggaaaagacaaagataaagaaaaaatattggttcggtcaaaaaaaccaggtctttcaacattttctccgagcagccaagcagcaccaagtagtaatgagtctcaggatgttctagacttgagatattcagatagcgaagaggaagacaatgttgtggtcagggaacactatcctgattcttcagctgatcaatcttcaagcaaggatactgatgaacgaagcaatgagcatgaatgcagtgcaacagcagaatttgttccctcagattgtgatggctcattcttatgtgatgagtctaattcatcaagaaacttgagatttagatgggacttcccagaaaaagatgtcagttattggtatgaagattgtcgtgttgattctggagatactcaattgcagtctagggagaggatcagaaataacactagaagttacaacactgtatttaatacaaataaccgaacaagagacaagtacaacccctgcagctgtggccatcaagaagacttcagatatttttccacagcaactagatcaagtagggagacaaagatttccaggaaaacagtggctgagaaacccaggttgcaataccgcaggtgctatcctccagaaagcttcgctgtgtcaaatggacgtgttggtggtacaccaaacaagaacacaggtccaaagcaagtatgggagccaatggatgcaagaaagaagatagggaatgggagaggatcagaaataacaccagaaactactggtgctgctgatggttcagatcaagtggaatgctcaaaggacattagtgaatgtgagaagcttgaggtagtgtgtgaaacacttgctgaaacttgttgtgagatatctgcagaagcctgtaagtcagatcaaccatgtagacaaggtgagaaaaatcagtctgcttgcagcgatggatctaaatgcgtagataagccaaattgctgcttgacaaaggacactgttaggacaacaaatttaaccagttcagacagcttttcgtgtctaagtgagggagatagagacagcagcatgagtagcatgacctcactgagtgctcagaatgtagaatcttcatctacatctgattcagatgagtattcagacaggaacgatagcagcccaggcgatccaccagtgaagaatgtttctcgttcattacttgagatgtgtgcaggaaatggtttcagggagtaccaaccgaaaggcttgaaccctcctaatggcaaccaatttggatttatggtggcacctttacaggaccagatgttgcaccaacagaagatccatgcaccgccgtactcgtcaccatttgtggggttccacaatcaccccttggcagttccaacaaatgggtacttgccatatcctcagccaggtcacttctaccctggccttatgacccctgttggatgtggagtcgctggcagccaatgcgttgactttccaatgcagtacagcaataacattcatccttactcgggccccgaatttggttttctgcctgcaaaaccagttcacaagaccccagtgagcttccatgctgtgccagtgccaccactggccccgctgtgtagaagcgaggtgccagtggtgataaatcaagagaggcagcagggctctgcaccccctaaattcaaacaggcagtgctggtccctgagaacggctgttcagcagaagacaacaccttcaaacagaaaggtgatgacacagacagcacacccttctccttgttccagttcaacctgcctattgcccctcccaccctggcaacatccaaagaagagcaaagtggagcgatgccgtcaatggcactgccaccagctcagataactcgagcccagctgtgctccagggaggagaccaatgtcaaggagtacaaccttttctctgggtgtaacggagtgatgtttcagctcaactagaggcgaagaaaagtgagcagctattcaatatacatacatggtgaacgatttgtattctagtaaaacagaataaagtaggtcgaggtttttactgtgttgccctcgaatatttatttcttttttaattttgatttgttgtgcttcccctccctgtttttttgtgtgtatggaaaactgaaaagacagtgagtggtatagattctgcagttttgacacgagtctagtgtcactttttaccccccggatggttgtcatcttccaactaggctcgttcggtgtagctctgtcaattcattttggactgactgaatctgtagcagtttttactacagatacagtaccaagccgtttgttttaattaagggtcctagacatctccggttgctccccc

SEQ ID NO: 2470 - DNA, 1207 bp, Zea Mays
ggcacgatgcttggtcagttggctgacagaggactaaataagacaagatgagaatatattcgctaattatgttttctggaatggggtggaatcaaatcaaaacaaatccatggtgcaatcaattgattaactccagccgttctttcagtataaagtaattctgaaagaaaaaaaaattcttatcctatctcagaaaaggagaggaaaaggagagagacgaatgtgggtgggaaagaagaggaaagctcattatattcttgagttggcgcactagacgacgggtcgagtcgacgtctcaggactcgggagtcgggagtacgagaatgtagcagtagcagcttgccaatataaagcaccgtcgcctccttcgtttgttaagcgaaaggaactaaacacagacagtagcttagctgggtttcacattccatcggatcgacctagcctcggacttggagaacatgggaggtggaagggacaatcatcatgctgacaaaggatgttatcctccgactgtctatcctccagtacattcaactggatcatatgtatttgcgcctccagttgcatatccatatccgtatgcacaacatggatctatggctccacccccattaggatcatatccatatccttcacctatgtactcttcacatagtggttacccaccatctggatatccaacatataatcaaagtgcttacccatcaatgggtggctatcctggtgctagtttgcatgctactcaacatcatggtaatggatataacatgggggcaacgctcattggtggagcagcagccgccgccgccgctacctatggtgtacatcacttaacccatggccatcaccctcacaatcaccacttaggacattttggcaagtttaaacatcattataatggacactatggcaagttaaagcatggaaaatttgggaaacacattgggttaggaggaaaacatggccttctagggtggaagcatcaccgtcatgggttctttggaggaaaatacaagaggtggaagtagttaaaatatagggaagggtatgcaattggatcctgcaagtatgataactaacatatgtaaaataaaaatggttggttcgtgttaatgctatacatgcatgtaatgtttttataaattacttgttgtatgtgtcattatcaatctataataagaatacatactttgttaatggcttattc

SEQ ID NO: 2471 - DNA, 924 bp, Zea Mays
cgacgtctcaggactcgggagtcgggagtacgagaatgtagcagtagcagcttgccaatataaagcaccgtcgcctccttcgtttgttaagcgaaaggaactaaacacagacagtagcttagctgggtttcacattccatcggatcgacctagcctcggacttggaggtaataacatgggaggtggaagggacaatcatcatgctgacaaaggatgttatcctccgactgtctatcctccagtacattcaactggatcatatgtatttgcgcctccagttgcatatccatatccgtatgcacaacatggatctatggctccacccccattaggatcatatccatatccttcacctatgtactcttcacatagtggttacccaccatctggatatccaacatataatcaaagtgcttacccatcaatgggtggctatcctggtgctagtttgcatgctactcaacatcatggtaatggatataacatgggggcaacgctcattggtggagcagcagccgccgccgccgctacctatggtgtacatcacttaacccatggccatcaccctcacaatcaccacttaggacattttggcaagtttaaacatcattataatggacactatggcaagttaaagcatggaaaatttgggaaacacattgggttaggaggaaaacatggccttctagggtggaagcatcaccgtcatgggttctttggaggaaaatacaagaggtggaagtagttaaaatatagggaagggtatgcaattggatcctgcaagtatgataactaacatatgtaaaataaaaatggttggttcgtgttaatgctatacatgcatgtaatgtttttataaattacttgttgtatgtgtcattatcaatctataataagaatacatactttgttaatggcttattc

SEQ ID NO: 2472 - DNA, 1194 bp, Zea Mays
atgaccatcatgcatcacagcaagcactgcaattctgttgagcaaacccaatcatacaatgtgagccgtttgcaaagtgaaggatattatggaggcgtccggctgctgatggctatcttctgggctgtctggttcgagcgcgattgtttgtgctgctctaagctgccttcttgacttctataatgtcagacatctaataaaagttgaaatgagacctaatctgattctcaatgctgagaaagagcttgggattgttgctggacttcaggaccgagtggcacaggtttatggtggactagtttatatggattttagccagggtcatatggacaagctgggtcatggcatatacatgccattggatgtcaatctgcttcctcctctatacctcatctatgccgataaccccagtgactctggcaaggtccacagcactgttagacaaagatggctgtcaggtgatgattttataacatcacgtatgaaggaagtagcgcagctagcgctcgatggccacaaggctttgctgcagaaggattatactgagctagcgagatttatgaataagaattttgatctgcgaagggagatgtttggagatgatgtacttggtgcattgaacataaagatggtggatgtggcacgcagcgtgggcgcagcgtccaagttcactggcagcggaggcgcagtggtggcgctgtgcccagatggggattcgcaggtggagcgtctccgcaagggatgccaggaggccggctttgtagtacagcaagtgaaagttgccccctcggtgctgacggacgaggagctgtcaagtttattattagcttcctagttgaacgataagaaaggtgaacaagacaacaaaacagttgtgcgacgttccttcatttgtggtgttttgatgtgtgcgatgatgtgtctgtttagttgatattcaatataagagacggtttggaacttcagataatagttagccagctaacagtgattggaacgttctcctaaagctagttaggtcccatttggttttagtacctggttttagtcccctttagtctttattttgtcaaacggaaggactaaactagattagggactaattagttttagtctctagtccctcacatgggtgctaaaatgggctaaaggacaacatttactctaattacccttgcctagaaaactggtgtc

SEQ ID NO: 2473 - DNA, 3157 bp, Zea Mays
acgaaaactgctgatatgggagaagaagcgacacttctttcttgctgaacaactcaggaagcatggcggatgggggtattgtggtagccatttgccaatatggtggagaattcacttctggccccaatggtaatttgacatacaaaggaggcgaggcgcatgctgttgatgttactcgtgacatgccactggagaacttcaaggatgaggtgtccaaggtgttccatgttgacgtcactgacatgtcattgaagtacttccttccgaataattacagaacgctaatcacaatatcatgtgatcgagatttacaaaggatggttgattttactaccagtgccacacaagtggaagttttcttgattagtagagtagaaaacaggagtattgttacttactctggagcttctgcaagtaagcctggatctaatgctcctggtgataaaaggaaaaggccaccttccaaaaacaaggtatccaaaagtaacaagaagactccaactcccagtgctcctggcacttcagtccaacctagtgctaataatgtgaaacagccaagaccaatagctattgaaaccaacgacaacagggtattccaactggaatttggaagtgatgttgcctttgccaccccagctggaggtgcttctactgcgccagacattctggatcagcaaaaccttgctcttgttgacactgcacatcgggaaccaattggccatttcgatgattcaggtgactcgtatgttggttctgagatcactgtagatcctcagcatggactcgacaatcctgttatgttttgggatgacattattaaaggtgttggtcaagaatttgataatgtgaaggatttccgtgctcaattgtgcaaatatgccattgggaaaggatttgcgtaccggttcattaaaaatgaaactactcgtgtcacggtaaaatgtgttgcagagggctgcacatggcgaatgcatgcatccgagtcatctcgtaacaagaaatttgtgatcaagaaaatgacagatgagcatacatgtggaggaggaaatggagaaggtcagcgtcgagcgacaagacaatggctgaccactgttattaaggagaagctgcatgataatccgatgttgaagccaaaggaccttgtcaaggaaatatatgaacaatatggagttacactgacttattcacaggtctggcgaggtaaagaagtagcacagaaggaactgtatcatgctatcagggagacttacagccatttgccctggtattgtgagaggcttacagagtccaacccagggagtattgctttgttatctccaatggtggatacaaagttccgtcgcttttttgttgcatttcatgcttctttgcatggttttgcaaatgggtgcaggcccctattgtttcttgacaaggttccactgaaagcaacaaatgagtacaagttgctggtggccgctgcagtcgatgctgacgatgctgtctttccagtggcatttagcgtcgtcgaggatgaaaactatgaaagttgggtttggttcttaatgcagctgaaattccctgtccaaaatcacagctacgcttacaatgccatgacattcttgtccagtggacagaagggtctggatgctgccgtttctcaagtttttgaagatagccatcatgccttctgtttgcatcatatcatggaggaattcaaaggagagctgagaaagggaccatggtcacaacaaataagagaggggatgattgaggattttactcgcgccgctcaagcatgtagtattgaggattttaacacgtcaatcgagagcattaggaacatatccactgaagctgctgagtggatcatagcaagcaagcctgagcattggtccgacgccattttcagaggctgtcgatacgaccatttctcctcaaacattgttgatgccttcaataactggataccaaccaagaaggagggttcaattgtgctgatggttgactcactgagaacaaaaataatggagataatagaaacaaggcgtgaggcttgcaaggcgtggtcaggacctttgacgccttccatggaattcaaagcacaggaggaggtgacgaaggctggtaaaatgactgttctgtgctcttccgaaaccgtgtttgaagtgcgaggcaatgcgatctttgtcgttaatctcgcaaattgggaatgcacctgccggaggtggcagctttctggcctcccgtgcctgcatgctgtcgctgtgttcaaccggatcgggcgatctttctacgactactgctccaagtttttcagaatagagagctaccatatgacttactcaggaacgatcttcccaatacctgatatggacactgttgattttagtgccggtgcaaatctaatcccgcctcccaagccacggacgtcggataaaccaagaaggaagcggtttaaccccaacaagatccccacggtaatacggctctgcagcaggtgcaagcaagcaggccacaacaaggcaacctgtgaagctattttgtagacaaaaaagtagctgctgcatctggggtttgtattttatagcagcgtaaaggatctcaagtttttgctggagcgctatggctggtgctgcctgctttctgcagcttcttatctggaaaggggaaattgggtatcaggcatacatatgattccctgtgtttatgtgggagccgtagcttaaatcttttgtggagtgggtggatgaacccaagtgttagggatctgtctgctagtacagcatagattgttaccagttcgacaactctaggtagtccgtagtcttatcgtctagatgaaaccattagctgtttattctcatgtagatcgatcttcgcacgtgccatggtggttgctttcgtaatactatctccgttctcaaatatttatcgtccgttagtttatttttaaactaaaacatgacaaaataaaaaaaaacggagggagtatcgttttgtacaactttctttgtgtgcgctcctctcaactcttaggtagaggctgccagtcaaaggtgcaaatagtatggctagctattttgccaaacggaccgaactcgtaactccgaagagaggaggctccagcgattcggtcggtattcttgatccaggtgttcagggtataataattaaa

SEQ ID NO: 2474 - DNA, 3140 bp, Zea Mays
aaactgctgatatgggagaagaagcgacacttctttcttggaagcatggcggatgggggtattgtggtagccatttgccaatatggtggagaattcacttctggccccaatggtaatttgacatacaaaggaggcgaggcgcatgctgttgatgttactcgtgacatgccactggagaacttcaaggatgaggtgtccaaggtgttccatgttgacgtcactgacatgtcattgaagtacttccttccgaataattacagaacgctaatcacaatatcatgtgatcgagatttacaaaggatggttgattttactaccagtgccacacaagtggaagttttcttgattagtagagtagaaaacaggagtattgttacttactctggagcttctgcaagtaagcctggatctaatgctcctggtgataaaaggaaaaggccaccttccaaaaacaaggtatccaaaagtaacaagaagactccaactcccagtgctcctggcacttcagtccaacctagtgctaataatgtgaaacagccaagaccaatagctattgaaaccaacgacaacagggtattccaactggaatttggaagtgatgttgcctttgccaccccagctggaggtgcttctactgcgccagacattctggatcagcaaaaccttgctcttgttgacactgcacatcgggaaccaattggccatttcgatgattcaggtgactcgtatgttggttctgagatcactgtagatcctcagcatggactcgacaatcctgttatgttttgggatgacattattaaaggtgttggtcaagaatttgataatgtgaaggatttccgtgctcaattgtgcaaatatgccattgggaaaggatttgcgtaccggttcattaaaaatgaaactactcgtgtcacggtaaaatgtgttgcagagggctgcacatggcgaatgcatgcatccgagtcatctcgtaacaagaaatttgtgatcaagaaaatgacagatgagcatacatgtggaggaggaaatggagaaggtcagcgtcgagcgacaagacaatggctgaccactgttattaaggagaagctgcatgataatccgatgttgaagccaaaggaccttgtcaaggaaatatatgaacaatatggagttacactgacttattcacaggtctggcgaggtaaagaagtagcacagaaggaactgtatcatgctatcagggagacttacagccatttgccctggtattgtgagaggcttacagagtccaacccagggagtattgctttgttatctccaatggtggatacaaagttccgtcgcttttttgttgcatttcatgcttctttgcatggttttgcaaatgggtgcaggcccctattgtttcttgacaaggttccactgaaagcaacaaatgagtacaagttgctggtggccgctgcagtcgatgctgacgatgctgtctttccagtggcatttagcgtcgtcgaggatgaaaactatgaaagttgggtttggttcttaatgcagctgaaattccctgtccaaaatcacagctacgcttacaatgccatgacattcttgtccagtggacagaagggtctggatgctgccgtttctcaagtttttgaagatagccatcatgccttctgtttgcatcatatcatggaggaattcaaaggagagctgagaaagggaccatggtcacaacaaataagagaggggatgattgaggattttactcgcgccgctcaagcatgtagtattgaggattttaacacgtcaatcgagagcattaggaacatatccactgaagctgctgagtggatcatagcaagcaagcctgagcattggtccgacgccattttcagaggctgtcgatacgaccatttctcctcaaacattgttgatgccttcaataactggataccaaccaagaaggagggttcaattgtgctgatggttgactcactgagaacaaaaataatggagataatagaaacaaggcgtgaggcttgcaaggcgtggtcaggacctttgacgccttccatggaattcaaagcacaggaggaggtgacgaaggctggtaaaatgactgttctgtgctcttccgaaaccgtgtttgaagtgcgaggcaatgcgatctttgtcgttaatctcgcaaattgggaatgcacctgccggaggtggcagctttctggcctcccgtgcctgcatgctgtcgctgtgttcaaccggatcgggcgatctttctacgactactgctccaagtttttcagaatagagagctaccatatgacttactcaggaacgatcttcccaatacctgatatggacactgttgattttagtgccggtgcaaatctaatcccgcctcccaagccacggacgtcggataaaccaagaaggaagcggtttaaccccaacaagatccccacggtaatacggctctgcagcaggtgcaagcaagcaggccacaacaaggcaacctgtgaagctattttgtagacaaaaaagtagctgctgcatctggggtttgtattttatagcagcgtaaaggatctcaagtttttgctggagcgctatggctggtgctgcctgctttctgcagcttcttatctggaaaggggaaattgggtatcaggcatacatatgattccctgtgtttatgtgggagccgtagcttaaatcttttgtggagtgggtggatgaacccaagtgttagggatctgtctgctagtacagcatagattgttaccagttcgacaactctaggtagtccgtagtcttatcgtctagatgaaaccattagctgtttattctcatgtagatcgatcttcgcacgtgccatggtggttgctttcgtaatactatctccgttctcaaatatttatcgtccgttagtttatttttaaactaaaacatgacaaaataaaaaaaaacggagggagtatcgttttgtacaactttctttgtgtgcgctcctctcaactcttaggtagaggctgccagtcaaaggtgcaaatagtatggctagctattttgccaaacggaccgaactcgtaactccgaagagaggaggctccagcgattcggtcggtattcttgatccaggtgttcagggtataataattaaa

SEQ ID NO: 2475 - DNA, 975 bp, Zea Mays
ttttttgatttctatattttttctttagaattccttcaatccaaacggatctaaacatattttcactcgtccgatcaggcgattcagaggacgacatcgctagcacgtggtgtctgttccggctaaaatgaaaggtagtggcaaaattgtggaaagcaccagggaagattttccgcggtggggaaatatcaagaatacccctggcatccgcagccctaacaaatcaaccccgcttcgtcttcccctcctccttcccttcttcccctcccttcccggccgccgcggtgcgcgcccgcctccttccgtccggaggcaactactcgcttctctctactctcggggaagcctgagctgattcctcctcgtgctctctcgtgggaagcatggcggatgggggtattgtggtagccatttgccaatatggtggagaattcacttctggccccaatggtaatttgacatacaaaggaggcgaggcgcatgctgttgatgttactcgtgacatgccactggagaacttcaaggatgaggtgtccaaggtgttccatgttgacgtcactgacatgtcattgaagtacttccttccgaataattacagaacgctaatcacaatatcatgtgatcgagatttacaaaggatggttgattttactaccagtgccacacaagtggaagttttcttgattagtagagtagaaaacaggagtattgttacttactctggagcttctgcaagtaagcctggatctaatgctcctggtgataaaaggaaaaggccaccttccaaaaacaaggtatccaaaagtaacaagaagactccaactcccagtgctcctggcacttcagtccaacctagtgctaataatgtgaaacagccaagaccaatagctattgaaaccaacgacaacagatgcattggccactatctagtgcatgccaagggaacacatacggcagctattttgtatatacttt

SEQ ID NO: 2476 - DNA, 983 bp, Zea Mays
cacacacggaggcaaatcgatcgccatcgtgggcatcgagagtatcgacgcatctgcctgctatcttcatcagtctatctcgacccattcccgcgagccgtcccccttccctcttcatccgctcgctccgtctcccgcgctcctgccatcccctccggccactccgaccttccgtggagggagattccttgcccggtgggaatctcagggctgatttgaagactgccggcaaagatccatcgaggaggcggcgattccatcccgaatcacgacatccggcctaagcgaaggagctgaataggcgcgcatcaccctcgtcgtcctagccgtcaccggctccatttgaatgtaccttcagttgctagtccccgaaccctatccctccaccgtcctcaaggtgcaggtccacctgatgcgacacaactcgcctgccgagctcgacgtcccatcgtcggcttcctctctccagggtccagtgaatctttctatgtgttggcagataaactgagcagtgaggggtcttgatggtagcagagtaggtccttgctgtgttggaaggtaaactaagcagtgaggggtcctgacgtctacagagagcattgagaaaaggcacatgaggggcagtaagaggacaactggtcctactgttgttggaaaataaattgagcaggtgctcgtggtggctatagaaaaaggcacgaggggcggccagaggagagcagttccaggtgtgcgttggagagtgttaattacctgtgtgtgtacctgaggcctttagttgtacaccacgcctttggaggtttctatcgtcctaattaatcgacccacaggcggtagcggcttggttgctatttgtaaattacttttggaggccgctcgttgtatatatgtgacgatgtttggaaagtgttgaacatttcttacactgtcgtgatacttttccttgtattagtttctatttttggaatgcatatatatatatc

SEQ ID NO: 2477 - DNA, 901 bp, Zea Mays
cttcatcagtctatctcgacccattcccgcgagccgtcccccttccctcttcatccgctcgctccgtctcccgcgctcctgccatcccctccggccactccgaccttccgtggagggagattccttgcccggtgggaatctcagggctgatttgaagactgccggcaaagatccatcgaggaggcggcgattccatcccgaatcacgacatccggcctaagcgaaggagctgaataggcgcgcatcaccctcgtcgtcctagccgtcaccggctccttgctagtccccgaaccctatccctccaccgtcctcaaggtgcaggtccacctgatgcgacacaactcgcctgccgagctcgacgtcccatcgtcggcttcctctctccagggtccagtgaatctttctatgtgttggcagataaactgagcagtgaggggtcttgatggtagcagagtaggtccttgctgtgttggaaggtaaactaagcagtgaggggtcctgacgtctacagagagcattgagaaaaggcacatgaggggcagtaagaggacaactggtcctactgttgttggaaaataaattgagcaggtgctcgtggtggctatagaaaaaggcacgaggggcggccagaggagagcagttccaggtgtgcgttggagagtgttaattacctgtgtgtgtacctgaggcctttagttgtacaccacgcctttggaggtttctatcgtcctaattaatcgacccacaggcggtagcggcttggttgctatttgtaaattacttttggaggccgctcgttgtatatatgtgacgatgtttggaaagtgttgaacatttcttacactgtcgtgatacttttccttgtattagtttctatttttggaatgcatatatatatatc

SEQ ID NO: 2478 - DNA, 2085 bp, Zea Mays
gaaaatgtcattaggcaagaaatgtatgtatcgtgtacaaatctttgtggatatatggacggagaaattataggatatcagagcaattagcctacatctttcgcggattctgtagttttcccagctagagattagcagagcggcatgaataactcaaacacaggtgttgcagtttccgtcatcgaaattaaaggatatacatacatatctctttgttcctgcagcaagctgcaaagagaacgcttgttggtagaacaaagtatatgcccccatgacaccgagtccaagcagcaggctcgagcatgagctggagaagcccccacatccgcatgggctggatgcccatttcatgaggaggcttgtgagccggagctgggaggaatccaggctgctatggcgccttgccttcccggcgctcctgacggaggtgtttcagttctccatcggtttcgtcaccaccgccttcgttgggcacctcggagaggtggagctcgcggctgtcagcgtcgtggagaacatcttggattcctctgcctatggggtcctgtttggcatgggcagcgcgctggacacgctgagcgggcaggccgtcggcgccgggcagctggacaggctgggcacctacacgcagcagtcgtggatcatctgcggcgccaccgcgctggcgctggcgccggcgtacgccttcgccccgcggctcctgcactcgttcctccaccagcccgaccacgtgtcgcgcgccgccgggccgtacgcccgctgggcgatcccgaggctgttcgcgcacgccgtgaacataccgctcctcatgttcttccaggcccagagcaggatctgggccgtggcggccatctccggcgcggtcctcggcgtgcacgccgcgctcacctacgtcgccgtcacgaggctcgggtacggcatgcccggggccgccgtcgccggggacatctcccactggctcgtcgtcgccgcgcagttcgcctacatgaccggcggccgcttccccgacgcgtggaagggcttcaccgtgcgtgcgttcgacaacctcggcgccttcgtcaagctgtcgctcgggtccgccgtcatgatctgcttggagttttggtactacaccacgcttctcgtcctcgtgggtctcctcaaacatggcaaactccaaatcgacatcatgtcagtctgcctcaacttcgagttcttgactgtaatggttgcgctgggcttcagcacagcaatcgggattagagtgtccaacgagctgggtgcaaacaggcccaaggaggcaaagtttgcagtgcttgtggcagtatcgacatccatgttcatgggagcagtctttatgtgcgtcgtcctcatctggaggacgagcctgccaaagctcttcagcgacagcgaggaggtgaaacgtggagcttccaagctggggcatctcctcgctctcaccgtatgcgtcagcagcatctggcctgtgctatcagattcctgtctgttttctttcaggcgtggccgtaggagctgggtggcaagtgcgtgtggcgttcataaacgtcggttgctactacctagtgggcattccgatgggtatcctgcttgggttcaagctaaaacacggcacaatgggcatatggatgggcatgttgacaggcacgtttctccaaatgtcaatacttctcgccactatcttcacaacaaagtgggataaacaggccgcactggcagaagtgagaatggcggagtggggaggaaagaacgagaacctaacactgacggaaacaacacatacagatgatctgatggctcctgtgcaagagaaaatgttggcgaatgacagccagaagaatgtagaattagtgcgcatagattgatcacagagtatattcatttcagctcgagacagtatttcattgtttactaggatgatagtatgaatctattttttttataaataatctctccgttccaaactagctagtagtcgttttagttctagattttttttgtctatattcatatgggcgataacgaatttagacacatatagaacatgaatccaataaaatggtaaaacggattttaatttggtacgga

SEQ ID NO: 2479 - DNA, 1963 bp, Zea Mays
gcaattagcctacatctttcgcggattctgtagttttcccagctagagattagcagagcggcatgaataactcaaacacaggtgttgcagtttccgtcatcgaaattaaaggatatacatacatatctctttgttcctgcagcaagctgcaaagagaacgcttgttggtagaacaaagtatatgcccccatgacaccgagtccaagcagcaggctcgagcatgagctggagaagcccccacatccgcatgggctggatgcccatttcatgaggaggcttgtgagccggagctgggaggaatccaggctgctatggcgccttgccttcccggcgctcctgacggaggtgtttcagttctccatcggtttcgtcaccaccgccttcgttgggcacctcggagaggtggagctcgcggctgtcagcgtcgtggagaacatcttggattcctctgcctatggggtcctgtttggcatgggcagcgcgctggacacgctgagcgggcaggccgtcggcgccgggcagctggacaggctgggcacctacacgcagcagtcgtggatcatctgcggcgccaccgcgctggcgctggcgccggcgtacgccttcgccccgcggctcctgcactcgttcctccaccagcccgaccacgtgtcgcgcgccgccgggccgtacgcccgctgggcgatcccgaggctgttcgcgcacgccgtgaacataccgctcctcatgttcttccaggcccagagcaggatctgggccgtggcggccatctccggcgcggtcctcggcgtgcacgccgcgctcacctacgtcgccgtcacgaggctcgggtacggcatgcccggggccgccgtcgccggggacatctcccactggctcgtcgtcgccgcgcagttcgcctacatgaccggcggccgcttccccgacgcgtggaagggcttcaccgtgcgtgcgttcgacaacctcggcgccttcgtcaagctgtcgctcggcttggagttttggtactacaccacgcttctcgtcctcgtgggtctcctcaaacatggcaaactccaaatcgacatcatgtcagtctgcctcaacttcgagttcttgactgtaatggttgcgctgggcttcagcacagcaatcgggattagagtgtccaacgagctgggtgcaaacaggcccaaggaggcaaagtttgcagtgcttgtggcagtatcgacatccatgttcatgggagcagtctttatgtgcgtcgtcctcatctggaggacgagcctgccaaagctcttcagcgacagcgaggaggtgaaacgtggagcttccaagctggggcatctcctcgctctcaccgtatgcgtcagcagcatctggcctgtgctatcaggcgtggccgtaggagctgggtggcaagtgcgtgtggcgttcataaacgtcggttgctactacctagtgggcattccgatgggtatcctgcttgggttcaagctaaaacacggcacaatgggcatatggatgggcatgttgacaggcacgtttctccaaatgtcaatacttctcgccactatcttcacaacaaagtgggataaacaggccgcactggcagaagtgagaatggcggagtggggaggaaagaacgagaacctaacactgacggaaacaacacatacagatgatctgatggctcctgtgcaagagaaaatgttggcgaatgacagccagaagaatgtagaattagtgcgcatagattgatcacagagtatattcatttcagctcgagacagtatttcattgtttactaggatgatagtatgaatctattttttttataaataatctctccgttccaaactagctagtagtcgttttagttctagattttttttgtctatattcatatgggcgataacgaatttagacacatatagaacatgaatccaataaaatggtaaaacggattttaatttggtacgga

SEQ ID NO: 2480 - DNA, 1660 bp, Zea Mays
gaaaaatgtatgctgtgcgcgcacagccttttcttaaaaaaaggaaaaaagaggcacaataaatggcgtcaaagccacgggccttcgcgaaggtcttcctccccgcgctcccgccgccgcccctcctcactgcccccgtcttctcgcggtagccggccgacgaatcggggtgccggcgcggcggcgatgtcggctgcggcggcagcgccagcgcaggctccaaggaagtgggagggactagtggacgaggtgctcgagagggaggtgctggcagcgtgcctggaccaggcccccgagcgccgccgcatccgcgaggctttcaaggacgttcagctcagcatcgaccattgcctcttcaaggctttatgatttcccatgctatggatgatctctctcacttgcattcggattatgatgcagggacaatatagtggcatcagaacaaaggagtcatgtgagcataactctaggggtgtggagattttctcaaaatgctggtttccggagaatcgtcgaatgagagcaattgtttgtctttgccatggttatggagacacatgtaccttttttcttgatggagttgcgaggaagattgcttcagctggatatggagtatttgcactggactaccctggctttggtctttcagaaggacttcatggatatattccaagttttgatacacttgttgatgatgtagctgaacacttctctaaggtcaaaggaaatcctgaatatagaggcctaccgagctttctgtttggccaatctatgggtggagcagttgcattgaaggttcacttcaagcaaccaaatgaatggaatggtgcaatactggtggcaccgatgtgcaagatagcagacgatgtggttccaccttggcccattcagcaacttctaatttttatggccaaacttctgccaaaagaaaagcttgttcctcaaaaggatttagctgagttggcattcaaagagaagaagaaacaagagcagtgttctttcaatgtgattgcctacaaggataaaccacgtttgcgaacagctctggagatgctgagaacgacacaagagatagaaaggcgtctagaagaggtttctttgcccttgatcattttgcacggtgaggctgatatggttactgacccggcggttagtaaggctctgtatgagaaagccaagagccaagacaagaagctgtgcctctacaaaggtgcgtatcacgctatcttggaaggtgaaccggaccagacaatattccaagttctcgatgatatcatatcctggctcgatcagcattccacaaaagaaggtatatcgttgtgaatcaggcagcgctgttcaccaggattgggtgaattcctttggcaatgctgtatcgcttccggttggggatcccagattcaacggtggggattccatttttgatatgaccctgtaaaatttttagttcagattatcgatgtctccgtcatgtacctgaacgatgtagacgtacatatatgtaactgattaatgtgtatcaattgaccacgaattatttgggaaaacctcagttgcaaaacgccttttattttatcacaatttctatcctagagaggtgtctgaaagtgagatgaactagcaataaaggaggtgttctgatgaactagcgataatggag

SEQ ID NO: 2481 - DNA, 2146 bp, Zea Mays
gaaaaatgtatgctgtgcgcgcacagccttttcttaaaaaaaggaaaaaagaggcacaataaatggcgtcaaagccacgggccttcgcgaaggtcttcctccccgcgctcccgccgccgcccctcctcactgcccccgtcttctcgcgccggccgacgaatcggggtgccggcgcggcggcgatgtcggctgcggcggcagcgccagcgcaggctccaaggaagtgggagggactagtggacgaggtgctcgagagggaggtgctggcagcgtgcctggaccaggcccccgagcgccgccgcatccgcgaggctttcaaggacgttcagctcagcatcgaccattgcctcttcaaggctttatgatttcccatgctatggatgatctctctcacttgcattcggattatgatgcagggacaatatagtggcatcagaacaaaggaggtactatatcttaaactctatgatttcttcataataattagatccctcaacttctactgcaacacataaatttatttcatccatttctatacaaggttatttatgtcatactgcaacataaatttatttcatgcatttctgtacaaggttatttatgccatagagttgatcccttgttttctttctaatgagtgcacactgtacattggagaaatatttgaatgttttactctatgcaagtgaggtgtgttatttatttaattgaattgaagtattgaacgagtgctcaccgtgttgaaatattggatagttgcagtatttgttttttaaaaaagtaagtacagggcactgtaatgttgaaattcacatggcatgtccaatagtacattagtttctcctttgctttggtaggtgttttgctgtgagtgatgaaccttcaggagttggctattttatagatcatttttccttgtatggaagatattttcagtcatgtgagcataactctaggggtgtggagattttctcaaaatgctggtttccggagaatcgtcgaatgagagcaattgtttgtctttgccatggttatggagacacatgtaccttttttcttgatggagttgcgaggaagattgcttcagctggatatggagtatttgcactggactaccctggctttggtctttcagaaggacttcatggatatattccaagttttgatacacttgttgatgatgtagctgaacacttctctaaggtcaaaggaaatcctgaatatagaggcctaccgagctttctgtttggccaatctatgggtggagcagttgcattgaaggttcacttcaagcaaccaaatgaatggaatggtgcaatactggtggcaccgatgtgcaagatagcagacgatgtggttccaccttggcccattcagcaacttctaatttttatggccaaacttctgccaaaagaaaagcttgttcctcaaaaggatttagctgagttggcattcaaagagaagaagaaacaagagcagtgttctttcaatgtgattgcctacaaggataaaccacgtttgcgaacagctctggagatgctgagaacgacacaagagatagaaaggcgtctagaagaggtttctttgcccttgatcattttgcacggtgaggctgatatggttactgacccggcggttagtaaggctctgtatgagaaagccaagagccaagacaagaagctgtgcctctacaaaggtgcgtatcacgctatcttggaaggtgaaccggaccagacaatattccaagttctcgatgatatcatatcctggctcgatcagcattccacaaaagaaggtatatcgttgtgaatcaggcagcgctgttcaccaggattgggtgaattcctttggcaatgctgtatcgcttccggttggggatcccagattcaacggtggggattccatttttgatatgaccctgtaaaatttttagttcagattatcgatgtctccgtcatgtacctgaacgatgtagacgtacatatatgtaactgattaatgtgtatcaattgaccacgaattatttgggaaaacctcagttgcaaaacgccttttattttatcacaatttctatcctagagaggtgtctgaaagtgagatgaactagcaataaaggaggtgttctgatgaactagcgataatggag

SEQ ID NO: 2482 - DNA, 2606 bp, Zea Mays
gaaaaatgtatgctgtgcgcgcacagccttttcttaaaaaaaggaaaaaagaggcacaataaatggcgtcaaagccacgggccttcgcgaaggtcttcctccccgcgctcccgccgccgcccctcctcactgcccccgtcttctcgcgccggccgacgaatcggggtgccggcgcggcggcgatgtcggctgcggcggcagcgccagcgcaggctccaaggaagtgggagggactagtggacgaggtgctcgagagggaggtgctggcagcgtgcctggaccaggcccccgagcgccgccgcatccgcgaggctttcaaggacgttcagctcagcatcgaccattgcctcttcaaggtcaacccctccccctattttgcctatttgcttaaaatccagttaaaggtgccactttttctcgtgttccagaaattatgttcgttcttattatcggttcttcatatttagtgacgtgccaggataggattggttgggcaagataatacaagtactgttttcgtgcgttattgtctactagttgagagaatagactaacaagatgcaatagaaacctgtgtttataataaaatgtttcgttttgtgaaccacaaacttctggccttcatctaaaagatgtctaggcaaagcatgtgttatcaattggttggaagtatgggtgggtactagtaatactgtacaatattattattttttggctttttaatctccagtgcaatggtttttgtagaatataaataaactctgctataatatattttttcaatcatctcacttcaaatgatggcatagaaaacaggctttatgatttcccatgctatggatgatctctctcacttgcattcggattatgatgcagggacaatatagtggcatcagaacaaaggaggtactatatcttaaactctatgatttcttcataataattagatccctcaacttctactgcaacacataaatttatttcatccatttctatacaaggttatttatgtcatactgcaacataaatttatttcatgcatttctgtacaaggttatttatgccatagagttgatcccttgttttctttctaatgagtgcacactgtacattggagaaatatttgaatgttttactctatgcaagtgaggtgtgttatttatttaattgaattgaagtattgaacgagtgctcaccgtgttgaaatattggatagttgcagtatttgttttttaaaaaagtaagtacagggcactgtaatgttgaaattcacatggcatgtccaatagtacattagtttctcctttgctttggtaggtgttttgctgtgagtgatgaaccttcaggagttggctattttatagatcatttttccttgtatggaagatattttcagtcatgtgagcataactctaggggtgtggagattttctcaaaatgctggtttccggagaatcgtcgaatgagagcaattgtttgtctttgccatggttatggagacacatgtaccttttttcttgatggagttgcgaggaagattgcttcagctggatatggagtatttgcactggactaccctggctttggtctttcagaaggacttcatggatatattccaagttttgatacacttgttgatgatgtagctgaacacttctctaaggtcaaaggaaatcctgaatatagaggcctaccgagctttctgtttggccaatctatgggtggagcagttgcattgaaggttcacttcaagcaaccaaatgaatggaatggtgcaatactggtggcaccgatgtgcaagatagcagacgatgtggttccaccttggcccattcagcaacttctaatttttatggccaaacttctgccaaaagaaaagcttgttcctcaaaaggatttagctgagttggcattcaaagagaagaagaaacaagagcagtgttctttcaatgtgattgcctacaaggataaaccacgtttgcgaacagctctggagatgctgagaacgacacaagagatagaaaggcgtctagaagaggtttctttgcccttgatcattttgcacggtgaggctgatatggttactgacccggcggttagtaaggctctgtatgagaaagccaagagccaagacaagaagctgtgcctctacaaaggtgcgtatcacgctatcttggaaggtgaaccggaccagacaatattccaagttctcgatgatatcatatcctggctcgatcagcattccacaaaagaaggtatatcgttgtgaatcaggcagcgctgttcaccaggattgggtgaattcctttggcaatgctgtatcgcttccggttggggatcccagattcaacggtggggattccatttttgatatgaccctgtaaaatttttagttcagattatcgatgtctccgtcatgtacctgaacgatgtagacgtacatatatgtaactgattaatgtgtatcaattgaccacgaattatttgggaaaacctcagttgcaaaacgccttttattttatcacaatttctatcctagagaggtgtctgaaagtgagatgaactagcaataaaggaggtgttctgatgaactagcgataatggag

SEQ ID NO: 2483 - DNA, 2610 bp, Zea Mays
gaaaaatgtatgctgtgcgcgcacagccttttcttaaaaaaaggaaaaaagaggcacaataaatggcgtcaaagccacgggccttcgcgaaggtcttcctccccgcgctcccgccgccgcccctcctcactgcccccgtcttctcgcggtagccggccgacgaatcggggtgccggcgcggcggcgatgtcggctgcggcggcagcgccagcgcaggctccaaggaagtgggagggactagtggacgaggtgctcgagagggaggtgctggcagcgtgcctggaccaggcccccgagcgccgccgcatccgcgaggctttcaaggacgttcagctcagcatcgaccattgcctcttcaaggtcaacccctccccctattttgcctatttgcttaaaatccagttaaaggtgccactttttctcgtgttccagaaattatgttcgttcttattatcggttcttcatatttagtgacgtgccaggataggattggttgggcaagataatacaagtactgttttcgtgcgttattgtctactagttgagagaatagactaacaagatgcaatagaaacctgtgtttataataaaatgtttcgttttgtgaaccacaaacttctggccttcatctaaaagatgtctaggcaaagcatgtgttatcaattggttggaagtatgggtgggtactagtaatactgtacaatattattattttttggctttttaatctccagtgcaatggtttttgtagaatataaataaactctgctataatatattttttcaatcatctcacttcaaatgatggcatagaaaacaggctttatgatttcccatgctatggatgatctctctcacttgcattcggattatgatgcagggacaatatagtggcatcagaacaaaggaggtactatatcttaaactctatgatttcttcataataattagatccctcaacttctactgcaacacataaatttatttcatccatttctatacaaggttatttatgtcatactgcaacataaatttatttcatgcatttctgtacaaggttatttatgccatagagttgatcccttgttttctttctaatgagtgcacactgtacattggagaaatatttgaatgttttactctatgcaagtgaggtgtgttatttatttaattgaattgaagtattgaacgagtgctcaccgtgttgaaatattggatagttgcagtatttgttttttaaaaaagtaagtacagggcactgtaatgttgaaattcacatggcatgtccaatagtacattagtttctcctttgctttggtaggtgttttgctgtgagtgatgaaccttcaggagttggctattttatagatcatttttccttgtatggaagatattttcagtcatgtgagcataactctaggggtgtggagattttctcaaaatgctggtttccggagaatcgtcgaatgagagcaattgtttgtctttgccatggttatggagacacatgtaccttttttcttgatggagttgcgaggaagattgcttcagctggatatggagtatttgcactggactaccctggctttggtctttcagaaggacttcatggatatattccaagttttgatacacttgttgatgatgtagctgaacacttctctaaggtcaaaggaaatcctgaatatagaggcctaccgagctttctgtttggccaatctatgggtggagcagttgcattgaaggttcacttcaagcaaccaaatgaatggaatggtgcaatactggtggcaccgatgtgcaagatagcagacgatgtggttccaccttggcccattcagcaacttctaatttttatggccaaacttctgccaaaagaaaagcttgttcctcaaaaggatttagctgagttggcattcaaagagaagaagaaacaagagcagtgttctttcaatgtgattgcctacaaggataaaccacgtttgcgaacagctctggagatgctgagaacgacacaagagatagaaaggcgtctagaagaggtttctttgcccttgatcattttgcacggtgaggctgatatggttactgacccggcggttagtaaggctctgtatgagaaagccaagagccaagacaagaagctgtgcctctacaaaggtgcgtatcacgctatcttggaaggtgaaccggaccagacaatattccaagttctcgatgatatcatatcctggctcgatcagcattccacaaaagaaggtatatcgttgtgaatcaggcagcgctgttcaccaggattgggtgaattcctttggcaatgctgtatcgcttccggttggggatcccagattcaacggtggggattccatttttgatatgaccctgtaaaatttttagttcagattatcgatgtctccgtcatgtacctgaacgatgtagacgtacatatatgtaactgattaatgtgtatcaattgaccacgaattatttgggaaaacctcagttgcaaaacgccttttattttatcacaatttctatcctagagaggtgtctgaaagtgagatgaactagcaataaaggaggtgttctgatgaactagcgataatggag

SEQ ID NO: 2484 - DNA, 1188 bp, Zea Mays
gcttttcctctttgatgccacttatcctaaggagttgcgaggaagattgcttcagctggatatggagtatttgcactggactaccctggctttggtctttcagaaggacttcatggatatattccaagttttgatacacttgttgatgatgtagctgaacacttctctaaggtcaaaggaaatcctgaatatagaggcctaccgagctttctgtttggccaatctatgggtggagcagttgcattgaaggttcacttcaagcaaccaaatgaatggaatggtgcaatactggtggcaccgatgtgcaaggtagttttgtctttgtggaatattatatatacaagttaatgccttcccacttattcacaaactcattccaatagatagcagacgatgtggttccaccttggcccattcagcaacttctaatttttatggccaaacttctgccaaaagaaaagcttgttcctcaaaaggatttagctgagttggcattcaaagagaagaagaaacaagagcagtgttctttcaatgtgattgcctacaaggataaaccacgtttgcgaacagctctggagatgctgagaacgacacaagagatagaaaggcgtctagaagaggtttctttgcccttgatcattttgcacggtgaggctgatatggttactgacccggcggttagtaaggctctgtatgagaaagccaagagccaagacaagaagctgtgcctctacaaaggtgcgtatcacgctatcttggaaggtgaaccggaccagacaatattccaagttctcgatgatatcatatcctggctcgatcagcattccacaaaagaaggtatatcgttgtgaatcaggcagcgctgttcaccaggattgggtgaattcctttggcaatgctgtatcgcttccggttggggatcccagattcaacggtggggattccatttttgatatgaccctgtaaaatttttagttcagattatcgatgtctccgtcatgtacctgaacgatgtagacgtacatatatgtaactgattaatgtgtatcaattgaccacgaattatttgggaaaacctcagttgcaaaacgccttttattttatcacaatttctatcctagagaggtgtctgaaagtgagatgaactagcaataaaggaggtgttctgatgaactagcgataatggag

SEQ ID NO: 2485 - DNA, 974 bp, Zea Mays
ttttcctctttgatgccacttatcctaaggagttgcgaggaagattgcttcagctggatatggagtatttgcactggactaccctggctttggtctttcagaaggacttcatggatatattccaagttttgatacacttgttgatgatgtagctgaacacttctctaaggtcaaaggaaatcctgaatatagaggcctaccgagctttctgtttggccaatctatgggtggagcagttgcattgaaggttcacttcaagcaaccaaatgaatggaatggtgcaatactggtggcaccgatgtgcaagtgttctttcaatgtgattgcctacaaggataaaccacgtttgcgaacagctctggagatgctgagaacgacacaagagatagaaaggcgtctagaagaggtttctttgcccttgatcattttgcacggtgaggctgatatggttactgacccggcggttagtaaggctctgtatgagaaagccaagagccaagacaagaagctgtgcctctacaaaggtgcgtatcacgctatcttggaaggtgaaccggaccagacaatattccaagttctcgatgatatcatatcctggctcgatcagcattccacaaaagaaggtatatcgttgtgaatcaggcagcgctgttcaccaggattgggtgaattcctttggcaatgctgtatcgcttccggttggggatcccagattcaacggtggggattccatttttgatatgaccctgtaaaatttttagttcagattatcgatgtctccgtcatgtacctgaacgatgtagacgtacatatatgtaactgattaatgtgtatcaattgaccacgaattatttgggaaaacctcagttgcaaaacgccttttattttatcacaatttctatcctagagaggtgtctgaaagtgagatgaactagcaataaaggaggtgttctgatgaactagcgataatggag

SEQ ID NO: 2486 - DNA, 695 bp, Zea Mays
ttcacactgtattctctggaactaaaattgttctttcaatgtgattgcctacaaggataaaccacgtttgcgaacagctctggagatgctgagaacgacacaagagatagaaaggcgtctagaagaggtttctttgcccttgatcattttgcacggtgaggctgatatggttactgacccggcggttagtaaggctctgtatgagaaagccaagagccaagacaagaagctgtgcctctacaaaggtgcgtatcacgctatcttggaaggtgaaccggaccagacaatattccaagttctcgatgatatcatatcctggctcgatcagcattccacaaaagaaggtatatcgttgtgaatcaggcagcgctgttcaccaggattgggtgaattcctttggcaatgctgtatcgcttccggttggggatcccagattcaacggtggggattccatttttgatatgaccctgtaaaatttttagttcagattatcgatgtctccgtcatgtacctgaacgatgtagacgtacatatatgtaactgattaatgtgtatcaattgaccacgaattatttgggaaaacctcagttgcaaaacgccttttattttatcacaatttctatcctagagaggtgtctgaaagtgagatgaactagcaataaaggaggtgttctgatgaactagcgataatggag

SEQ ID NO: 2487 - DNA, 807 bp, Zea Mays
ttgaagccgcggtatcgcgctgttgggtgggcctgggttgtcagtccctgccccaaccatctcgccgtcaatggcggaactgcgtcgcgatctcgggagtctgttgctcattcccgggccgccctgctcctatataaggtgccatgatcccgagtcaaccctgcttccacccccgcgaacctcgctgtgcaattacggtcgtattgagagaaattcgagagagggcgcttgtgcaccgggaccgccgtccctgcacacgcgattcatcggcgctccgaccgagaagccagccaggcgatttttcaccgccatgcaccgagcctgggtgtagcagagttgggctcgggggaaagcatttggacaccggggacactcaccggtgtcgggcggatccgaccaacccacacctcgccgggggcaaacgtaacctaggctccagcaccgacgagcaagggattgagaacccaggtgttcagcaggtagaagttgctgagcaggagctcattgaaggcaagttgtgtccttgaccacttttatttacccaataatgttctctataatcattttggcatgcataggcttaattttgatgggacccaataggtcaccctagtttggtcatctttacaccttatttatccttgaacttttgggtagtctttgctattgctatatatggttttggatgttgagataactattacacatgtcattctttattattattgttctatttttgttcatgataagactattatgttaattggaacatggagcttaacttgagaaacacgtgccaccacaagg

SEQ ID NO: 2488 - DNA, 6431 bp, Zea Mays
gtccagtcggtcacctccgcgtcgaccgcagcgcggcccgcgggcagatcatgttacgttaccgcgtgcgctgcctaggaccccaccccaccaccaaaaaccacgcgccgcggcggcggcagcgccagtgagataatagacacaggagtgctggaagcatttcaccctgcctccgcgaatcaacaccccaccggccaccctctcgactcgcttcaggggccaagccagtgtcgcttttgaatccgcctccgttcggttttccccaaaacgccttccttccactactgcttggcatccttggattcgtaggcagtcagatcacgcggcgcgcctcccctggtgactgacctagggctcgccgcgagcgcgcggcgatggcgtcgtccacgtccaggcgccggaggggtgggggcctcgagcgggtggcggacaactgggagcgcctcgtgcgggccgcgctcaagcgggaccgggaccacctccgcgtggggggagccccggctgccgtgggagggcagaggcttgccgacgccgtgccggcctcgctgggtcggaccaccaacatagagcagatcctgcaggccgccgacgacatcgaggtcgaggaccccaacgtcgcgcggatcctttgtgaacaagcgtacacgatggcccagaatctggatcccagcagtgaaggtagaggggttcttcagttcaagacaggtttggcatctgtaattaagcaaaaacttgctaagaaggatggggctccgatagaccgacagaatgacgttcaagtcctgtggaacttttatcttgaatacaagagtcgttgtcgggttgatgatatgcaacgtgagcaggagagactgagagagtcaggaacctttagtacagagatgggaaatagggcaatgaaaatgaagaaagtttttgctacattgagggctttgcttgatgttctggaaaatcttgttggtcagtcaccaactgatagacttcatagacaaattctggaggagataaagagaataaaaagatctgatgcagccttgagaggtgaacttatgccatacaacattgtaccccttgatacatcatcgtcagtggcaaatatttttgggtttttccctgaggtcattgctgcaacagcagcaattcagaactgtgaggacctgccacgattcccttttgatacaccccagctaagacaaaaagacattttcgaccttttgcaatatgtttttggcttccaggaagataatattcggaaccagcgtgaaaatgttgtacttatgttagccaatgctcagtcccggttaagcctgcaaattgggtcagaacccaaaattgatgagatggctgttactgatgttttttgcaaagtcctggacaactacataaaatggtgtaggtacttgggcaggcgtgttgcatggaccagccttgaagcagtaaataagaaccggaaaatcatattggttgccctctactttctgatttggggtgaagcagcgaatattcgttttctcccagaatgcatatgctatattttccacaatatggcaaaggaactcgatgggattcttgattcatctgttgctgagactgcaaagagttgcactactgagggttccacttcatttcttgagaaaataattacaccaatttatgataccatggcagcggaggctgaaaataataaagatggaaaagctgcacattctgcttggaggaattatgatgacttcaatgaatatttctggtcacgctcatgctttgagcttggttggccacctgcagagggttccaaatttttgcgcaagcctgctaagaggaaacgtacaggaaagaccaattttgttgaacatcgcacttttctgcatttgtaccgcagtttccaccgcttgtggatttttctgctattaatgttccagctcttagctattattgcctttcaccatgggaagatggacattgacaccattagaatactacttagcgctgggccagccttttttgtactaaacttcattgaatgctgcttggatgtcatactcatgtttggtgcatataagacggcaagaggttttgctatctcaagattagttattcgatttctttggttaactgcagtttcaacatttgtaacctatctctatgtgaaagtcctggaagagagagacacaaggaattcagattcgacttatttccgaatttatggtcttgttcttggtggttatgctgctgttcgaatcatgtttgcactgatggctaagatcccagcttgtcataggctctcaagtttttctgatcggtctcagtttttccaatttttcaagtggatataccaggagcgatattatgttgggcggggactttatgagagtattagtgattatgccagatacgtgatattttgggtcgtcatactggcatgcaaatttacttttgcatattttctccagattaggcctttagttgaaccaaccaatattattgtgcaactccatgatttgaagtattcctggcatgatcttgtatcaagggggaataaaaatgctttgaccattctgagcctatgggcaccagtcttagctatatacctgatggacatccacatttggtacactcttttatcagcacttgttggtggcgttatgggtgccagagatcgccttggagagattcggtcaattgaaatgcttcataaacgttttgagagctttccagaagcgtttgctaaaaacctttccgcttcaaggatacctagcagacgcattgatcgtgtaaatgaatcagaaattacaactaagacgtatgcctcaatattttccccattttggaatgaaattatcaagagcttgcgtgaagaggactatatcagcaacagggaaatggatctgcttatgatgccaagtaactgtggaaatttaatgcttgtacagtggccactgtttctattgactagcaagatcatgttggcaaatgactatgcttctgactgtaaagactcgcagtatgagctatgggatagaatatcaaaagatgaatacatggcttatgccgtcaaagaatgttactacagcactgaaaaaattcttcactctttagttgatgctgaagggcagcactgggttgtaaggcttttccgagatcttaatgacagtatagcacagggttcacttttagtgactataaatctgaagaagttgcagttagtccagtctagattgacgggcttgaccggtcttctgatacgcgatgagactgctggccgtgcagctggtgttactaaagctcttcttgagctttatgaggttgttacccatgaatttctttcacagaatctgagggaacagtttgacacgtggcaactgttgttaagagccagaaatgatggacgcctattctctaagattttgtggccaaaggatccagaaatgaaagagcaacttaagcgattacacttacttcttactgtcaaggacagtgccaccaacataccaaaaaatcttgaagctcggagaagattacaatttttcactaattctctattcatggacattccacaagcaaagcctgtatctgagatgatcccttttagtgtctttaccccatactacagtgaaacagttctttatagcatgtctgagctttgtgttgagaatgaagatggcatttctatacttttctaccttcagaaaatataccctgatgagtgggctaacttcttagaacgaattggctgtggtgaatcatcagaagatgattttaaagaaagtccaagtgacaccatggaactccggttttgggtatcttatcgtggccaaactttggccaggacagtgcgtggaatgatgtactatagaagagctttgatgttacaaagttacctggagaggagatgccttgggggtattgaagatggaaattctgcagcagaatatattgacactcaaggctatgagttatctcctgatgcacgggcccaagcagatataaaatttacttatgttgtttcttgccaaatatatggactacagaagcaaacaaaaaaacaagaggctgcagatattgctctcctactgcaaagaaatgaggctcttcgggttgctttcatacacgaagaggaaatcatatcaagggatggtaaggctacaacaagagagtattattccaagcttgtgaaggctgatgttcatggcaaagaccaagaaatatactgcattaaattgcctgggaaccccaagcttggtgaaggcaaacctgagaaccaaaaccatgccataatcttcactcgaggagatgcagttcagacgatcgatatgaatcaggataactacttggaggaagcaatgaaaatgagaaatttacttgaagaatttcataatgctcatggaaaacatggcatacggaagcccacaatcctaggtgtgagggagcatgtattcacggggagtgtctcttcgctggcgtcatttatgtcgaaacaggagactagttttgttactttggggcaacgtgttcttgcttacctcaaagttcgaatgcactatggacatcctgatgtttttgatcggatatttcacataacccgaggtggcattagcaaggcgtctcgagtgattaatataagcgaagatatatatgccgggttcaattcgactttgcgccaagggaacatcacacaccatgaatatatccaggtggggaaagggcgtgatgttggcttgaaccaaattgcactatttgaggggaaagttgctggaggcaatggtgagcaagttctcagccgagatgtgtaccgtctgggccagttatttgatttcttcaggatgctaaccttctttttcaccactgttggttattatgtctgcacgatgatgactgttctaactgtgtatatcttcttgtatggaagggtttatctggcactctctggccttgactactcaatatctcgccaagctaggtttttggggaacactgcactagatgcagctttgaatgctcaatttttggtccagattggtatttttacagcagtgccgatgataatgggtttcattctggagctggggctgatgaaggctgtttttagttttattacaatgcagctccagttctgttcggtgtttttcaccttttcgcttggaacaaggacacattactttggtagaacaatccttcatggcggtgcaaagtatcgtgctactggaagaggttttgttgttcggcacataaagtttgctgaaaattataggctctattctcgaagtcactttgtcaaagcgcttgaggttgctctcctcctgatcgtttacattgcatatggatacacaaaaggcggttcatcttcatttattctgattactatcagtagttggttcctcgttatgtcctggcttttcgcgccttacattttcaacccttctggtttcgagtggcaaaagactgttgaggactttgatgactggacaaactggttactttataaaggtggagttggtgtaaagggcgacaacagttgggaatcttggtgggatgaggagcaggcgcatatccagacattcagaggacgtattcttgagacaatcctcagccttagatttctcatgtttcagtatggcattgtgtacaagcttaaaattacagatcataatacttctcttgcagtttacggcttctcatggattgtactctttgttatggttcttcttttcaagctttttactgcaactcctaggaagtcgacagccttgccgacttttgttaggtttctgcagggcgtccttgctattgggataattgcaggaattgcccttcttatcgtgctcacatcattcactgttgctgatttatttgcaagtgcacttgcttttatagcaaccggctggtgtgtcttgtgtctggccgtaacatggaagagggtagtgaaagtccttgggctatgggattcagtccgtgagattgcaaggatgtacgatgcaggaatgggagccatcatctttgtgcccatcgtcgtcttctcatggttccccttcgtgtcaacattccagtcacgtttcctcttcaatcaagcgtttagtcgaggtctggagatctccctcatccttgcagggaacaaggcgaatcagcagatttgaaaggccctgccgcatccatcgtatttttctgttgtatattctgggaattactgagagctgcttagttagtttgaacaatttaatgagctcgatttgaatgacaaccttctacataattgcccctgtaatttgtacactaattatgcggagaggcagctacggcagtagagatgagctgatgtatgtcgatttgatcttaaccaaacctctctttaaggctacgacggttcagtaggcctgcactagtatgttgcacccatccacagatataaaaagaaaaatattcttaatataaaataa

SEQ ID NO: 2489 - DNA, 6341 bp, Zea Mays
gcgccagtgagataatagacacaggagtgctggaagcatttcaccctgcctccgcgaatcaacaccccaccggccaccctctcgactcgcttcaggggccaagccagtgtcgcttttgaatccgcctccgttcggttttccccaaaacgccttccttccactactgcttggcatccttggattcgtaggcagtcagatcacgcggcgcgcctcccctggtgactgacctagggctcgccgcgagcgcgcggcgatggcgtcgtccacgtccaggcgccggaggggtgggggcctcgagcgggtggcggacaactgggagcgcctcgtgcgggccgcgctcaagcgggaccgggaccacctccgcgtggggggagccccggctgccgtgggagggcagaggcttgccgacgccgtgccggcctcgctgggtcggaccaccaacatagagcagatcctgcaggccgccgacgacatcgaggtcgaggaccccaacgtcgcgcggatcctttgtgaacaagcgtacacgatggcccagaatctggatcccagcagtgaaggtagaggggttcttcagttcaagacaggtttggcatctgtaattaagcaaaaacttgctaagaaggatggggctccgatagaccgacagaatgacgttcaagtcctgtggaacttttatcttgaatacaagagtcgttgtcgggttgatgatatgcaacgtgagcaggagagactgagagagtcaggaacctttagtacagagatgggaaatagggcaatgaaaatgaagaaagtttttgctacattgagggctttgcttgatgttctggaaaatcttgttggtcagtcaccaactgatagacttcatagacaaattctggaggagataaagagaataaaaagatctgatgcagccttgagaggtgaacttatgccatacaacattgtaccccttgatacatcatcgtcagtggcaaatatttttgggtttttccctgaggtcattgctgcaacagcagcaattcagaactgtgaggacctgccacgattcccttttgatacaccccagctaagacaaaaagacattttcgaccttttgcaatatgtttttggcttccaggaagataatattcggaaccagcgtgaaaatgttgtacttatgttagccaatgctcagtcccggttaagcctgcaaattgggtcagaacccaaaattgatgagatggctgttactgatgttttttgcaaagtcctggacaactacataaaatggtgtaggtacttgggcaggcgtgttgcatggaccagccttgaagcagtaaataagaaccggaaaatcatattggttgccctctactttctgatttggggtgaagcagcgaatattcgttttctcccagaatgcatatgctatattttccacaatatggcaaaggaactcgatgggattcttgattcatctgttgctgagactgcaaagagttgcactactgagggttccacttcatttcttgagaaaataattacaccaatttatgataccatggcagcggaggctgaaaataataaagatggaaaagctgcacattctgcttggaggaattatgatgacttcaatgaatatttctggtcacgctcatgctttgagcttggttggccacctgcagagggttccaaatttttgcgcaagcctgctaagaggaaacgttttccaccgcttgtggatttttctgctattaatgttccagctcttagctattattgcctttcaccatgggaagatggacattgacaccattagaatactacttagcgctgggccagccttttttgtactaaacttcattgaatgctgcttggatgtcatactcatgtttggtgcatataagacggcaagaggttttgctatctcaagattagttattcgatttctttggttaactgcagtttcaacatttgtaacctatctctatgtgaaagtcctggaagagagagacacaaggaattcagattcgacttatttccgaatttatggtcttgttcttggtggttatgctgctgttcgaatcatgtttgcactgatggctaagatcccagcttgtcataggctctcaagtttttctgatcggtctcagtttttccaatttttcaagtggatataccaggagcgatattatgttgggcggggactttatgagagtattagtgattatgccagatacgtgatattttgggtcgtcatactggcatgcaaatttacttttgcatattttctccagattaggcctttagttgaaccaaccaatattattgtgcaactccatgatttgaagtattcctggcatgatcttgtatcaagggggaataaaaatgctttgaccattctgagcctatgggcaccagtcttagctatatacctgatggacatccacatttggtacactcttttatcagcacttgttggtggcgttatgggtgccagagatcgccttggagagattcggtcaattgaaatgcttcataaacgttttgagagctttccagaagcgtttgctaaaaacctttccgcttcaaggatacctagcagacgcattgatcgtgtaaatgaatcagaaattacaactaagacgtatgcctcaatattttccccattttggaatgaaattatcaagagcttgcgtgaagaggactatatcagcaacaggtgtggcagaaaataataatacattatacagtattatcttatatgtgacttctttgcttcagtattgggtgaatttctttccagggaaatggatctgcttatgatgccaagtaactgtggaaatttaatgcttgtacagtggccactgtttctattgactagcaagatcatgttggcaaatgactatgcttctgactgtaaagactcgcagtatgagctatgggatagaatatcaaaagatgaatacatggcttatgccgtcaaagaatgttactacagcactgaaaaaattcttcactctttagttgatgctgaagggcagcactgggttgtaaggcttttccgagatcttaatgacagtatagcacagggttcacttttagtgactataaatctgaagaagttgcagttagtccagtctagattgacgggcttgaccggtcttctgatacgcgatgagactgctggccgtgcagctggtgttactaaagctcttcttgagctttatgaggttgttacccatgaatttctttcacagaatctgagggaacagtttgacacgtggcaactgttgttaagagccagaaatgatggacgcctattctctaagattttgtggccaaaggatccagaaatgaaagagcaacttaagcgattacacttacttcttactgtcaaggacagtgccaccaacataccaaaaaatcttgaagctcggagaagattacaatttttcactaattctctattcatggacattccacaagcaaagcctgtatctgagatgatcccttttagtgtctttaccccatactacagtgaaacagttctttatagcatgtctgagctttgtgttgagaatgaagatggcatttctatacttttctaccttcagaaaatataccctgatgagtgggctaacttcttagaacgaattggctgtggtgaatcatcagaagatgattttaaagaaagtccaagtgacaccatggaactccggttttgggtatcttatcgtggccaaactttggccaggacagtgcgtggaatgatgtactatagaagagctttgatgttacaaagttacctggagaggagatgccttgggggtattgaagatggaaattctgcagcagaatatattgacactcaaggctatgagttatctcctgatgcacgggcccaagcagatataaaatttacttatgttgtttcttgccaaatatatggactacagaagcaaacaaaaaaacaagaggctgcagatattgctctcctactgcaaagaaatgaggctcttcgggttgctttcatacacgaagaggaaatcatatcaagggatggtaaggctacaacaagagagtattattccaagcttgtgaaggctgatgttcatggcaaagaccaagaaatatactgcattaaattgcctgggaaccccaagcttggtgaaggcaaacctgagaaccaaaaccatgccataatcttcactcgaggagatgcagttcagacgatcgatatgaatcaggataactacttggaggaagcaatgaaaatgagaaatttacttgaagaatttcataatgctcatggaaaacatggcatacggaagcccacaatcctaggtgtgagggagcatgtattcacggggagtgtctcttcgctggcgtcatttatgtcgaaacaggagactagttttgttactttggggcaacgtgttcttgcttacctcaaagttcgaatgcactatggacatcctgatgtttttgatcggatatttcacataacccgaggtggcattagcaaggcgtctcgagtgattaatataagcgaagatatatatgccgggttcaattcgactttgcgccaagggaacatcacacaccatgaatatatccaggtggggaaagggcgtgatgttggcttgaaccaaattgcactatttgaggggaaagttgctggaggcaatggtgagcaagttctcagccgagatgtgtaccgtctgggccagttatttgatttcttcaggatgctaaccttctttttcaccactgttggttattatgtctgcacgatgatgactgttctaactgtgtatatcttcttgtatggaagggtttatctggcactctctggccttgactactcaatatctcgccaagctaggtttttggggaacactgcactagatgcagctttgaatgctcaatttttggtccagattggtatttttacagcagtgccgatgataatgggtttcattctggagctggggctgatgaaggctgtttttagttttattacaatgcagctccagttctgttcggtgtttttcaccttttcgcttggaacaaggacacattactttggtagaacaatccttcatggcggtgcaaagtatcgtgctactggaagaggttttgttgttcggcacataaagtttgctgaaaattataggctctattctcgaagtcactttgtcaaagcgcttgaggttgctctcctcctgatcgtttacattgcatatggatacacaaaaggcggttcatcttcatttattctgattactatcagtagttggttcctcgttatgtcctggcttttcgcgccttacattttcaacccttctggtttcgagtggcaaaagactgttgaggactttgatgactggacaaactggttactttataaaggtggagttggtgtaaagggcgacaacagttgggaatcttggtgggatgaggagcaggcgcatatccagacattcagaggacgtattcttgagacaatcctcagccttagatttctcatgtttcagtatggcattgtgtacaagcttaaaattacagatcataatacttctcttgcagtttacggcttctcatggattgtactctttgttatggttcttcttttcaagctttttactgcaactcctaggaagtcgacagccttgccgacttttgttaggtttctgcagggcgtccttgctattgggataattgcaggaattgcccttcttatcgtgctcacatcattcactgttgctgatttatttgcaagtgcacttgcttttatagcaaccggctggtgtgtcttgtgtctggccgtaacatggaagagggtagtgaaagtccttgggctatgggattcagtccgtgagattgcaaggatgtacgatgcaggaatgggagccatcatctttgtgcccatcgtcgtcttctcatggttccccttcgtgtcaacattccagtcacgtttcctcttcaatcaagcgtttagtcgaggtctggagatctccctcatccttgcagggaacaaggcgaatcagcagatttgaaaggccctgccgcatccatcgtatttttctgttgtatattctgggaattactgagagctgcttagttagtttgaacaatttaatgagctcgatttgaatgacaaccttctacataattgcccctgtaatttgtacactaattatgcggagaggcagctacggcagtagagatgagctgatgtatgtcgatttgatcttaaccaaacctctctttaaggctacgacggttcagtaggcctgcactagtatgttgcacccatccacagatataaaaagaaaaatattcttaatataaaataa

SEQ ID NO: 2490 - DNA, 6304 bp, Zea Mays
gcgccagtgagataatagacacaggagtgctggaagcatttcaccctgcctccgcgaatcaacaccccaccggccaccctctcgactcgcttcaggggccaagccagtgtcgcttttgaatccgcctccgttcggttttccccaaaacgccttccttccactactgcttggcatccttggattcgtaggcagtcagatcacgcggcgcgcctcccctggtgactgacctagggctcgccgcgagcgcgcggcgatggcgtcgtccacgtccaggcgccggaggggtgggggcctcgagcgggtggcggacaactgggagcgcctcgtgcgggccgcgctcaagcgggaccgggaccacctccgcgtggggggagccccggctgccgtgggagggcagaggcttgccgacgccgtgccggcctcgctgggtcggaccaccaacatagagcagatcctgcaggccgccgacgacatcgaggtcgaggaccccaacgtcgcgcggatcctttgtgaacaagcgtacacgatggcccagaatctggatcccagcagtgaaggtagaggggttcttcagttcaagacaggtttggcatctgtaattaagcaaaaacttgctaagaaggatggggctccgatagaccgacagaatgacgttcaagtcctgtggaacttttatcttgaatacaagagtcgttgtcgggttgatgatatgcaacgtgagcaggagagactgagagagtcaggaacctttagtacagagatgggaaatagggcaatgaaaatgaagaaagtttttgctacattgagggctttgcttgatgttctggaaaatcttgttggtcagtcaccaactgatagacttcatagacaaattctggaggagataaagagaataaaaagatctgatgcagccttgagaggtgaacttatgccatacaacattgtaccccttgatacatcatcgtcagtggcaaatatttttgggtttttccctgaggtcattgctgcaacagcagcaattcagaactgtgaggacctgccacgattcccttttgatacaccccagctaagacaaaaagacattttcgaccttttgcaatatgtttttggcttccaggaagataatattcggaaccagcgtgaaaatgttgtacttatgttagccaatgctcagtcccggttaagcctgcaaattgggtcagaacccaaaattgatgagatggctgttactgatgttttttgcaaagtcctggacaactacataaaatggtgtaggtacttgggcaggcgtgttgcatggaccagccttgaagcagtaaataagaaccggaaaatcatattggttgccctctactttctgatttggggtgaagcagcgaatattcgttttctcccagaatgcatatgctatattttccacaatatggcaaaggaactcgatgggattcttgattcatctgttgctgagactgcaaagagttgcactactgagggttccacttcatttcttgagaaaataattacaccaatttatgataccatggcagcggaggctgaaaataataaagatggaaaagctgcacattctgcttggaggaattatgatgacttcaatgaatatttctggtcacgctcatgctttgagcttggttggccacctgcagagggttccaaatttttgcgcaagcctgctaagaggaaacgtacaggaaagaccaattttgttgaacatcgcacttttctgcatttgtaccgcagtttccaccgcttgtggatttttctgctattaatgttccagctcttagctattattgcctttcaccatgggaagatggacattgacaccattagaatactacttagcgctgggccagccttttttgtactaaacttcattgaatgctgcttggatgtcatactcatgtttggtgcatataagacggcaagaggttttgctatctcaagattagttattcgatttctttggttaactgcagtttcaacatttgtaacctatctctatgtgaaagtcctggaagagagagacacaaggaattcagattcgacttatttccgaatttatggtcttgttcttggtggttatgctgctgttcgaatcatgtttgcactgatggctaagatcccagcttgtcataggctctcaagtttttctgatcggtctcagtttttccaatttttcaagtggatataccaggagcgatattatgttgggcggggactttatgagagtattagtgattatgccagatacgtgatattttgggtcgtcatactggcatgcaaatttacttttgcatattttctccagattaggcctttagttgaaccaaccaatattattgtgcaactccatgatttgaagtattcctggcatgatcttgtatcaagggggaataaaaatgctttgaccattctgagcctatgggcaccagtcttagctatatacctgatggacatccacatttggtacactcttttatcagcacttgttggtggcgttatgggtgccagagatcgccttggagagattcggtcaattgaaatgcttcataaacgttttgagagctttccagaagcgtttgctaaaaacctttccgcttcaaggttcttaaccctattctcaatatttgaatcagaaattacaactaagacgtatgcctcaatattttccccattttggaatgaaattatcaagagcttgcgtgaagaggactatatcagcaacagggaaatggatctgcttatgatgccaagtaactgtggaaatttaatgcttgtacagtggccactgtttctattgactagcaagatcatgttggcaaatgactatgcttctgactgtaaagactcgcagtatgagctatgggatagaatatcaaaagatgaatacatggcttatgccgtcaaagaatgttactacagcactgaaaaaattcttcactctttagttgatgctgaagggcagcactgggttgtaaggcttttccgagatcttaatgacagtatagcacagggttcacttttagtgactataaatctgaagaagttgcagttagtccagtctagattgacgggcttgaccggtcttctgatacgcgatgagactgctggccgtgcagctggtgttactaaagctcttcttgagctttatgaggttgttacccatgaatttctttcacagaatctgagggaacagtttgacacgtggcaactgttgttaagagccagaaatgatggacgcctattctctaagattttgtggccaaaggatccagaaatgaaagagcaacttaagcgattacacttacttcttactgtcaaggacagtgccaccaacataccaaaaaatcttgaagctcggagaagattacaatttttcactaattctctattcatggacattccacaagcaaagcctgtatctgagatgatcccttttagtgtctttaccccatactacagtgaaacagttctttatagcatgtctgagctttgtgttgagaatgaagatggcatttctatacttttctaccttcagaaaatataccctgatgagtgggctaacttcttagaacgaattggctgtggtgaatcatcagaagatgattttaaagaaagtccaagtgacaccatggaactccggttttgggtatcttatcgtggccaaactttggccaggacagtgcgtggaatgatgtactatagaagagctttgatgttacaaagttacctggagaggagatgccttgggggtattgaagatggaaattctgcagcagaatatattgacactcaaggctatgagttatctcctgatgcacgggcccaagcagatataaaatttacttatgttgtttcttgccaaatatatggactacagaagcaaacaaaaaaacaagaggctgcagatattgctctcctactgcaaagaaatgaggctcttcgggttgctttcatacacgaagaggaaatcatatcaagggatggtaaggctacaacaagagagtattattccaagcttgtgaaggctgatgttcatggcaaagaccaagaaatatactgcattaaattgcctgggaaccccaagcttggtgaaggcaaacctgagaaccaaaaccatgccataatcttcactcgaggagatgcagttcagacgatcgatatgaatcaggataactacttggaggaagcaatgaaaatgagaaatttacttgaagaatttcataatgctcatggaaaacatggcatacggaagcccacaatcctaggtgtgagggagcatgtattcacggggagtgtctcttcgctggcgtcatttatgtcgaaacaggagactagttttgttactttggggcaacgtgttcttgcttacctcaaagttcgaatgcactatggacatcctgatgtttttgatcggatatttcacataacccgaggtggcattagcaaggcgtctcgagtgattaatataagcgaagatatatatgccgggttcaattcgactttgcgccaagggaacatcacacaccatgaatatatccaggtggggaaagggcgtgatgttggcttgaaccaaattgcactatttgaggggaaagttgctggaggcaatggtgagcaagttctcagccgagatgtgtaccgtctgggccagttatttgatttcttcaggatgctaaccttctttttcaccactgttggttattatgtctgcacgatgatgactgttctaactgtgtatatcttcttgtatggaagggtttatctggcactctctggccttgactactcaatatctcgccaagctaggtttttggggaacactgcactagatgcagctttgaatgctcaatttttggtccagattggtatttttacagcagtgccgatgataatgggtttcattctggagctggggctgatgaaggctgtttttagttttattacaatgcagctccagttctgttcggtgtttttcaccttttcgcttggaacaaggacacattactttggtagaacaatccttcatggcggtgcaaagtatcgtgctactggaagaggttttgttgttcggcacataaagtttgctgaaaattataggctctattctcgaagtcactttgtcaaagcgcttgaggttgctctcctcctgatcgtttacattgcatatggatacacaaaaggcggttcatcttcatttattctgattactatcagtagttggttcctcgttatgtcctggcttttcgcgccttacattttcaacccttctggtttcgagtggcaaaagactgttgaggactttgatgactggacaaactggttactttataaaggtggagttggtgtaaagggcgacaacagttgggaatcttggtgggatgaggagcaggcgcatatccagacattcagaggacgtattcttgagacaatcctcagccttagatttctcatgtttcagtatggcattgtgtacaagcttaaaattacagatcataatacttctcttgcagtttacggcttctcatggattgtactctttgttatggttcttcttttcaagctttttactgcaactcctaggaagtcgacagccttgccgacttttgttaggtttctgcagggcgtccttgctattgggataattgcaggaattgcccttcttatcgtgctcacatcattcactgttgctgatttatttgcaagtgcacttgcttttatagcaaccggctggtgtgtcttgtgtctggccgtaacatggaagagggtagtgaaagtccttgggctatgggattcagtccgtgagattgcaaggatgtacgatgcaggaatgggagccatcatctttgtgcccatcgtcgtcttctcatggttccccttcgtgtcaacattccagtcacgtttcctcttcaatcaagcgtttagtcgaggtctggagatctccctcatccttgcagggaacaaggcgaatcagcagatttgaaaggccctgccgcatccatcgtatttttctgttgtatattctgggaattactgagagctgcttagttagtttgaacaatttaatgagctcgatttgaatgacaaccttctacataattgcccctgtaatttgtacactaattatgcggagaggcagctacggcagtagagatgagctgatgtatgtcgatttgatcttaaccaaacctctctttaaggctacgacggttcagtaggcctgcactagtatgttgcacccatccacagatataaaaagaaaaatattcttaatataaaataa

SEQ ID NO: 2491 - DNA, 6272 bp, Zea Mays
caggagtgctggaagcatttcaccctgcctccgcgaatcaacaccccaccggccaccctctcgactcgcttcaggggccaagccagtgtcgcttttgaatccgcctccgttcggttttccccaaaacgccttccttccactactgcttggcatccttggattcgtaggcagtcagatcacgcggcgcgcctcccctggtgactgacctagggctcgccgcgagcgcgcggcgatggcgtcgtccacgtccaggcgccggaggggtgggggcctcgagcgggtggcggacaactgggagcgcctcgtgcgggccgcgctcaagcgggaccgggaccacctccgcgtggggggagccccggctgccgtgggagggcagaggcttgccgacgccgtgccggcctcgctgggtcggaccaccaacatagagcagatcctgcaggccgccgacgacatcgaggtcgaggaccccaacgtcgcgcggatcctttgtgaacaagcgtacacgatggcccagaatctggatcccagcagtgaaggtagaggggttcttcagttcaagacaggtttggcatctgtaattaagcaaaaacttgctaagaaggatggggctccgatagaccgacagaatgacgttcaagtcctgtggaacttttatcttgaatacaagagtcgttgtcgggttgatgatatgcaacgtgagcaggagagactgagagagtcaggaacctttagtacagagatgggaaatagggcaatgaaaatgaagaaagtttttgctacattgagggctttgcttgatgttctggaaaatcttgttggtcagtcaccaactgatagacttcatagacaaattctggaggagataaagagaataaaaagatctgatgcagccttgagaggtgaacttatgccatacaacattgtaccccttgatacatcatcgtcagtggcaaatatttttgggtttttccctgaggtcattgctgcaacagcagcaattcagaactgtgaggacctgccacgattcccttttgatacaccccagctaagacaaaaagacattttcgaccttttgcaatatgtttttggcttccaggaagataatattcggaaccagcgtgaaaatgttgtacttatgttagccaatgctcagtcccggttaagcctgcaaattgggtcagaacccaaaattgatgagatggctgttactgatgttttttgcaaagtcctggacaactacataaaatggtgtaggtacttgggcaggcgtgttgcatggaccagccttgaagcagtaaataagaaccggaaaatcatattggttgccctctactttctgatttggggtgaagcagcgaatattcgttttctcccagaatgcatatgctatattttccacaatatggcaaaggaactcgatgggattcttgattcatctgttgctgagactgcaaagagttgcactactgagggttccacttcatttcttgagaaaataattacaccaatttatgataccatggcagcggaggctgaaaataataaagatggaaaagctgcacattctgcttggaggaattatgatgacttcaatgaatatttctggtcacgctcatgctttgagcttggttggccacctgcagagggttccaaatttttgcgcaagcctgctaagaggaaacgtacaggaaagaccaattttgttgaacatcgcacttttctgcatttgtaccgcagtttccaccgcttgtggatttttctgctattaatgttccagctcttagctattattgcctttcaccatgggaagatggacattgacaccattagaatactacttagcgctgggccagccttttttgtactaaacttcattgaatgctgcttggatgtcatactcatgtttggtgcatataagacggcaagaggttttgctatctcaagattagttattcgatttctttggttaactgcagtttcaacatttgtaacctatctctatgtgaaagtcctggaagagagagacacaaggaattcagattcgacttatttccgaatttatggtcttgttcttggtggttatgctgctgttcgaatcatgtttgcactgatggctaagatcccagcttgtcataggctctcaagtttttctgatcggtctcagtttttccaatttttcaagtggatataccaggagcgatattatgttgggcggggactttatgagagtattagtgattatgccagatacgtgatattttgggtcgtcatactggcatgcaaatttacttttgcatattttctccagattaggcctttagttgaaccaaccaatattattgtgcaactccatgatttgaagtattcctggcatgatcttgtatcaagggggaataaaaatgctttgaccattctgagcctatgggcaccagtcttagctatatacctgatggacatccacatttggtacactcttttatcagcacttgttggtggcgttatgggtgccagagatcgccttggagagattcggtcaattgaaatgcttcataaacgttttgagagctttccagaagcgtttgctaaaaacctttccgcttcaaggttcttaaccctattctcaatatttgtcaatctgaatttttatgactcatgattaattgcatataagaggatacctagcagacgcattgatcgtgtaaatgaatcagaaattacaactaagacgtatgcctcaatattttccccattttggaatgaaattatcaagagcttgcgtgaagaggactatatcagcaacagggaaatggatctgcttatgatgccaagtaactgtggaaatttaatgcttgtacagtggccactgtttctattgactagcaagatcatgttggcaaatgactatgcttctgactgtaaagactcgcagtatgagctatgggatagaatatcaaaagatgaatacatggcttatgccgtcaaagaatgttactacagcactgaaaaaattcttcactctttagttgatgctgaagggcagcactgggttgtaaggcttttccgagatcttaatgacagtatagcacagggttcacttttagtgactataaatctgaagaagttgcagttagtccagtctagattgacgggcttgaccggtcttctgatacgcgatgagactgctggccgtgcagctggtgttactaaagctcttcttgagctttatgaggttgttacccatgaatttctttcacagaatctgagggaacagtttgacacgtggcaactgttgttaagagccagaaatgatggacgcctattctctaagattttgtggccaaaggatccagaaatgaaagagcaacttaagcgattacacttacttcttactgtcaaggacagtgccaccaacataccaaaaaatcttgaagctcggagaagattacaatttttcactaattctctattcatggacattccacaagcaaagcctgtatctgagatgatcccttttagtgtctttaccccatactacagtgaaacagttctttatagcatgtctgagctttgtgttgagaatgaagatggcatttctatacttttctaccttcagaaaatataccctgatgagtgggctaacttcttagaacgaattggctgtggtgaatcatcagaagatgattttaaagaaagtccaagtgacaccatggaactccggttttgggtatcttatcgtggccaaactttggccaggacagtgcgtggaatgatgtactatagaagagctttgatgttacaaagttacctggagaggagatgccttgggggtattgaagatggaaattctgcagcagaatatattgacactcaaggctatgagttatctcctgatgcacgggcccaagcagatataaaatttacttatgttgtttcttgccaaatatatggactacagaagcaaacaaaaaaacaagaggctgcagatattgctctcctactgcaaagaaatgaggctcttcgggttgctttcatacacgaagaggaaatcatatcaagggatggtaaggctacaacaagagagtattattccaagcttgtgaaggctgatgttcatggcaaagaccaagaaatatactgcattaaattgcctgggaaccccaagcttggtgaaggcaaacctgagaaccaaaaccatgccataatcttcactcgaggagatgcagttcagacgatcgatatgaatcaggataactacttggaggaagcaatgaaaatgagaaatttacttgaagaatttcataatgctcatggaaaacatggcatacggaagcccacaatcctaggtgtgagggagcatgtattcacggggagtgtctcttcgctggcgtcatttatgtcgaaacaggagactagttttgttactttggggcaacgtgttcttgcttacctcaaagttcgaatgcactatggacatcctgatgtttttgatcggatatttcacataacccgaggtggcattagcaaggcgtctcgagtgattaatataagcgaagatatatatgccgggttcaattcgactttgcgccaagggaacatcacacaccatgaatatatccaggtggggaaagggcgtgatgttggcttgaaccaaattgcactatttgaggggaaagttgctggaggcaatggtgagcaagttctcagccgagatgtgtaccgtctgggccagttatttgatttcttcaggatgctaaccttctttttcaccactgttggttattatgtctgcacgatgatgactgttctaactgtgtatatcttcttgtatggaagggtttatctggcactctctggccttgactactcaatatctcgccaagctaggtttttggggaacactgcactagatgcagctttgaatgctcaatttttggtccagattggtatttttacagcagtgccgatgataatgggtttcattctggagctggggctgatgaaggctgtttttagttttattacaatgcagctccagttctgttcggtgtttttcaccttttcgcttggaacaaggacacattactttggtagaacaatccttcatggcggtgcaaagtatcgtgctactggaagaggttttgttgttcggcacataaagtttgctgaaaattataggctctattctcgaagtcactttgtcaaagcgcttgaggttgctctcctcctgatcgtttacattgcatatggatacacaaaaggcggttcatcttcatttattctgattactatcagtagttggttcctcgttatgtcctggcttttcgcgccttacattttcaacccttctggtttcgagtggcaaaagactgttgaggactttgatgactggacaaactggttactttataaaggtggagttggtgtaaagggcgacaacagttgggaatcttggtgggatgaggagcaggcgcatatccagacattcagaggacgtattcttgagacaatcctcagccttagatttctcatgtttcagtatggcattgtgtacaagcttaaaattacagatcataatacttctcttgcagtttacggcttctcatggattgtactctttgttatggttcttcttttcaagctttttactgcaactcctaggaagtcgacagccttgccgacttttgttaggtttctgcagggcgtccttgctattgggataattgcaggaattgcccttcttatcgtgctcacatcattcactgttgctgatttatttgcaagtgcacttgcttttatagcaaccggctggtgtgtcttgtgtctggccgtaacatggaagagggtagtgaaagtccttgggctatgggattcagtccgtgagattgcaaggatgtacgatgcaggaatgggagccatcatctttgtgcccatcgtcgtcttctcatgggaacaaggcgaatcagcagatttgaaaggccctgccgcatccatcgtatttttctgttgtatattctgggaattactgagagctgcttagttagtttgaacaatttaatgagctcgatttgaatgacaaccttctacataattgcccctgtaatttgtacactaattatgcggagaggcagctacggcagtagagatgagctgatgtatgtcgatttgatcttaaccaaacctctctttaaggctacgacggttcagtaggcctgcactagtatgttgcacccatccacagatataaaaagaaaaatattcttaatataaaataa

SEQ ID NO: 2492 - DNA, 6300 bp, Zea Mays
caggagtgctggaagcatttcaccctgcctccgcgaatcaacaccccaccggccaccctctcgactcgcttcaggggccaagccagtgtcgcttttgaatccgcctccgttcggttttccccaaaacgccttccttccactactgcttggcatccttggattcgtaggcagtcagatcacgcggcgcgcctcccctggtgactgacctagggctcgccgcgagcgcgcggcgatggcgtcgtccacgtccaggcgccggaggggtgggggcctcgagcgggtggcggacaactgggagcgcctcgtgcgggccgcgctcaagcgggaccgggaccacctccgcgtggggggagccccggctgccgtgggagggcagaggcttgccgacgccgtgccggcctcgctgggtcggaccaccaacatagagcagatcctgcaggccgccgacgacatcgaggtcgaggaccccaacgtcgcgcggatcctttgtgaacaagcgtacacgatggcccagaatctggatcccagcagtgaaggtagaggggttcttcagttcaagacaggtttggcatctgtaattaagcaaaaacttgctaagaaggatggggctccgatagaccgacagaatgacgttcaagtcctgtggaacttttatcttgaatacaagagtcgttgtcgggttgatgatatgcaacgtgagcaggagagactgagagagtcaggaacctttagtacagagatgggaaatagggcaatgaaaatgaagaaagtttttgctacattgagggctttgcttgatgttctggaaaatcttgttggtcagtcaccaactgatagacttcatagacaaattctggaggagataaagagaataaaaagatctgatgcagccttgagaggtgaacttatgccatacaacattgtaccccttgatacatcatcgtcagtggcaaatatttttgggtttttccctgaggtcattgctgcaacagcagcaattcagaactgtgaggacctgccacgattcccttttgatacaccccagctaagacaaaaagacattttcgaccttttgcaatatgtttttggcttccaggaagataatattcggaaccagcgtgaaaatgttgtacttatgttagccaatgctcagtcccggttaagcctgcaaattgggtcagaacccaaaattgatgagatggctgttactgatgttttttgcaaagtcctggacaactacataaaatggtgtaggtacttgggcaggcgtgttgcatggaccagccttgaagcagtaaataagaaccggaaaatcatattggttgccctctactttctgatttggggtgaagcagcgaatattcgttttctcccagaatgcatatgctatattttccacaatatggcaaaggaactcgatgggattcttgattcatctgttgctgagactgcaaagagttgcactactgagggttccacttcatttcttgagaaaataattacaccaatttatgataccatggcagcggaggctgaaaataataaagatggaaaagctgcacattctgcttggaggaattatgatgacttcaatgaatatttctggtcacgctcatgctttgagcttggttggccacctgcagagggttccaaatttttgcgcaagcctgctaagaggaaacgtacaggaaagaccaattttgttgaacatcgcacttttctgcatttgtaccgcagtttccaccgcttgtggatttttctgctattaatgttccagctcttagctattattgcctttcaccatgggaagatggacattgacaccattagaatactacttagcgctgggccagccttttttgtactaaacttcattgaatgctgcttggatgtcatactcatgtttggtgcatataagacggcaagaggttttgctatctcaagattagttattcgatttctttggttaactgcagtttcaacatttgtaacctatctctatgtgaaagtcctggaagagagagacacaaggaattcagattcgacttatttccgaatttatggtcttgttcttggtggttatgctgctgttcgaatcatgtttgcactgatggctaagatcccagcttgtcataggctctcaagtttttctgatcggtctcagtttttccaatttttcaagtggatataccaggagcgatattatgttgggcggggactttatgagagtattagtgattatgccagatacgtgatattttgggtcgtcatactggcatgcaaatttacttttgcatattttctccagattaggcctttagttgaaccaaccaatattattgtgcaactccatgatttgaagtattcctggcatgatcttgtatcaagggggaataaaaatgctttgaccattctgagcctatgggcaccagtcttagctatatacctgatggacatccacatttggtacactcttttatcagcacttgttggtggcgttatgggtgccagagatcgccttggagagattcggtcaattgaaatgcttcataaacgttttgagagctttccagaagcgtttgctaaaaacctttccgcttcaaggatacctagcagacgcattgatcgtgtaaatgaatcagaaattacaactaagacgtatgcctcaatattttccccattttggaatgaaattatcaagagcttgcgtgaagaggactatatcagcaacaggttattgggtgaatttctttccagggaaatggatctgcttatgatgccaagtaactgtggaaatttaatgcttgtacagtggccactgtttctattgactagcaagatcatgttggcaaatgactatgcttctgactgtaaagactcgcagtatgagctatgggatagaatatcaaaagatgaatacatggcttatgccgtcaaagaatgttactacagcactgaaaaaattcttcactctttagttgatgctgaagggcagcactgggttgtaaggcttttccgagatcttaatgacagtatagcacagggttcacttttagtgactataaatctgaagaagttgcagttagtccagtctagattgacgggcttgaccggtcttctgatacgcgatgagactgctggccgtgcagctggtgttactaaagctcttcttgagctttatgaggttgttacccatgaatttctttcacagaatctgagggaacagtttgacacgtggcaactgttgttaagagccagaaatgatggacgcctattctctaagattttgtggccaaaggatccagaaatgaaagagcaacttaagcgattacacttacttcttactgtcaaggacagtgccaccaacataccaaaaaatcttgaagctcggagaagattacaatttttcactaattctctattcatggacattccacaagcaaagcctgtatctgagatgatcccttttagtgtctttaccccatactacagtgaaacagttctttatagcatgtctgagctttgtgttgagaatgaagatggcatttctatacttttctaccttcagaaaatataccctgatgagtgggctaacttcttagaacgaattggctgtggtgaatcatcagaagatgattttaaagaaagtccaagtgacaccatggaactccggttttgggtatcttatcgtggccaaactttggccaggacagtgcgtggaatgatgtactatagaagagctttgatgttacaaagttacctggagaggagatgccttgggggtattgaagatggaaattctgcagcagaatatattgacactcaaggctatgagttatctcctgatgcacgggcccaagcagatataaaatttacttatgttgtttcttgccaaatatatggactacagaagcaaacaaaaaaacaagaggctgcagatattgctctcctactgcaaagaaatgaggctcttcgggttgctttcatacacgaagaggaaatcatatcaagggatggtaaggctacaacaagagagtattattccaagcttgtgaaggctgatgttcatggcaaagaccaagaaatatactgcattaaattgcctgggaaccccaagcttggtgaaggcaaacctgagaaccaaaaccatgccataatcttcactcgaggagatgcagttcagacgatcgatatgaatcaggataactacttggaggaagcaatgaaaatgagaaatttacttgaagaatttcataatgctcatggaaaacatggcatacggaagcccacaatcctaggtgtgagggagcatgtattcacggggagtgtctcttcgctggcgtcatttatgtcgaaacaggagactagttttgttactttggggcaacgtgttcttgcttacctcaaagttcgaatgcactatggacatcctgatgtttttgatcggatatttcacataacccgaggtggcattagcaaggcgtctcgagtgattaatataagcgaagatatatatgccgggttcaattcgactttgcgccaagggaacatcacacaccatgaatatatccaggtggggaaagggcgtgatgttggcttgaaccaaattgcactatttgaggggaaagttgctggaggcaatggtgagcaagttctcagccgagatgtgtaccgtctgggccagttatttgatttcttcaggatgctaaccttctttttcaccactgttggttattatgtctgcacgatgatgactgttctaactgtgtatatcttcttgtatggaagggtttatctggcactctctggccttgactactcaatatctcgccaagctaggtttttggggaacactgcactagatgcagctttgaatgctcaatttttggtccagattggtatttttacagcagtgccgatgataatgggtttcattctggagctggggctgatgaaggctgtttttagttttattacaatgcagctccagttctgttcggtgtttttcaccttttcgcttggaacaaggacacattactttggtagaacaatccttcatggcggtgcaaagtatcgtgctactggaagaggttttgttgttcggcacataaagtttgctgaaaattataggctctattctcgaagtcactttgtcaaagcgcttgaggttgctctcctcctgatcgtttacattgcatatggatacacaaaaggcggttcatcttcatttattctgattactatcagtagttggttcctcgttatgtcctggcttttcgcgccttacattttcaacccttctggtttcgagtggcaaaagactgttgaggactttgatgactggacaaactggttactttataaaggtggagttggtgtaaagggcgacaacagttgggaatcttggtgggatgaggagcaggcgcatatccagacattcagaggacgtattcttgagacaatcctcagccttagatttctcatgtttcagtatggcattgtgtacaagcttaaaattacagatcataatacttctcttgcagtttacggcttctcatggattgtactctttgttatggttcttcttttcaagctttttactgcaactcctaggaagtcgacagccttgccgacttttgttaggtttctgcagggcgtccttgctattgggataattgcaggaattgcccttcttatcgtgctcacatcattcactgttgctgatttatttgcaagtgcacttgcttttatagcaaccggctgctggccgtaacatggaagagggtagtgaaagtccttgggctatgggattcagtccgtgagattgcaaggatgtacgatgcaggaatgggagccatcatctttgtgcccatcgtcgtcttctcatggttccccttcgtgtcaacattccagtcacgtttcctcttcaatcaagcgtttagtcgaggtctggagatctccctcatccttgcagggaacaaggcgaatcagcagatttgaaaggccctgccgcatccatcgtatttttctgttgtatattctgggaattactgagagctgcttagttagtttgaacaatttaatgagctcgatttgaatgacaaccttctacataattgcccctgtaatttgtacactaattatgcggagaggcagctacggcagtagagatgagctgatgtatgtcgatttgatcttaaccaaacctctctttaaggctacgacggttcagtaggcctgcactagtatgttgcacccatccacagatataaaaagaaaaatattcttaatataaaataa

SEQ ID NO: 2493 - DNA, 6300 bp, Zea Mays
caggagtgctggaagcatttcaccctgcctccgcgaatcaacaccccaccggccaccctctcgactcgcttcaggggccaagccagtgtcgcttttgaatccgcctccgttcggttttccccaaaacgccttccttccactactgcttggcatccttggattcgtaggcagtcagatcacgcggcgcgcctcccctggtgactgacctagggctcgccgcgagcgcgcggcgatggcgtcgtccacgtccaggcgccggaggggtgggggcctcgagcgggtggcggacaactgggagcgcctcgtgcgggccgcgctcaagcgggaccgggaccacctccgcgtggggggagccccggctgccgtgggagggcagaggcttgccgacgccgtgccggcctcgctgggtcggaccaccaacatagagcagatcctgcaggccgccgacgacatcgaggtcgaggaccccaacgtcgcgcggatcctttgtgaacaagcgtacacgatggcccagaatctggatcccagcagtgaaggtagaggggttcttcagttcaagacaggtttggcatctgtaattaagcaaaaacttgctaagaaggatggggctccgatagaccgacagaatgacgttcaagtcctgtggaacttttatcttgaatacaagagtcgttgtcgggttgatgatatgcaacgtgagcaggagagactgagagagtcaggaacctttagtacagagatgggaaatagggcaatgaaaatgaagaaagtttttgctacattgagggctttgcttgatgttctggaaaatcttgttggtcagtcaccaactgatagacttcatagacaaattctggaggagataaagagaataaaaagatctgatgcagccttgagaggtgaacttatgccatacaacattgtaccccttgatacatcatcgtcagtggcaaatatttttgggtttttccctgaggtcattgctgcaacagcagcaattcagaactgtgaggacctgccacgattcccttttgatacaccccagctaagacaaaaagacattttcgaccttttgcaatatgtttttggcttccaggaagataatattcggaaccagcgtgaaaatgttgtacttatgttagccaatgctcagtcccggttaagcctgcaaattgggtcagaacccaaaattgatgagatggctgttactgatgttttttgcaaagtcctggacaactacataaaatggtgtaggtacttgggcaggcgtgttgcatggaccagccttgaagcagtaaataagaaccggaaaatcatattggttgccctctactttctgatttggggtgaagcagcgaatattcgttttctcccagaatgcatatgctatattttccacaatatggcaaaggaactcgatgggattcttgattcatctgttgctgagactgcaaagagttgcactactgagggttccacttcatttcttgagaaaataattacaccaatttatgataccatggcagcggaggctgaaaataataaagatggaaaagctgcacattctgcttggaggaattatgatgacttcaatgaatatttctggtcacgctcatgctttgagcttggttggccacctgcagagggttccaaatttttgcgcaagcctgctaagaggaaacgtacaggaaagaccaattttgttgaacatcgcacttttctgcatttgtaccgcagtttccaccgcttgtggatttttctgctattaatgttccagctcttagctattattgcctttcaccatgggaagatggacattgacaccattagaatactacttagcgctgggccagccttttttgtactaaacttcattgaatgctgcttggatgtcatactcatgtttggtgcatataagacggcaagaggttttgctatctcaagattagttattcgatttctttggttaactgcagtttcaacatttgtaacctatctctatgtgaaagtcctggaagagagagacacaaggaattcagattcgacttatttccgaatttatggtcttgttcttggtggttatgctgctgttcgaatcatgtttgcactgatggctaagatcccagcttgtcataggctctcaagtttttctgatcggtctcagtttttccaatttttcaagtggatataccaggagcgatattatgttgggcggggactttatgagagtattagtgattatgccagatacgtgatattttgggtcgtcatactggcatgcaaatttacttttgcatattttctccagattaggcctttagttgaaccaaccaatattattgtgcaactccatgatttgaagtattcctggcatgatcttgtatcaagggggaataaaaatgctttgaccattctgagcctatgggcaccagtcttagctatatacctgatggacatccacatttggtacactcttttatcagcacttgttggtggcgttatgggtgccagagatcgccttggagagattcggtcaattgaaatgcttcataaacgttttgagagctttccagaagcgtttgctaaaaacctttccgcttcaaggttcttaaccctattctcaatatttgaatcagaaattacaactaagacgtatgcctcaatattttccccattttggaatgaaattatcaagagcttgcgtgaagaggactatatcagcaacaggttattgggtgaatttctttccagggaaatggatctgcttatgatgccaagtaactgtggaaatttaatgcttgtacagtggccactgtttctattgactagcaagatcatgttggcaaatgactatgcttctgactgtaaagactcgcagtatgagctatgggatagaatatcaaaagatgaatacatggcttatgccgtcaaagaatgttactacagcactgaaaaaattcttcactctttagttgatgctgaagggcagcactgggttgtaaggcttttccgagatcttaatgacagtatagcacagggttcacttttagtgactataaatctgaagaagttgcagttagtccagtctagattgacgggcttgaccggtcttctgatacgcgatgagactgctggccgtgcagctggtgttactaaagctcttcttgagctttatgaggttgttacccatgaatttctttcacagaatctgagtttgacacgtggcaactgttgttaagagccagaaatgatggacgcctattctctaagattttgtggccaaaggatccagaaatgaaagagcaacttaagcgattacacttacttcttactgtcaaggacagtgccaccaacataccaaaaaatcttgaagctcggagaagattacaatttttcactaattctctattcatggacattccacaagcaaagcctgtatctgagatgatcccttttagtgtctttaccccatactacagtgaaacagttctttatagcatgtctgagctttgtgttgagaatgaagatggcatttctatacttttctaccttcagaaaatataccctgatgagtgggctaacttcttagaacgaattggctgtggtgaatcatcagaagatgattttaaagaaagtccaagtgacaccatggaactccggttttgggtatcttatcgtggccaaactttggccaggacagtgcgtggaatgatgtactatagaagagctttgatgttacaaagttacctggagaggagatgccttgggggtattgaagatggaaattctgcagcagaatatattgacactcaaggctatgagttatctcctgatgcacgggcccaagcagatataaaatttacttatgttgtttcttgccaaatatatggactacagaagcaaacaaaaaaacaagaggctgcagatattgctctcctactgcaaagaaatgaggctcttcgggttgctttcatacacgaagaggaaatcatatcaagggatggtaaggctacaacaagagagtattattccaagcttgtgaaggctgatgttcatggcaaagaccaagaaatatactgcattaaattgcctgggaaccccaagcttggtgaaggcaaacctgagaaccaaaaccatgccataatcttcactcgaggagatgcagttcagacgatcgatatgaatcaggataactacttggaggaagcaatgaaaatgagaaatttacttgaagaatttcataatgctcatggaaaacatggcatacggaagcccacaatcctaggtgtgagggagcatgtattcacggggagtgtctcttcgctggcgtcatttatgtcgaaacaggagactagttttgttactttggggcaacgtgttcttgcttacctcaaagttcgaatgcactatggacatcctgatgtttttgatcggatatttcacataacccgaggtggcattagcaaggcgtctcgagtgattaatataagcgaagatatatatgccgggttcaattcgactttgcgccaagggaacatcacacaccatgaatatatccaggtggggaaagggcgtgatgttggcttgaaccaaattgcactatttgaggggaaagttgctggaggcaatggtgagcaagttctcagccgagatgtgtaccgtctgggccagttatttgatttcttcaggatgctaaccttctttttcaccactgttggttattatgtctgcacgatgatgactgttctaactgtgtatatcttcttgtatggaagggtttatctggcactctctggccttgactactcaatatctcgccaagctaggtttttggggaacactgcactagatgcagctttgaatgctcaatttttggtccagattggtatttttacagcagtgccgatgataatgggtttcattctggagctggggctgatgaaggctgtttttagttttattacaatgcagctccagttctgttcggtgtttttcaccttttcgcttggaacaaggacacattactttggtagaacaatccttcatggcggtgcaaagtatcgtgctactggaagaggttttgttgttcggcacataaagtttgctgaaaattataggctctattctcgaagtcactttgtcaaagcgcttgaggttgctctcctcctgatcgtttacattgcatatggatacacaaaaggcggttcatcttcatttattctgattactatcagtagttggttcctcgttatgtcctggcttttcgcgccttacattttcaacccttctggtttcgagtggcaaaagactgttgaggactttgatgactggacaaactggttactttataaaggtggagttggtgtaaagggcgacaacagttgggaatcttggtgggatgaggagcaggcgcatatccagacattcagaggacgtattcttgagacaatcctcagccttagatttctcatgtttcagtatggcattgtgtacaagcttaaaattacagatcataatacttctcttgcagtttacggcttctcatggattgtactctttgttatggttcttcttttcaagctttttactgcaactcctaggaagtcgacagccttgccgacttttgttaggtttctgcagggcgtccttgctattgggataattgcaggaattgcccttcttatcgtgctcacatcattcactgttgctgatttatttgcaagtgcacttgcttttatagcaaccggctggtgtgtcttgtgtctggccgtaacatggaagagggtagtgaaagtccttgggctatgggattcagtccgtgagattgcaaggatgtacgatgcaggaatgggagccatcatctttgtgcccatcgtcgtcttctcatggttccccttcgtgtcaacattccagtcacgtttcctcttcaatcaagcgtttagtcgaggtctggagatctccctcatccttgcagggaacaaggcgaatcagcagatttgaaaggccctgccgcatccatcgtatttttctgttgtatattctgggaattactgagagctgcttagttagtttgaacaatttaatgagctcgatttgaatgacaaccttctacataattgcccctgtaatttgtacactaattatgcggagaggcagctacggcagtagagatgagctgatgtatgtcgatttgatcttaaccaaacctctctttaaggctacgacggttcagtaggcctgcactagtatgttgcacccatccacagatataaaaagaaaaatattcttaatataaaataa

SEQ ID NO: 2494 - DNA, 6276 bp, Zea Mays
caggagtgctggaagcatttcaccctgcctccgcgaatcaacaccccaccggccaccctctcgactcgcttcaggggccaagccagtgtcgcttttgaatccgcctccgttcggttttccccaaaacgccttccttccactactgcttggcatccttggattcgtaggcagtcagatcacgcggcgcgcctcccctggtgactgacctagggctcgccgcgagcgcgcggcgatggcgtcgtccacgtccaggcgccggaggggtgggggcctcgagcgggtggcggacaactgggagcgcctcgtgcgggccgcgctcaagcgggaccgggaccacctccgcgtggggggagccccggctgccgtgggagggcagaggcttgccgacgccgtgccggcctcgctgggtcggaccaccaacatagagcagatcctgcaggccgccgacgacatcgaggtcgaggaccccaacgtcgcgcggatcctttgtgaacaagcgtacacgatggcccagaatctggatcccagcagtgaaggtagaggggttcttcagttcaagacaggtttggcatctgtaattaagcaaaaacttgctaagaaggatggggctccgatagaccgacagaatgacgttcaagtcctgtggaacttttatcttgaatacaagagtcgttgtcgggttgatgatatgcaacgtgagcaggagagactgagagagtcaggaacctttagtacagagatgggaaatagggcaatgaaaatgaagaaagtttttgctacattgagggctttgcttgatgttctggaaaatcttgttggtcagtcaccaactgatagacttcatagacaaattctggaggagataaagagaataaaaagatctgatgcagccttgagaggtgaacttatgccatacaacattgtaccccttgatacatcatcgtcagtggcaaatatttttgggtttttccctgaggtcattgctgcaacagcagcaattcagaactgtgaggacctgccacgattcccttttgatacaccccagctaagacaaaaagacattttcgaccttttgcaatatgtttttggcttccaggaagataatattcggaaccagcgtgaaaatgttgtacttatgttagccaatgctcagtcccggttaagcctgcaaattgggtcagaacccaaaattgatgagatggctgttactgatgttttttgcaaagtcctggacaactacataaaatggtgtaggtacttgggcaggcgtgttgcatggaccagccttgaagcagtaaataagaaccggaaaatcatattggttgccctctactttctgatttggggtgaagcagcgaatattcgttttctcccagaatgcatatgctatattttccacaatatggcaaaggaactcgatgggattcttgattcatctgttgctgagactgcaaagagttgcactactgagggttccacttcatttcttgagaaaataattacaccaatttatgataccatggcagcggaggctgaaaataataaagatggaaaagctgcacattctgcttggaggaattatgatgacttcaatgaatatttctggtcacgctcatgctttgagcttggttggccacctgcagagggttccaaatttttgcgcaagcctgctaagaggaaacgtacaggaaagaccaattttgttgaacatcgcacttttctgcatttgtaccgcagtttccaccgcttgtggatttttctgctattaatgttccagctcttagctattattgcctttcaccatgggaagatggacattgacaccattagaatactacttagcgctgggccagccttttttgtactaaacttcattgaatgctgcttggatgtcatactcatgtttggtgcatataagacggcaagaggttttgctatctcaagattagttattcgatttctttggttaactgcagtttcaacatttgtaacctatctctatgtgaaagtcctggaagagagagacacaaggaattcagattcgacttatttccgaatttatggtcttgttcttggtggttatgctgctgttcgaatcatgtttgcactgatggctaagatcccagcttgtcataggctctcaagtttttctgatcggtctcagtttttccaatttttcaagtggatataccaggagcgatattatgttgggcggggactttatgagagtattagtgattatgccagatacgtgatattttgggtcgtcatactggcatgcaaatttacttttgcatattttctccagattaggcctttagttgaaccaaccaatattattgtgcaactccatgatttgaagtattcctggcatgatcttgtatcaagggggaataaaaatgctttgaccattctgagcctatgggcaccagtcttagctatatacctgatggacatccacatttggtacactcttttatcagcacttgttggtggcgttatgggtgccagagatcgccttggagagattcggtcaattgaaatgcttcataaacgttttgagagctttccagaagcgtttgctaaaaacctttccgcttcaaggatacctagcagacgcattgatcgtgtaaatgaatcagaaattacaactaagacgtatgcctcaatattttccccattttggaatgaaattatcaagagcttgcgtgaagaggactatatcagcaacagggaaatggatctgcttatgatgccaagtaactgtggaaatttaatgcttgtacagtggccactgtttctattgactagcaagatcatgttggcaaatgactatgcttctgactgtaaagactcgcagtatgagctatgggatagaatatcaaaagatgaatacatggcttatgccgtcaaagaatgttactacagcactgaaaaaattcttcactctttagttgatgctgaagggcagcactgggttgtaaggcttttccgagatcttaatgacagtatagcacagggttcacttttagtgactataaatctgaagaagttgcagttagtccagtctagattgacgggcttgaccggtcttctgatacgcgatgagactgctggccgtgcagctggtgttactaaagctcttcttgagctttatgaggttgttacccatgaatttctttcacagaatctgagggaacagtttgacacgtggcaactgttgttaagagccagaaatgatggacgcctattctctaagattttgtggccaaaggatccagaaatgaaagagcaacttaagcgattacacttacttcttactgtcaaggacagtgccaccaacataccaaaaaatcttgaagctcggagaagattacaatttttcactaattctctattcatggacattccacaagcaaagcctgtatctgagatgatcccttttagtgtctttaccccatactacagtgaaacagttctttatagcatgtctgagctttgtgttgagaatgaagatggcatttctatacttttctaccttcagaaaatataccctgatgagtgggctaacttcttagaacgaattggctgtggtgaatcatcagaagatgattttaaagaaagtccaagtgacaccatggaactccggttttgggtatcttatcgtggccaaactttggccaggacagtgcgtggaatgatgtactatagaagagctttgatgttacaaagttacctggagaggagatgccttgggggtattgaagatggaaattctgcagcagaatatattgacactcaaggctatgagttatctcctgatgcacgggcccaagcagatataaaatttacttatgttgtttcttgccaaatatatggactacagaagcaaacaaaaaaacaagaggctgcagatattgctctcctactgcaaagaaatgaggctcttcgggttgctttcatacacgaagaggaaatcatatcaagggatggtaaggctacaacaagagagtattattccaagcttgtgaaggctgatgttcatggcaaagaccaagaaatatactgcattaaattgcctgggaaccccaagcttggtgaaggcaaacctgagaaccaaaaccatgccataatcttcactcgaggagatgcagttcagacgatcgatatgaatcaggataactacttggaggaagcaatgaaaatgagaaatttacttgaagaatttcataatgctcatggaaaacatggcatacggaagcccacaatcctaggtgtgagggagcatgtattcacggggagtgtctcttcgctggcgtcatttatgtcgaaacaggagactagttttgttactttggggcaacgtgttcttgcttacctcaaagttcgaatgcactatggacatcctgatgtttttgatcggatatttcacataacccgaggtggcattagcaaggcgtctcgagtgattaatataagcgaagatatatatgccgggttcaattcgactttgcgccaagggaacatcacacaccatgaatatatccaggtggggaaagggcgtgatgttggcttgaaccaaattgcactatttgaggggaaagttgctggaggcaatggtgagcaagttctcagccgagatgtgtaccgtctgggccagttatttgatttcttcaggatgctaaccttctttttcaccactgttggttattatgtctgcacgatgatgactgttctaactgtgtatatcttcttgtatggaagggtttatctggcactctctggccttgactactcaatatctcgccaagctaggtttttggggaacactgcactagatgcagctttgaatgctcaatttttggtccagattggtatttttacagcagtgccgatgataatgggtttcattctggagctggggctgatgaaggctgtttttagttttattacaatgcagctccagttctgttcggtgtttttcaccttttcgcttggaacaaggacacattactttggtagaacaatccttcatggcggtgcaaagtatcgtgctactggaagaggttttgttgttcggcacataaagtttgctgaaaattataggctctattctcgaagtcactttgtcaaagcgcttgaggttgctctcctcctgatcgtttacattgcatatggatacacaaaaggcggttcatcttcatttattctgattactatcagtagttggttcctcgttatgtcctggcttttcgcgccttacattttcaacccttctggtttcgagtggcaaaagactgttgaggactttgatgactggacaaactggttactttataaaggtggagttggtgtaaagggcgacaacagttgggaatcttggtgggatgaggagcaggcgcatatccagacattcagaggacgtattcttgagacaatcctcagccttagatttctcatgtttcagtatggcattgtgtacaagcttaaaattacagatcataatacttctcttgcagtttacggcttctcatggattgtactctttgttatggttcttcttttcaagctttttactgcaactcctaggaagtcgacagccttgccgacttttgttaggtttctgcagggcgtccttgctattgggataattgcaggaattgcccttcttatcgtgctcacatcattcactgttgctgatttatttgcaagtgcacttgcttttatagcaaccggctgctggccgtaacatggaagagggtagtgaaagtccttgggctatgggattcagtccgtgagattgcaaggatgtacgatgcaggaatgggagccatcatctttgtgcccatcgtcgtcttctcatggttccccttcgtgtcaacattccagtcacgtttcctcttcaatcaagcgtttagtcgaggtctggagatctccctcatccttgcagggaacaaggcgaatcagcagatttgaaaggccctgccgcatccatcgtatttttctgttgtatattctgggaattactgagagctgcttagttagtttgaacaatttaatgagctcgatttgaatgacaaccttctacataattgcccctgtaatttgtacactaattatgcggagaggcagctacggcagtagagatgagctgatgtatgtcgatttgatcttaaccaaacctctctttaaggctacgacggttcagtaggcctgcactagtatgttgcacccatccacagatataaaaagaaaaatattcttaatataaaataa

SEQ ID NO: 2495 - DNA, 6080 bp, Zea Mays
caggagtgctggaagcatttcaccctgcctccgcgaatcaacaccccaccggccaccctctcgactcgcttcaggggccaagccagtgtcgcttttgaatccgcctccgttcggttttccccaaaacgccttccttccactactgcttggcatccttggattcgtaggcagtcagatcacgcggcgcgcctcccctggtgactgacctagggctcgccgcgagcgcgcggcgatggcgtcgtccacgtccaggcgccggaggggtgggggcctcgagcgggtggcggacaactgggagcgcctcgtgcgggccgcgctcaagcgggaccgggaccacctccgcgtggggggagccccggctgccgtgggagggcagaggcttgccgacgccgtgccggcctcgctgggtcggaccaccaacatagagcagatcctgcaggccgccgacgacatcgaggtcgaggaccccaacgtcgcgcggatcctttgtgaacaagcgtacacgatggcccagaatctggatcccagcagtgaaggtagaggggttcttcagttcaagacaggtttggcatctgtaattaagcaaaaacttgctaagaaggatggggctccgatagaccgacagaatgacgttcaagtcctgtggaacttttatcttgaatacaagagtcgttgtcgggttgatgatatgcaacgtgagcaggagagactgagagagtcaggaacctttagtacagagatgggaaatagggcaatgaaaatgaagaaagtttttgctacattgagggctttgcttgatgttctggaaaatcttgttggtcagtcaccaactgatagacttcatagacaaattctggaggagataaagagaataaaaagatctgatgcagccttgagaggtgaacttatgccatacaacattgtaccccttgatacatcatcgtcagtggcaaatatttttgggtttttccctgaggtcattgctgcaacagcagcaattcagaactgtgaggacctgccacgattcccttttgatacaccccagctaagacaaaaagacattttcgaccttttgcaatatgtttttggcttccaggaagataatattcggaaccagcgtgaaaatgttgtacttatgttagccaatgctcagtcccggttaagcctgcaaattgggtcagaacccaaaattgatgagatggctgttactgatgttttttgcaaagtcctggacaactacataaaatggtgtaggtacttgggcaggcgtgttgcatggaccagccttgaagcagtaaataagaaccggaaaatcatattggttgccctctactttctgatttggggtgaagcagcgaatattcgttttctcccagaatgcatatgctatattttccacaatatggcaaaggaactcgatgggattcttgattcatctgttgctgagactgcaaagagttgcactactgagggttccacttcatttcttgagaaaataattacaccaatttatgataccatggcagcggaggctgaaaataataaagatggaaaagctgcacattctgcttggaggaattatgatgacttcaatgaatatttctggtcacgctcatgctttgagcttggttggccacctgcagagggttccaaatttttgcgcaagcctgctaagaggaaacgtacaggaaagaccaattttgttgaacatcgcacttttctgcatttgtaccgcagtttccaccgcttgtggatttttctgctattaatgttccagctcttagctattattgcctttcaccatgggaagatggacattgacaccattagaatactacttagcgctgggccagccttttttgtactaaacttcattgaatgctgcttggatgtcatactcatgtttggtgcatataagacggcaagaggttttgctatctcaagattagttattcgatttctttggttaactgcagtttcaacatttgtaacctatctctatgtgaaagtcctggaagagagagacacaaggaattcagattcgacttatttccgaatttatggtcttgttcttggtggttatgctgctgttcgaatcatgtttgcactgatggctaagatcccagcttgtcataggctctcaagtttttctgatcggtctcagtttttccaatttttcaagtggatataccaggagcgatattatgttgggcggggactttatgagagtattagtgattatgccagatacgtgatattttgggtcgtcatactggcatgcaaatttacttttgcatattttctccagattaggcctttagttgaaccaaccaatattattgtgcaactccatgatttgaagtattcctggcatgatcttgtatcaagggggaataaaaatgctttgaccattctgagcctatgggcaccagtcttagctatatacctgatggacatccacatttggtacactcttttatcagcacttgttggtggcgttatgggtgccagagatcgccttggagagattcggtcaattgaaatgcttcataaacgttttgagagctttccagaagcgtttgctaaaaacctttccgcttcaaggatacctagcagacgcattgatcgtgtaaatgaatcagaaattacaactaagacgtatgcctcaatattttccccattttggaatgaaattatcaagagcttgcgtgaagaggactatatcagcaacagggaaatggatctgcttatgatgccaagtaactgtggaaatttaatgcttgtacagtggccactgtttctattgactagcaagatcatgttggcaaatgactatgcttctgactgtaaagactcgcagtatgagctatgggatagaatatcaaaagatgaatacatggcttatgccgtcaaagaatgttactacagcactgaaaaaattcttcactctttagttgatgctgaagggcagcactgggttgtaaggcttttccgagatcttaatgacagtatagcacagggttcacttttagtgactataaatctgaagaagttgcagttagtccagtctagattgacgggcttgaccggtcttctgatacgcgatgagactgctggccgtgcagctggtgttactaaagctcttcttgagctttatgaggttgttacccatgaatttctttcacagaatctgagggaacagtttgacacgtggcaactgttgttaagagccagaaatgatggacgcctattctctaagattttgtggccaaaggatccagaaatgaaagagcaacttaagcgattacacttacttcttactgtcaaggacagtgccaccaacataccaaaaaatcttgaagctcggagaagattacaatttttcactaattctctattcatggacattccacaagcaaagcctgtatctgagatgatcccttttagtgtctttaccccatactacagtgaaacagttctttatagcatgtctgagctttgtgttgagaatgaagatggcatttctatacttttctaccttcagaaaatataccctgatgagtgggctaacttcttagaacgaattggctgtggtgaatcatcagaagatgattttaaagaaagtccaagtgacaccatggaactccggttttgggtatcttatcgtggccaaactttggccaggacagtgcgtggaatgatgtactatagaagagctttgatgttacaaagttacctggagaggagatgccttgggggtattgaagatggaaattctgcagcagaatatattgacactcaaggctatgagttatctcctgatgcacgggcccaagcagatataaaatttacttatgttgtttcttgccaaatatatggactacagaagcaaacaaaaaaacaagaggctgcagatattgctctcctactgcaaagaaatgaggctcttcgggttgctttcatacacgaagaggaaatcatatcaagggatggtaaggctacaacaagagagtattattccaagcttgtgaaggctgatgttcatggcaaagaccaagaaatatactgcattaaattgcctgggaaccccaagcttggtgaaggcaaacctgagaaccaaaaccatgccataatcttcactcgaggagatgcagttcagacgatcgatatgaatcaggataactacttggaggaagcaatgaaaatgagaaatttacttgaagaatttcataatgctcatggaaaacatggcatacggaagcccacaatcctaggtgtgagggagcatgtattcacggggagtgtctcttcgctggcgtcatttatgtcgaaacaggagactagttttgttactttggggcaacgtgttcttgcttacctcaaagttcgaatgcactatggacatcctgatgtttttgatcggatatttcacataacccgaggtggcattagcaaggcgtctcgagtgattaatataagcgaagatatatatgccgggttcaattcgactttgcgccaagggaacatcacacaccatgaatatatccaggtggggaaagggcgtgatgttggcttgaaccaaattgcactatttgaggggaaagttgctggaggcaatggtttttggggaacactgcactagatgcagctttgaatgctcaatttttggtccagattggtatttttacagcagtgccgatgataatgggtttcattctggagctggggctgatgaaggctgtttttagttttattacaatgcagctccagttctgttcggtgtttttcaccttttcgcttggaacaaggacacattactttggtagaacaatccttcatggcggtgcaaagtatcgtgctactggaagaggttttgttgttcggcacataaagtttgctgaaaattataggctctattctcgaagtcactttgtcaaagcgcttgaggttgctctcctcctgatcgtttacattgcatatggatacacaaaaggcggttcatcttcatttattctgattactatcagtagttggttcctcgttatgtcctggcttttcgcgccttacattttcaacccttctggtttcgagtggcaaaagactgttgaggactttgatgactggacaaactggttactttataaaggtggagttggtgtaaagggcgacaacagttgggaatcttggtgggatgaggagcaggcgcatatccagacattcagaggacgtattcttgagacaatcctcagccttagatttctcatgtttcagtatggcattgtgtacaagcttaaaattacagatcataatacttctcttgcagtttacggcttctcatggattgtactctttgttatggttcttcttttcaagctttttactgcaactcctaggaagtcgacagccttgccgacttttgttaggtttctgcagggcgtccttgctattgggataattgcaggaattgcccttcttatcgtgctcacatcattcactgttgctgatttatttgcaagtgcacttgcttttatagcaaccggctgctggccgtaacatggaagagggtagtgaaagtccttgggctatgggattcagtccgtgagattgcaaggatgtacgatgcaggaatgggagccatcatctttgtgcccatcgtcgtcttctcatggttccccttcgtgtcaacattccagtcacgtttcctcttcaatcaagcgtttagtcgaggtctggagatctccctcatccttgcagggaacaaggcgaatcagcagatttgaaaggccctgccgcatccatcgtatttttctgttgtatattctgggaattactgagagctgcttagttagtttgaacaatttaatgagctcgatttgaatgacaaccttctacataattgcccctgtaatttgtacactaattatgcggagaggcagctacggcagtagagatgagctgatgtatgtcgatttgatcttaaccaaacctctctttaaggctacgacggttcagtaggcctgcactagtatgttgcacccatccacagatataaaaagaaaaatattcttaatataaaataa

SEQ ID NO: 2496 - DNA, 6141 bp, Zea Mays
caggagtgctggaagcatttcaccctgcctccgcgaatcaacaccccaccggccaccctctcgactcgcttcaggggccaagccagtgtcgcttttgaatccgcctccgttcggttttccccaaaacgccttccttccactactgcttggcatccttggattcgtaggcagtcagatcacgcggcgcgcctcccctggtgactgacctagggctcgccgcgagcgcgcggcgatggcgtcgtccacgtccaggcgccggaggggtgggggcctcgagcgggtggcggacaactgggagcgcctcgtgcgggccgcgctcaagcgggaccgggaccacctccgcgtggggggagccccggctgccgtgggagggcagaggcttgccgacgccgtgccggcctcgctgggtcggaccaccaacatagagcagatcctgcaggccgccgacgacatcgaggtcgaggaccccaacgtcgcgcggatcctttgtgaacaagcgtacacgatggcccagaatctggatcccagcagtgaaggtagaggggttcttcagttcaagacaggtttggcatctgtaattaagcaaaaacttgctaagaaggatggggctccgatagaccgacagaatgacgttcaagtcctgtggaacttttatcttgaatacaagagtcgttgtcgggttgatgatatgcaacgtgagcaggagagactgagagagtcaggaacctttagtacagagatgggaaatagggcaatgaaaatgaagaaagtttttgctacattgagggctttgcttgatgttctggaaaatcttgttggtcagtcaccaactgatagacttcatagacaaattctggaggagataaagagaataaaaagatctgatgcagccttgagaggtgaacttatgccatacaacattgtaccccttgatacatcatcgtcagtggcaaatatttttgggtttttccctgaggtcattgctgcaacagcagcaattcagaactgtgaggacctgccacgattcccttttgatacaccccagctaagacaaaaagacattttcgaccttttgcaatatgtttttggcttccaggaagataatattcggaaccagcgtgaaaatgttgtacttatgttagccaatgctcagtcccggttaagcctgcaaattgggtcagaacccaaaattgatgagatggctgttactgatgttttttgcaaagtcctggacaactacataaaatggtgtaggtacttgggcaggcgtgttgcatggaccagccttgaagcagtaaataagaaccggaaaatcatattggttgccctctactttctgatttggggtgaagcagcgaatattcgttttctcccagaatgcatatgctatattttccacaatatggcaaaggaactcgatgggattcttgattcatctgttgctgagactgcaaagagttgcactactgagggttccacttcatttcttgagaaaataattacaccaatttatgataccatggcagcggaggctgaaaataataaagatggaaaagctgcacattctgcttggaggaattatgatgacttcaatgaatatttctggtcacgctcatgctttgagcttggttggccacctgcagagggttccaaatttttgcgcaagcctgctaagaggaaacgtacaggaaagaccaattttgttgaacatcgcacttttctgcatttgtaccgcagtttccaccgcttgtggatttttctgctattaatgttccagctcttagctattattgcctttcaccatgggaagatggacattgacaccattagaatactacttagcgctgggccagccttttttgtactaaacttcattgaatgctgcttggatgtcatactcatgtttggtgcatataagacggcaagaggttttgctatctcaagattagttattcgatttctttggttaactgcagtttcaacatttgtaacctatctctatgtgaaagtcctggaagagagagacacaaggaattcagattcgacttatttccgaatttatggtcttgttcttggtggttatgctgctgttcgaatcatgtttgcactgatggctaagatcccagcttgtcataggctctcaagtttttctgatcggtctcagtttttccaatttttcaagtggatataccaggagcgatattatgttgggcggggactttatgagagtattagtgattatgccagatacgtgatattttgggtcgtcatactggcatgcaaatttacttttgcatattttctccagattaggcctttagttgaaccaaccaatattattgtgcaactccatgatttgaagtattcctggcatgatcttgtatcaagggggaataaaaatgctttgaccattctgagcctatgggcaccagtcttagctatatacctgatggacatccacatttggtacactcttttatcagcacttgttggtggcgttatgggtgccagagatcgccttggagagattcggtcaattgaaatgcttcataaacgttttgagagctttccagaagcgtttgctaaaaacctttccgcttcaaggatacctagcagacgcattgatcgtgtaaatgaatcagaaattacaactaagacgtatgcctcaatattttccccattttggaatgaaattatcaagagcttgcgtgaagaggactatatcagcaacagggaaatggatctgcttatgatgccaagtaactgtggaaatttaatgcttgtacagtggccactgtttctattgactagcaagatcatgttggcaaatgactatgcttctgactgtaaagactcgcagtatgagctatgggatagaatatcaaaagatgaatacatggcttatgccgtcaaagaatgttactacagcactgaaaaaattcttcactctttagttgatgctgaagggcagcactgggttgtaaggcttttccgagatcttaatgacagtatagcacagggttcacttttagtgactataaatctgaagaagttgcagttagtccagtctagattgacgggcttgaccggtcttctgatacgcgatgagactgctggccgtgcagctggtgttactaaagctcttcttgagctttatgaggttgttacccatgaatttctttcacagaatctgagggaacagtttgacacgtggcaactgttgttaagagccagaaatgatggacgcctattctctaagattttgtggccaaaggatccagaaatgaaagagcaacttaagcgattacacttacttcttactgtcaaggacagtgccaccaacataccaaaaaatcttgaagctcggagaagattacaatttttcactaattctctattcatggacattccacaagcaaagcctgtatctgagatgatcccttttagtgtctttaccccatactacagtgaaacagttctttatagcatgtctgagctttgtgttgagaatgaagatggcatttctatacttttctaccttcagaaaatataccctgatgagtgggctaacttcttagaacgaattggctgtggtgaatcatcagaagatgattttaaagaaagtccaagtgacaccatggaactccggttttgggtatcttatcgtggccaaactttggccaggacagtgcgtggaatgatgtactatagaagagctttgatgttacaaagttacctggagaggagatgccttgggggtattgaagatggaaattctgcagcagaatatattgacactcaaggctatgagttatctcctgatgcacgggcccaagcagatataaaatttacttatgttgtttcttgccaaatatatggactacagaagcaaacaaaaaaacaagaggctgcagatattgctctcctactgcaaagaaatgaggctcttcgggttgctttcatacacgaagaggaaatcatatcaagggatggtaaggctacaacaagagagtattattccaagcttgtgaaggctgatgttcatggcaaagaccaagaaatatactgcattaaattgcctgggaaccccaagcttggtgaaggcaaacctgagaaccaaaaccatgccataatcttcactcgaggagatgcagttcagacgatcgatatgaatcaggataactacttggaggaagcaatgaaaatgagaaatttacttgaagaatttcataatgctcatggaaaacatggcatacggaagcccacaatcctagtgtctcttcgctggcgtcatttatgtcgaaacaggagactagttttgttactttggggcaacgtgttcttgcttacctcaaagttcgaatgcactatggacatcctgatgtttttgatcggatatttcacataacccgaggtggcattagcaaggcgtctcgagtgattaatataagcgaagatatatatgccgggttcaattcgactttgcgccaagggaacatcacacaccatgaatatatccaggtggggaaagggcgtgatgttggcttgaaccaaattgcactatttgaggggaaagttgctggaggcaatgatgactgttctaactgtgtatatcttcttgtatggaagggtttatctggcactctctggccttgactactcaatatctcgccaagctaggtttttggggaacactgcactagatgcagctttgaatgctcaatttttggtccagattggtatttttacagcagtgccgatgataatgggtttcattctggagctggggctgatgaaggctgtttttagttttattacaatgcagctccagttctgttcggtgtttttcaccttttcgcttggaacaaggacacattactttggtagaacaatccttcatggcggtgcaaagtatcgtgctactggaagaggttttgttgttcggcacataaagtttgctgaaaattataggctctattctcgaagtcactttgtcaaagcgcttgaggttgctctcctcctgatcgtttacattgcatatggatacacaaaaggcggttcatcttcatttattctgattactatcagtagttggttcctcgttatgtcctggcttttcgcgccttacattttcaacccttctggtttcgagtggcaaaagactgttgaggactttgatgactggacaaactggttactttataaaggtggagttggtgtaaagggcgacaacagttgggaatcttggtgggatgaggagcaggcgcatatccagacattcagaggacgtattcttgagacaatcctcagccttagatttctcatgtttcagtatggcattgtgtacaagcttaaaattacagatcataatacttctcttgcagtttacggcttctcatggattgtactctttgttatggttcttcttttcaagctttttactgcaactcctaggaagtcgacagccttgccgacttttgttaggtttctgcagggcgtccttgctattgggataattgcaggaattgcccttcttatcgtgctcacatcattcactgttgctgatttatttgcaagtgcacttgcttttatagcaaccggctgctggccgtaacatggaagagggtagtgaaagtccttgggctatgggattcagtccgtgagattgcaaggatgtacgatgcaggaatgggagccatcatctttgtgcccatcgtcgtcttctcatggttccccttcgtgtcaacattccagtcacgtttcctcttcaatcaagcgtttagtcgaggtctggagatctccctcatccttgcagggaacaaggcgaatcagcagatttgaaaggccctgccgcatccatcgtatttttctgttgtatattctgggaattactgagagctgcttagttagtttgaacaatttaatgagctcgatttgaatgacaaccttctacataattgcccctgtaatttgtacactaattatgcggagaggcagctacggcagtagagatgagctgatgtatgtcgatttgatcttaaccaaacctctctttaaggctacgacggttcagtaggcctgcactagtatgttgcacccatccacagatataaaaagaaaaatattcttaatataaaataa

SEQ ID NO: 2497 - DNA, 3753 bp, Zea Mays
gtcaatctgaatttttatgactcatgattaattgcatataagaggatacctagcagacgcattgatcgtgtaaatgaatcagaaattacaactaagacgtatgcctcaatattttccccattttggaatgaaattatcaagagcttgcgtgaagaggactatatcagcaacaggttattgggtgaatttctttccagggaaatggatctgcttatgatgccaagtaactgtggaaatttaatgcttgtacagtggccactgtttctattgactagcaagatcatgttggcaaatgactatgcttctgactgtaaagactcgcagtatgagctatgggatagaatatcaaaagatgaatacatggcttatgccgtcaaagaatgttactacagcactgaaaaaattcttcactctttagttgatgctgaagggcagcactgggttgtaaggcttttccgagatcttaatgacagtatagcacagggttcacttttagtgactataaatctgaagaagttgcagttagtccagtctagattgacgggcttgaccggtcttctgatacgcgatgagactgctggccgtgcagctggtgttactaaagctcttcttgagctttatgaggttgttacccatgaatttctttcacagaatctgagggaacagtttgacacgtggcaactgttgttaagagccagaaatgatggacgcctattctctaagattttgtggccaaaggatccagaaatgaaagagcaacttaagcgattacacttacttcttactgtcaaggacagtgccaccaacataccaaaaaatcttgaagctcggagaagattacaatttttcactaattctctattcatggacattccacaagcaaagcctgtatctgagatgatcccttttagtgtctttaccccatactacagtgaaacagttctttatagcatgtctgagctttgtgttgagaatgaagatggcatttctatacttttctaccttcagaaaatataccctgatgagtgggctaacttcttagaacgaattggctgtggtgaatcatcagaagatgattttaaagaaagtccaagtgacaccatggaactccggttttgggtatcttatcgtggccaaactttggccaggacagtgcgtggaatgatgtactatagaagagctttgatgttacaaagttacctggagaggagatgccttgggggtattgaagatggaaattctgcagcagaatatattgacactcaaggctatgagttatctcctgatgcacgggcccaagcagatataaaatttacttatgttgtttcttgccaaatatatggactacagaagcaaacaaaaaaacaagaggctgcagatattgctctcctactgcaaagaaatgaggctcttcgggttgctttcatacacgaagaggaaatcatatcaagggatggtaaggctacaacaagagagtattattccaagcttgtgaaggctgatgttcatggcaaagaccaagaaatatactgcattaaattgcctgggaaccccaagcttggtgaaggcaaacctgagaaccaaaaccatgccataatcttcactcgaggagatgcagttcagacgatcgatatgaatcaggataactacttggaggaagcaatgaaaatgagaaatttacttgaagaatttcataatgctcatggaaaacatggcatacggaagcccacaatcctaggtgtgagggagcatgtattcacggggagtgtctcttcgctggcgtcatttatgtcgaaacaggagactagttttgttactttggggcaacgtgttcttgcttacctcaaagttcgaatgcactatggacatcctgatgtttttgatcggatatttcacataacccgaggtggcattagcaaggcgtctcgagtgattaatataagcgaagatatatatgccgggttcaattcgactttgcgccaagggaacatcacacaccatgaatatatccaggtggggaaagggcgtgatgttggcttgaaccaaattgcactatttgaggggaaagttgctggaggcaatggtgagcaagttctcagccgagatgtgtaccgtctgggccagttatttgatttcttcaggatgctaaccttctttttcaccactgttggttattatgtctgcacgatgatgactgttctaactgtgtatatcttcttgtatggaagggtttatctggcactctctggccttgactactcaatatctcgccaagctaggtttttggggaacactgcactagatgcagctttgaatgctcaatttttggtccagattggtatttttacagcagtgccgatgataatgggtttcattctggagctggggctgatgaaggctgtttttagttttattacaatgcagctccagttctgttcggtgtttttcaccttttcgcttggaacaaggacacattactttggtagaacaatccttcatggcggtgcaaagtatcgtgctactggaagaggttttgttgttcggcacataaagtttgctgaaaattataggctctattctcgaagtcactttgtcaaagcgcttgaggttgctctcctcctgatcgtttacattgcatatggatacacaaaaggcggttcatcttcatttattctgattactatcagtagttggttcctcgttatgtcctggcttttcgcgccttacattttcaacccttctggtttcgagtggcaaaagactgttgaggactttgatgactggacaaactggttactttataaaggtggagttggtgtaaagggcgacaacagttgggaatcttggtgggatgaggagcaggcgcatatccagacattcagaggacgtattcttgagacaatcctcagccttagatttctcatgtttcagtatggcattgtgtacaagcttaaaattacagatcataatacttctcttgcagtttacggcttctcatggattgtactctttgttatggttcttcttttcaagctttttactgcaactcctaggaagtcgacagccttgccgacttttgttaggtttctgcagggcgtccttgctattgggataattgcaggaattgcccttcttatcgtgctcacatcattcactgttgctgatttatttgcaagtgcacttgcttttatagcaaccggctggtgtgtcttgtgtctggccgtaacatggaagagggtagtgaaagtccttgggctatgggattcagtccgtgagattgcaaggatgtacgatgcaggaatgggagccatcatctttgtgcccatcgtcgtcttctcatggttccccttcgtgtcaacattccagtcacgtttcctcttcaatcaagcgtttagtcgaggtctggagatctccctcatccttgcagggaacaaggcgaatcagcagatttgaaaggccctgccgcatccatcgtatttttctgttgtatattctgggaattactgagagctgcttagttagtttgaacaatttaatgagctcgatttgaatgacaaccttctacataattgcccctgtaatttgtacactaattatgcggagaggcagctacggcagtagagatgagctgatgtatgtcgatttgatcttaaccaaacctctctttaaggctacgacggttcagtaggcctgcactagtatgttgcacccatccacagatataaaaagaaaaatattcttaatataaaataa

SEQ ID NO: 2498 - DNA, 3609 bp, Zea Mays
gtcaatctgaatttttatgactcatgattaattgcatataagaggatacctagcagacgcattgatcgtgtaaatgaatcagaaattacaactaagacgtatgcctcaatattttccccattttggaatgaaattatcaagagcttgcgtgaagaggactatatcagcaacagggaaatggatctgcttatgatgccaagtaactgtggaaatttaatgcttgtacagtggccactgtttctattgactagcaagatcatgttggcaaatgactatgcttctgactgtaaagactcgcagtatgagctatgggatagaatatcaaaagatgaatacatggcttatgccgtcaaagaatgttactacagcactgaaaaaattcttcactctttagttgatgctgaagggcagcactgggttgtaaggcttttccgagatcttaatgacagtatagcacagggttcacttttagtgactataaatctgaagaagttgcagttagtccagtctagattgacgggcttgaccggtcttctgatacgcgatgagactgctggccgtgcagctggtgttactaaagctcttcttgagctttatgaggttgttacccatgaatttctttcacagaatctgagggaacagtttgacacgtggcaactgttgttaagagccagaaatgatggacgcctattctctaagattttgtggccaaaggatccagaaatgaaagagcaacttaagcgattacacttacttcttactgtcaaggacagtgccaccaacataccaaaaaatcttgaagctcggagaagattacaatttttcactaattctctattcatggacattccacaagcaaagcctgtatctgagatgatcccttttagtgtctttaccccatactacagtgaaacagttctttatagcatgtctgagctttgtgttgagaatgaagatggcatttctatacttttctaccttcagaaaatataccctgatgagtgggctaacttcttagaacgaattggctgtggtgaatcatcagaagatgattttaaagaaagtccaagtgacaccatggaactccggttttgggtatcttatcgtggccaaactttggccaggacagtgcgtggaatgatgtactatagaagagctttgatgttacaaagttacctggagaggagatgccttgggggtattgaagatggaaattctgcagcagaatatattgacactcaaggctatgagttatctcctgatgcacgggcccaagcagatataaaatttacttatgttgtttcttgccaaatatatggactacagaagcaaacaaaaaaacaagaggctgcagatattgctctcctactgcaaagaaatgaggctcttcgggttgctttcatacacgaagaggaaatcatatcaagggatggtaaggctacaacaagagagtattattccaagcttgtgaaggctgatgttcatggcaaagaccaagaaatatactgcattaaattgcctgggaaccccaagcttggtgaaggcaaacctgagaaccaaaaccatgccataatcttcactcgaggagatgcagttcagacgatcgatatgaatcaggataactacttggaggaagcaatgaaaatgagaaatttacttgaagaatttcataatgctcatggaaaacatggcatacggaagcccacaatcctaggtgtgagggagcatgtattcacggggagtgtctcttcgctggcgtcatttatgtcgaaacaggagactagttttgttactttggggcaacgtgttcttgcttacctcaaagttcgaatgcactatggacatcctgatgtttttgatcggatatttcacataacccgaggtggcattagcaaggcgtctcgagtgattaatataagcgaagatatatatgccgggttcaattcgactttgcgccaagggaacatcacacaccatgaatatatccaggtggggaaagggcgtgatgttggcttgaaccaaattgcactatttgaggggaaagttgctggaggcaatgatgactgttctaactgtgtatatcttcttgtatggaagggtttatctggcactctctggccttgactactcaatatctcgccaagctaggtttttggggaacactgcactagatgcagctttgaatgctcaatttttggtccagattggtatttttacagcagtgccgatgataatgggtttcattctggagctggggctgatgaaggctgtttttagttttattacaatgcagctccagttctgttcggtgtttttcaccttttcgcttggaacaaggacacattactttggtagaacaatccttcatggcggtgcaaagtatcgtgctactggaagaggttttgttgttcggcacataaagtttgctgaaaattataggctctattctcgaagtcactttgtcaaagcgcttgaggttgctctcctcctgatcgtttacattgcatatggatacacaaaaggcggttcatcttcatttattctgattactatcagtagttggttcctcgttatgtcctggcttttcgcgccttacattttcaacccttctggtttcgagtggcaaaagactgttgaggactttgatgactggacaaactggttactttataaaggtggagttggtgtaaagggcgacaacagttgggaatcttggtgggatgaggagcaggcgcatatccagacattcagaggacgtattcttgagacaatcctcagccttagatttctcatgtttcagtatggcattgtgtacaagcttaaaattacagatcataatacttctcttgcagtttacggcttctcatggattgtactctttgttatggttcttcttttcaagctttttactgcaactcctaggaagtcgacagccttgccgacttttgttaggtttctgcagggcgtccttgctattgggataattgcaggaattgcccttcttatcgtgctcacatcattcactgttgctgatttatttgcaagtgcacttgcttttatagcaaccggctgctggccgtaacatggaagagggtagtgaaagtccttgggctatgggattcagtccgtgagattgcaaggatgtacgatgcaggaatgggagccatcatctttgtgcccatcgtcgtcttctcatggttccccttcgtgtcaacattccagtcacgtttcctcttcaatcaagcgtttagtcgaggtctggagatctccctcatccttgcagggaacaaggcgaatcagcagatttgaaaggccctgccgcatccatcgtatttttctgttgtatattctgggaattactgagagctgcttagttagtttgaacaatttaatgagctcgatttgaatgacaaccttctacataattgcccctgtaatttgtacactaattatgcggagaggcagctacggcagtagagatgagctgatgtatgtcgatttgatcttaaccaaacctctctttaaggctacgacggttcagtaggcctgcactagtatgttgcacccatccacagatataaaaagaaaaatattcttaatataaaataa

SEQ ID NO: 2499 - DNA, 2042 bp, Zea Mays
aggatacctagcagacgcattgatcgtgtaaatgaatcagaaattacaactaagacgtatgcctcaatattttccccattttggaatgaaattatcaagagcttgcgtgaagaggactatatcagcaacagggaaatggatctgcttatgatgccaagtaactgtggaaatttaatgcttgtacagtggccactgtttctattgactagcaagatcatgttggcaaatgactatgcttctgactgtaaagactcgcagtatgagctatgggatagaatatcaaaagatgaatacatggcttatgccgtcaaagaatgttactacagcactgaaaaaattcttcactctttagttgatgctgaagggcagcactgggttgtaaggcttttccgagatcttaatgacagtatagcacagggttcacttttagtgactataaatctgaagaagttgcagttagtccagtctagattgacgggcttgaccggtcttctgatacgcgatgagactgctggccgtgcagctggtgttactaaagctcttcttgagctttatgaggttgttacccatgaatttctttcacagaatctgagggaacagtttgacacgtggcaactgttgttaagagccagaaatgatggacgcctattctctaagattttgtggccaaaggatccagaaatgaaagagcaacttaagcgattacacttacttcttactgtcaaggacagtgccaccaacataccaaaaaatcttgaagctcggagaagattacaatttttcactaattctctattcatggacattccacaagcaaagcctgtatctgagatgatcccttttagtgtctttaccccatactacagtgaaacagttctttatagcatgtctgagctttgtgttgagaatgaagatggcatttctatacttttctaccttcagaaaatataccctgatgagtgggctaacttcttagaacgaattggctgtggtgaatcatcagaagatgattttaaagaaagtccaagtgacaccatggaactccggttttgggtatcttatcgtggccaaactttggccaggacagtgcgtggaatgatgtactatagaagagctttgatgttacaaagttacctggagaggagatgccttgggggtattgaagatggaaattctgcagcagaatatattgacactcaaggctatgagttatctcctgatgcacgggcccaagcagatataaaatttacttatgttgtttcttgccaaatatatggactacagaagcaaacaaaaaaacaagaggctgcagatattgctctcctactgcaaagaaatgaggctcttcgggttgctttcatacacgaagaggaaatcatatcaagggatggtaaggctacaacaagagagtattattccaagcttgtgaaggctgatgttcatggcaaagaccaagaaatatactgcattaaattgcctgggaaccccaagcttggtgaaggcaaacctgagaaccaaaaccatgccataatcttcactcgaggagatgcagttcagacgatcgatatgaatcaggataactacttggaggaagcaatgaaaatgagaaatttacttgaagaatttcataatgctcatggaaaacatggcatacggaagcccacaatcctaggtgtgagggagcatgtattcacggggagtgtctcttcgctggcgtcatttatgtcgaaacaggagactagttttgttactttggggcaacgtgttcttgcttacctcaaagttcgaatgcactatggacatcctgatgtttttgatcggatatttcacataacccgaggtggcattagcaaggcgtctcgagtgattaatataagcgaagatatatatgccgggttcaattcgactttgcgccaagggaacatcacacaccatgaatatatccaggtggggaaagggcgtgatgttggcttgaaccaaattgcactatttgaggggaaagttgctggaggcaatgcatcttatgtgtgctgagctctttc

SEQ ID NO: 2500 - DNA, 3652 bp, Zea Mays
ggatacctagcagacgcattgatcgtgtaaatgaatcagaaattacaactaagacgtatgcctcaatattttccccattttggaatgaaattatcaagagcttgcgtgaagaggactatatcagcaacagggaaatggatctgcttatgatgccaagtaactgtggaaatttaatgcttgtacagtggccactgtttctattgactagcaagatcatgttggcaaatgactatgcttctgactgtaaagactcgcagtatgagctatgggatagaatatcaaaagatgaatacatggcttatgccgtcaaagaatgttactacagcactgaaaaaattcttcactctttagttgatgctgaagggcagcactgggttgtaaggcttttccgagatcttaatgacagtatagcacagggttcacttttagtgactataaatctgaagaagttgcagttagtccagtctagattgacgggcttgaccggtcttctgatacgcgatgagactgctggccgtgcagctggtgttactaaagctcttcttgagctttatgaggttgttacccatgaatttctttcacagaatctgagggaacagtttgacacgtggcaactgttgttaagagccagaaatgatggacgcctattctctaagattttgtggccaaaggatccagaaatgaaagagcaacttaagcgattacacttacttcttactgtcaaggacagtgccaccaacataccaaaaaatcttgaagctcggagaagattacaatttttcactaattctctattcatggacattccacaagcaaagcctgtatctgagatgatcccttttagtgtctttaccccatactacagtgaaacagttctttatagcatgtctgagctttgtgttgagaatgaagatggcatttctatacttttctaccttcagaaaatataccctgaacgaattggctgtggtgaatcatcagaagatgattttaaagaaagtccaagtgacaccatggaactccggttttgggtatcttatcgtggccaaactttggccaggacagtgcgtggaatgatgtactatagaagagctttgatgttacaaagttacctggagaggagatgccttgggggtattgaagatggaaattctgcagcagaatatattgacactcaaggctatgagttatctcctgatgcacgggcccaagcagatataaaatttacttatgttgtttcttgccaaatatatggactacagaagcaaacaaaaaaacaagaggctgcagatattgctctcctactgcaaagaaatgaggctcttcgggttgctttcatacacgaagaggaaatcatatcaagggatggtaaggctacaacaagagagtattattccaagcttgtgaaggctgatgttcatggcaaagaccaagaaatatactgcattaaattgcctgggaaccccaagcttggtgaaggcaaacctgagaaccaaaaccatgccataatcttcactcgaggagatgcagttcagacgatcgatatgaatcaggataactacttggaggaagcaatgaaaatgagaaatttacttgaagaatttcataatgctcatggaaaacatggcatacggaagcccacaatcctaggtgtgagggagcatgtattcacggggagtgtctcttcgctggcgtcatttatgtcgaaacaggagactagttttgttactttggggcaacgtgttcttgcttacctcaaagttcgaatgcactatggacatcctgatgtttttgatcggatatttcacataacccgaggtggcattagcaaggcgtctcgagtgattaatataagcgaagatatatatgccgggttcaattcgactttgcgccaagggaacatcacacaccatgaatatatccaggtggggaaagggcgtgatgttggcttgaaccaaattgcactatttgaggggaaagttgctggaggcaatggtgagcaagttctcagccgagatgtgtaccgtctgggccagttatttgatttcttcaggatgctaaccttctttttcaccactgttggttattatgtctgcacgatgatgactgttctaactgtgtatatcttcttgtatggaagggtttatctggcactctctggccttgactactcaatatctcgccaagctaggtttttggggaacactgcactagatgcagctttgaatgctcaatttttggtccagattggtatttttacagcagtgccgatgataatgggtttcattctggagctggggctgatgaaggctgtttttagttttattacaatgcagctccagttctgttcggtgtttttcaccttttcgcttggaacaaggacacattactttggtagaacaatccttcatggcggtgcaaagtatcgtgctactggaagaggttttgttgttcggcacataaagtttgctgaaaattataggctctattctcgaagtcactttgtcaaagcgcttgaggttgctctcctcctgatcgtttacattgcatatggatacacaaaaggcggttcatcttcatttattctgattactatcagtagttggttcctcgttatgtcctggcttttcgcgccttacattttcaacccttctggtttcgagtggcaaaagactgttgaggactttgatgactggacaaactggttactttataaaggtggagttggtgtaaagggcgacaacagttgggaatcttggtgggatgaggagcaggcgcatatccagacattcagaggacgtattcttgagacaatcctcagccttagatttctcatgtttcagtatggcattgtgtacaagcttaaaattacagatcataatacttctcttgcagtttacggcttctcatggattgtactctttgttatggttcttcttttcaagctttttactgcaactcctaggaagtcgacagccttgccgacttttgttaggtttctgcagggcgtccttgctattgggataattgcaggaattgcccttcttatcgtgctcacatcattcactgttgctgatttatttgcaagtgcacttgcttttatagcaaccggctgctggccgtaacatggaagagggtagtgaaagtccttgggctatgggattcagtccgtgagattgcaaggatgtacgatgcaggaatgggagccatcatctttgtgcccatcgtcgtcttctcatggttccccttcgtgtcaacattccagtcacgtttcctcttcaatcaagcgtttagtcgaggtctggagatctccctcatccttgcagggaacaaggcgaatcagcagatttgaaaggccctgccgcatccatcgtatttttctgttgtatattctgggaattactgagagctgcttagttagtttgaacaatttaatgagctcgatttgaatgacaaccttctacataattgcccctgtaatttgtacactaattatgcggagaggcagctacggcagtagagatgagctgatgtatgtcgatttgatcttaaccaaacctctctttaaggctacgacggttcagtaggcctgcactagtatgttgcacccatccacagatataaaaagaaaaatattcttaatataaaataa

SEQ ID NO: 2501 - DNA, 3178 bp, Zea Mays
cccagagaggtgacagtctagatacgcgatgagactgctggccgtgcagctggtgttactaaagctcttcttgagctttatgagggaacagtttgacacgtggcaactgttgttaagagccagaaatgatggacgcctattctctaagattttgtggccaaaggatccagaaatgaaagagcaacttaagcgattacacttacttcttactgtcaaggacagtgccaccaacataccaaaaaatcttgaagctcggagaagattacaatttttcactaattctctattcatggacattccacaagcaaagcctgtatctgagatgatcccttttagtgtctttaccccatactacagtgaaacagttctttatagcatgtctgagctttgtgttgagaatgaagatggcatttctatacttttctaccttcagaaaatataccctgatgagtgggctaacttcttagaacgaattggctgtggtgaatcatcagaagatgattttaaagaaagtccaagtgacaccatggaactccggttttgggtatcttatcgtggccaaactttggccaggacagtgcgtggaatgatgtactatagaagagctttgatgttacaaagttacctggagaggagatgccttgggggtattgaagatggaaattctgcagcagaatatattgacactcaaggctatgagttatctcctgatgcacgggcccaagcagatataaaatttacttatgttgtttcttgccaaatatatggactacagaagcaaacaaaaaaacaagaggctgcagatattgctctcctactgcaaagaaatgaggctcttcgggttgctttcatacacgaagaggaaatcatatcaagggatggtaaggctacaacaagagagtattattccaagcttgtgaaggctgatgttcatggcaaagaccaagaaatatactgcattaaattgcctgggaaccccaagcttggtgaaggcaaacctgagaaccaaaaccatgccataatcttcactcgaggagatgcagttcagacgatcgatatgaatcaggataactacttggaggaagcaatgaaaatgagaaatttacttgaagaatttcataatgctcatggaaaacatggcatacggaagcccacaatcctaggtgtgagggagcatgtattcacggggagtgtctcttcgctggcgtcatttatgtcgaaacaggagactagttttgttactttggggcaacgtgttcttgcttacctcaaagttcgaatgcactatggacatcctgatgtttttgatcggatatttcacataacccgaggtggcattagcaaggcgtctcgagtgattaatataagcgaagatatatatgccgggttcaattcgactttgcgccaagggaacatcacacaccatgaatatatccaggtggggaaagggcgtgatgttggcttgaaccaaattgcactatttgaggggaaagttgctggaggcaatggtgagcaagttctcagccgagatgtgtaccgtctgggccagttatttgatttcttcaggatgctaaccttctttttcaccactgttggttattatgtctgcacgatgatgactgttctaactgtgtatatcttcttgtatggaagggtttatctggcactctctggccttgactactcaatatctcgccaagctaggtttttggggaacactgcactagatgcagctttgaatgctcaatttttggtccagattggtatttttacagcagtgccgatgataatgggtttcattctggagctggggctgatgaaggctgtttttagttttattacaatgcagctccagttctgttcggtgtttttcaccttttcgcttggaacaaggacacattactttggtagaacaatccttcatggcggtgcaaagtatcgtgctactggaagaggttttgttgttcggcacataaagtttgctgaaaattataggctctattctcgaagtcactttgtcaaagcgcttgaggttgctctcctcctgatcgtttacattgcatatggatacacaaaaggcggttcatcttcatttattctgattactatcagtagttggttcctcgttatgtcctggcttttcgcgccttacattttcaacccttctggtttcgagtggcaaaagactgttgaggactttgatgactggacaaactggttactttataaaggtggagttggtgtaaagggcgacaacagttgggaatcttggtgggatgaggagcaggcgcatatccagacattcagaggacgtattcttgagacaatcctcagccttagatttctcatgtttcagtatggcattgtgtacaagcttaaaattacagatcataatacttctcttgcagtttacggcttctcatggattgtactctttgttatggttcttcttttcaagctttttactgcaactcctaggaagtcgacagccttgccgacttttgttaggtttctgcagggcgtccttgctattgggataattgcaggaattgcccttcttatcgtgctcacatcattcactgttgctgatttatttgcaagtgcacttgcttttatagcaaccggctggtgtgtcttgtgtctggccgtaacatggaagagggtagtgaaagtccttgggctatgggattcagtccgtgagattgcaaggatgtacgatgcaggaatgggagccatcatctttgtgcccatcgtcgtcttctcatggttccccttcgtgtcaacattccagtcacgtttcctcttcaatcaagcgtttagtcgaggtctggagatctccctcatccttgcagggaacaaggcgaatcagcagatttgaaaggccctgccgcatccatcgtatttttctgttgtatattctgggaattactgagagctgcttagttagtttgaacaatttaatgagctcgatttgaatgacaaccttctacataattgcccctgtaatttgtacactaattatgcggagaggcagctacggcagtagagatgagctgatgtatgtcgatttgatcttaaccaaacctctctttaaggctacgacggttcagtaggcctgcactagtatgttgcacccatccacagatataaaaagaaaaatattcttaatataaaataa

SEQ ID NO: 2502 - DNA, 2264 bp, Zea Mays
ataagatgttatcttaggaaactttcaacaaggaaatatactgcattaaattgcctgggaaccccaagcttggtgaaggcaaacctgagaaccaaaaccatgccataatcttcactcgaggagatgcagttcagacgatcgatatgaatcaggataactacttggaggaagcaatgaaaatgagaaatttacttgaagaatttcataatgctcatggaaaacatggcatacggaagcccacaatcctaggtgtgagggagcatgtattcacggggagtgtctcttcgctggcgtcatttatgtcgaaacaggagactagttttgttactttggggcaacgtgttcttgcttacctcaaagttcgaatgcactatggacatcctgatgtttttgatcggatatttcacataacccgaggtggcattagcaaggcgtctcgagtgattaatataagcgaagatatatatgccgggttcaattcgactttgcgccaagggaacatcacacaccatgaatatatccaggtggggaaagggcgtgatgttggcttgaaccaaattgcactatttgaggggaaagttgctggaggcaatggtgagcaagttctcagccgagatgtgtaccgtctgggccagttatttgatttcttcaggatgctaaccttctttttcaccactgttggttattatgtctgcacgatgatgactgttctaactgtgtatatcttcttgtatggaagggtttatctggcactctctggccttgactactcaatatctcgccaagctaggtttttggggaacactgcactagatgcagctttgaatgctcaatttttggtccagattggtatttttacagcagtgccgatgataatgggtttcattctggagctggggctgatgaaggctgtttttagttttattacaatgcagctccagttctgttcggtgtttttcaccttttcgcttggaacaaggacacattactttggtagaacaatccttcatggcggtgcaaagtatcgtgctactggaagaggttttgttgttcggcacataaagtttgctgaaaattataggctctattctcgaagtcactttgtcaaagcgcttgaggttgctctcctcctgatcgtttacattgcatatggatacacaaaaggcggttcatcttcatttattctgattactatcagtagttggttcctcgttatgtcctggcttttcgcgccttacattttcaacccttctggtttcgagtggcaaaagactgttgaggactttgatgactggacaaactggttactttataaaggtggagttggtgtaaagggcgacaacagttgggaatcttggtgggatgaggagcaggcgcatatccagacattcagaggacgtattcttgagacaatcctcagccttagatttctcatgtttcagtatggcattgtgtacaagcttaaaattacagatcataatacttctcttgcagtttacggcttctcatggattgtactctttgttatggttcttcttttcaagctttttactgcaactcctaggaagtcgacagccttgccgacttttgttaggtttctgcagggcgtccttgctattgggataattgcaggaattgcccttcttatcgtgctcacatcattcactgttgctgatttatttgcaagtgcacttgcttttatagcaaccggctggtgtgtcttgtgtctggccgtaacatggaagagggtagtgaaagtccttgggctatgggattcagtccgtgagattgcaaggatgtacgatgcaggaatgggagccatcatctttgtgcccatcgtcgtcttctcatggttccccttcgtgtcaacattccagtcacgtttcctcttcaatcaagcgtttagtcgaggtctggagatctccctcatccttgcagggaacaaggcgaatcagcagatttgaaaggccctgccgcatccatcgtatttttctgttgtatattctgggaattactgagagctgcttagttagtttgaacaatttaatgagctcgatttgaatgacaaccttctacataattgcccctgtaatttgtacactaattatgcggagaggcagctacggcagtagagatgagctgatgtatgtcgatttgatcttaaccaaacctctctttaaggctacgacggttcagtaggcctgcactagtatgttgcacccatccacagatataaaaagaaaaatattcttaatataaaataa

SEQ ID NO: 2503 - DNA, 1551 bp, Zea Mays
ctgcaagttagtactatcctttggtttagcctgatgactgttctaactgtgtatatcttcttgtatggaagggtttatctggcactctctggccttgactactcaatatctcgccaagctaggtttttggggaacactgcactagatgcagctttgaatgctcaatttttggtccagattggtatttttacagcagtgccgatgataatgggtttcattctggagctggggctgatgaaggctgtttttagttttattacaatgcagctccagttctgttcggtgtttttcaccttttcgcttggaacaaggacacattactttggtagaacaatccttcatggcggtgcaaagtatcgtgctactggaagaggttttgttgttcggcacataaagtttgctgaaaattataggctctattctcgaagtcactttgtcaaagcgcttgaggttgctctcctcctgatcgtttacattgcatatggatacacaaaaggcggttcatcttcatttattctgattactatcagtagttggttcctcgttatgtcctggcttttcgcgccttacattttcaacccttctggtttcgagtggcaaaagactgttgaggactttgatgactggacaaactggttactttataaaggtggagttggtgtaaagggcgacaacagttgggaatcttggtgggatgaggagcaggtttacggcttctcatggattgtactctttgttatggttcttcttttcaagctttttactgcaactcctaggaagtcgacagccttgccgacttttgttaggtttctgcagggcgtccttgctattgggataattgcaggaattgcccttcttatcgtgctcacatcattcactgttgctgatttatttgcaagtgcacttgcttttatagcaaccggctggtgtgtcttgtgtgtaagcacaacatccttattttgttcgggaattacttgcattatatcaatgtgctatctaattgaatcaaatttgctggccgtaacatggaagagggtagtgaaagtccttgggctatgggattcagtccgtgagattgcaaggatgtacgatgcaggaatgggagccatcatctttgtgcccatcgtcgtcttctcatggttccccttcgtgtcaacattccagtcacgtttcctcttcaatcaagcgtttagtcgaggtctggagatctccctcatccttgcagggaacaaggcgaatcagcagatttgaaaggccctgccgcatccatcgtatttttctgttgtatattctgggaattactgagagctgcttagttagtttgaacaatttaatgagctcgatttgaatgacaaccttctacataattgcccctgtaatttgtacactaattatgcggagaggcagctacggcagtagagatgagctgatgtatgtcgatttgatcttaaccaaacctctctttaaggctacgacggttcagtaggcctgcactagtatgttgcacccatccacagatataaaaagaaaaatattcttaatataaaataa

SEQ ID NO: 2504 - DNA, 1315 bp, Zea Mays
atttttttatttttttatcgaacgcgcaggagaactgcacatcttatatattagagaggaataaaaaaccttacaaaaaggagattttgctgggcaagtctctcaaggcccccacacaaaaacccgaaggaaattacaaactggaaccgtaacttgacccgacctcggccagagctacaactaagcctaggctctcaagctccttagctcctgctattgcccagctaacacactcatctttgtttttataatgatagatgagaaggttgagttctatagttcttttatctttgtttttcaggtacaattcttatagttctttttatctttgtttttaggtacaagtcatatagttccataactctatgccatgcttttggagtatctggagcgatacagcacttggcaggaatgatcgaatgagactcgaaggttaataaagatgttgatgcccccatatttcaggttgcagattacggagtggttgctgatctgtttgaggttctggatgagttactgaagcagatcccaaagaagaaataagcgaccgttaatttgttgctgatgttttccctttttctgaagaaggaacctttggaatattggtgattggcctgaagaaggtagaaagggtggtctggatcaacgacaaaggctgccagatggatctcttatggatattgttttaagtctacccacttgatgctgtctacgatttccctgaagatgtcaaatcgaacaaaagatgtgcaggtgcatcaaactggacagtaaaggacattgttgaatcagtgaggaatgaatttggtagcattgacatattagtgcattctcttgccaatggcccagaggatcttctgtttttggcttgtagtcatctagataacagaactacaatgactagagtgtccagaatggattttggagattttgatatctaaccatgaggatgtggaggcaacaattcattgtgcggagtgactctcaatggttggacgatcttgcactggaggccaaaggatcagaccaagaagtgggtgctacaatttcagcaacccgtataacaacacaatatcagcaggaacagctgactgtcagccatgaaacgctgactacactttcagcaggaactccaccacgcatgaaaggatggctagttaaaaaatcacccccaagaagaagaaagtgtgaagtatttgtgttttgtgtgtgaactgaaatctgggaactatgtatctgtggtttgtgtctgtgtactgaaatctgggaactgaaactatgtatgtgtggtttctgtgtgtgaactggaactgag

SEQ ID NO: 2505 - DNA, 4052 bp, Zea Mays
atggctcgtgtccttcgcctggcgcttgggcttaacctgcagcgggtggtggtcgagggcgacggcctcatgcttgtgcggctgctccgtggcgaggacaagcggacgcggatccctgtggcgctgcagaaggagatccacgggctgcttcgctgttttgcagggtgcgatgtgaggcatgtgtaccgcgaggggaaccaggtggcgcacaccctttgccgtcaggcctaccactgccccgccgtgtgggtagggactgtaccgtccgtcgtgtttgacaaggccgaggaggaccggcgtggcgtattgcatgagcgctcggtggtccgatgattggctgggcatacaaagttctggatgagaaatttgcaatatcaccaccctggaaaggtggcttcgctgcattgccaccgttgagcacgctgaagtgccaatatcaatcactttcttgctgttcttatgccatcatgcctcattcacgagttcttttcaactgtgcaacccaaaaaaacggccgtgcccttggctgtgtttgcgggctttggcttgacatttggccaaaaaacagaaccagacagcctgcaattgctctctaggcaaccggcttcagttttggcatcatgcttgttctccatactgctgacaccaatctcctgtgccatgaaccttgatgtgtggtgaacaaatccttatccgtacaagatatatatgacaacacccatacatgttttagtatctcagtttaggactacagaatccaaaacaaactgcacaattaaacatgtgactcagtttagcactacaaccacaaatatttcagtttaggactacaaccacaaatagaatcctaagagttctttctttttcttccttggggtcagtttcttttgaactatcttcttggtagacgttgctatcttggttgaagtaggcatagttgtctgagaagaattgctttctaacagagcagcaagtcgcctgcacaaattttggaattacctttttgtcattgttgctccagggcgctcttgaattatggtttccctagttgttattggcctatatggtgttgccatctgacttttaccacttgatttagtactattcttcctaggctttctcatcgttttcttcgtaccattgagtgggcatttctaactaacttttgtgtgacccaatgtaccgcatcttttgcacctacgttttcctcttatcatcgttttgggcttttcttgttcagttggttttgcctttgaactggtgccaccttcatcatgttttgtctctgaactgttgccgccttgaagggaacttttgaacctcaaatttctgtctgctaacagttcttttgcaaattggtgcacccatatcaaatggaagttctactgtgggccattgtgacttgtcaggcagtggctctatcaatcttttatatgcctatctgaactttgcaacagagtagtattcatgaacaaatcctcaagcttcacatttctgttttacactgctgttagcaaggccaatgcatgctcgcaaggcttgccggtatgttgctactcttcacaagtgcagtcatgtaaatgttccttgatagcatgtcgatcatgatgattgtggctgctgtcgtacacttctgcatcatgttgtcagctttcacaacatttaagtgtcccaaccatctagttcttgcatttatttggtgtaggacagctggtagtatcttgccttgaagtcgttctccaatttttcttatcttctcccgtggtatcattatcatttcccttaccttatcaacaatatcagtcactggcaagtcctttatgtctctactctctaatccaattgttgaaacactccgctagattgttagtaatataatcacacttaatttcttggttgaagtcacatctcatccatttcagtgaatggtgttcatcaagggtacatacgtgaataaatgacaccactatatctcttcataaagtgcatgaggtacctaaaacattccctttgatcagcataaggaaacacttgtaccactgccttttctaatcccttacaagcatctgtgcaaattgctagctgaggcatgtctcctatggccctacgcaactgcttcataaaccaaacccagttatactctggttcagattgtattaatccaaatgcaacaggatacatccagttatgaccatctatatctgttactgatgccaattggccgttccacctaccatttagtgcagataaggcctacatcctgctaaaaaactctcaatgcaaggagcaagtgcacaataaaatcgagttagaggggcgacctatctttggttagcaactcgaacagccgaaatacgtaaacaaaaccacatagcagaatagattatataccttaggttcatgtcccaagagttggagttgggttccatgtccaaatctggcatagcaccacctctccaagggcaatggatcacatatttagagctaacatcacaaaatctattggttcatgcgtccaaaaaacaagggattttagaaatcgaaggaggataacagaaacgaagggaatacaactggaacaccattcttacctcaaatctgctgcctgtgggcttggagaaccaaatgttgagttatgcgtgcttgagtgtccaatcctctgtgcgccgccggggagaactcaacgctcgttcatttttagtccaagcaaacagaggcaagatgaccttatcttgacctaaggacagagctatttttttcccgtgggctggagagctgtaaaagaacaagttgatggattatatgaggctggatggcataacaacagtgagggatcagttgatagtggcaatgcagcgaagccacctttccggggtggggatcttgcaaatttctcagcgaagccatctttttatctttgtttttaggtacatttcatatagttccataactctatgccatgcttttggagtatcttgaattatggtttccctagttgttattggctatatggtcttgccatctgacttttaccacttgatttactattcctaggctttctcttcgttttctttgtaccattgagttggcatttgtaactaacttttgtgtgacccaatgtaccgcatcttttgcacctacgttttcctcttaccatcgttttgggcttttcttgttcagttggttttgcctttgaactgatgccaccttcatcatgttttgtctctgaactgttgccgccttgaagggaacttttgaacctcaaatttctgtctgccaacagttcttttgcaaattggtgcacccatatcaaatggaatttctactgtgggccattgtgacttgtcaggcagtggctctatcaatcttttatatgcctatctgaacattggaacagagtagtattcatgaacaaatcctcaagcttcacatttctgttttgcactgctgttagcaaggccaatgcatgctcgcaaggcttgccagtatgttgctactcttcacaagtgcagtcatgtaaatgttccttgatagcatgtcgatcatgatgattgtggctgctgtcgtacacctctgcatcatgtaagtcagctttcacaacagttaagtgtcccaaccctctagttcttgcattcaattggtggaggacagctggtagtatcttgccttgaagtcgttctccaatttttcttatcttctcccgtggtatcattatcatttcccttatcttatcaacatgatcagtcactggcaagtcctttatgtctctactctctaatccaattgttgaaacactccgctagattgttagtaatataatcacacttaatttcttggttgaagtcacatctcatccatttcagtgaatggtgttcatcaaggtacttgaacacatcattgctacctgagaacatttgggtcatgtggtactgaaatttgtccttcttataagtctcaactgcagggtacatacgtgaataaatgacaccactatatctcttcataaagttttgcgtgaggaatgatcgaatgagactcgaaggttaataaag

SEQ ID NO: 2506 - DNA, 1523 bp, Zea Mays
ccgctaacgacgttaaagtcaggctcacagacggcctgtatgacccttgcctctgcctttcccttttctcctcctatccctaacgcagccgccgccgccgctcggctctcccttgccaatgcacacatgcactcgccgccgccgctcgactctcccctcccaatggcaccccgtcgctcaccatcaaatgtttcctcccctacaagtgcaagatcgccaatgagatattgatggcgctgttggtggacccacctgacatcaagagggagatgtagatggagatgcagcccgcaccaccaccatctgctgcggcgtcggcatcgcagacggcgtggccactggattggccggtggacgggcgctcgctcaatcctccatcgccgcccactatatcagtccagtatgtgagtcatattgattttataattgattttatgcgccagttcttgcctcgactaatgggtcctcttccattttgtaatcacctctgcatgtttactgtatcactttggtaaattactattgttccatgttgtcttccacaacatactgcactagttcagtggttagtttcctattcaaccatttcgtaatgaaggaggtattggtatttaggtaaatatttatttatgattgtgctggtattatctcaataggctggaaaattttaaataacctaatatgacataaacctcaactgcccatgcactcttagttgttgttttgaaccggtctttcgttgtttttcttttcaccaaaaaataaaatcttgatgatgtgtgacacacctgtttggttatatcatgttatctatgtagttcggccaattaaactatgttatcaggtataactagatgaggcaaattatatatatatatatatatatatatatatcgaaataaattgttttatgaatatccaaataaaccatatagtgtcgaagctgggtactttccattgccatcattaatggacaacaatatgctactatctcacatatattatgaaatgtttctacacgcatggagcatttcttgcagtagagcgctaggtatgctctctatgcctacgatgatttatatgaggatgacttagataaggaggtggatcacatgtcagtttcgagcaaggtgtttggactggaatgcgcacagtctgttactttgatgcaaaacgtatgaattggttggacagagccgccaacgaagtaccatgggatgtgctggacaatgaaagcttctgtcttgaaataataggatacaagaagcttgcaagtggttttgtgaaggcttttgtgaatcacttgaatcattagttcttttaagaatggttttgtaaagcgttagcaaatatgtgtaaaacacaataagatgtgtggcaaattcagtgatctagttgtacaattttttgtgtttatgggatatgtggatatttcattgtggaatgttaatgaagtgtgtatgtctatgtgattatgtgtataaaatatatgttttgtggtgcttttgtgataatatctattc

SEQ ID NO: 2507 - DNA, 1656 bp, Zea Mays
ccgctaacgacgttaaagtcaggctcacagacggcctgtatgacccttgcctctgcctttcccttttctcctcctatccctaacgcagccgccgccgccgctcggctctcccttgccaatgcacacatgcactcgccgccgccgctcgactctcccctcccaatggcaccccgtcgctcaccatcaaatgtttcctcccctacaagtgcaagatcgccaatgaggtggtatagccatccgccacacctgccactgtccctttgccatttctggtcctagatctgtgttacctgcatttttctttgccacgggatcgggatggtggaggagcagctggtggggattagcatcttgcttcagatatctattctcgtgctctcgttcatgctcagatattgatggcgctgttggtggacccacctgacatcaagagggagatgtagatggagatgcagcccgcaccaccaccatctgctgcggcgtcggcatcgcagacggcgtggccactggattggccggtggacgggcgctcgctcaatcctccatcgccgcccactatatcagtccagtatgtgagtcatattgattttataattgattttatgcgccagttcttgcctcgactaatgggtcctcttccattttgtaatcacctctgcatgtttactgtatcactttggtaaattactattgttccatgttgtcttccacaacatactgcactagttcagtggttagtttcctattcaaccatttcgtaatgaaggaggtattggtatttaggtaaatatttatttatgattgtgctggtattatctcaataggctggaaaattttaaataacctaatatgacataaacctcaactgcccatgcactcttagttgttgttttgaaccggtctttcgttgtttttcttttcaccaaaaaataaaatcttgatgatgtgtgacacacctgtttggttatatcatgttatctatgtagttcggccaattaaactatgttatcaggtataactagatgaggcaaattatatatatatatatatatatatatatatcgaaataaattgttttatgaatatccaaataaaccatatagtgtcgaagctgggtactttccattgccatcattaatggacaacaatatgctactatctcacatatattatgaaatgtttctacacgcatggagcatttcttgcagtagagcgctaggtatgctctctatgcctacgatgatttatatgaggatgacttagataaggaggtggatcacatgtcagtttcgagcaaggtgtttggactggaatgcgcacagtctgttactttgatgcaaaacgtatgaattggttggacagagccgccaacgaagtaccatgggtaaggatacaagaagcttgcaagtggttttgtgaaggcttttgtgaatcacttgaatcattagttcttttaagaatggttttgtaaagcgttagcaaatatgtgtaaaacacaataagatgtgtggcaaattcagtgatctagttgtacaattttttgtgtttatgggatatgtggatatttcattgtggaatgttaatgaagtgtgtatgtctatgtgattatgtgtataaaatatatgttttgtggtgcttttgtgataatatctattc

SEQ ID NO: 2508 - DNA, 1528 bp, Zea Mays
ccgctaacgacgttaaagtcaggctcacagacggcctgtatgacccttgcctctgcctttcccttttctcctcctatccctaacgcagccgccgccgccgctcggctctcccttgccaatgcacacatgcactcgccgccgccgctcgactctcccctcccaatggcaccccgtcgctcaccatcaaatgtttcctcccctacaagtgcaagatcgccaatgagatattgatggcgctgttggtggacccacctgacatcaagagggagatgtagatggagatgcagcccgcaccaccaccatctgctgcggcgtcggcatcgcagacggcgtggccactggattggccggtggacgggcgctcgctcaatcctccatcgccgcccactatatcagtccagtatgtgagtcatattgattttataattgattttatgcgccagttcttgcctcgactaatgggtcctcttccattttgtaatcacctctgcatgtttactgtatcactttggtaaattactattgttccatgttgtcttccacaacatactgcactagttcagtggttagtttcctattcaaccatttcgtaatgaaggaggtattggtatttaggtaaatatttatttatgattgtgctggtattatctcaataggctggaaaattttaaataacctaatatgacataaacctcaactgcccatgcactcttagttgttgttttgaaccggtctttcgttgtttttcttttcaccaaaaaataaaatcttgatgatgtgtgacacacctgtttggttatatcatgttatctatgtagttcggccaattaaactatgttatcaggtataactagatgaggcaaattatatatatatatatatatatatatatatcgaaataaattgttttatgaatatccaaataaaccatatagtgtcgaagctgggtactttccattgccatcattaatggacaacaatatgctactatctcacatatattatgaaatgtttctacacgcatggagcatttcttgcagtagagcgctaggtatgctctctatgcctacgatgatttatatgaggatgacttagataaggaggtggatcacatgtcagtttcgagcaaggtgtttggactggaatgcgcacagtctgttactttgatgcaaaacgtatgaattggttggacagagccgccaacgaagtaccatgggtaaggatgtgctggacaatgaaagcttctgtcttgaaataataggatacaagaagcttgcaagtggttttgtgaaggcttttgtgaatcacttgaatcattagttcttttaagaatggttttgtaaagcgttagcaaatatgtgtaaaacacaataagatgtgtggcaaattcagtgatctagttgtacaattttttgtgtttatgggatatgtggatatttcattgtggaatgttaatgaagtgtgtatgtctatgtgattatgtgtataaaatatatgttttgtggtgcttttgtgataatatctattc

SEQ ID NO: 2509 - DNA, 934 bp, Zea Mays
gctaacgacgttaaagtcaggctcacagacggcctgtatgacccttgcctctgcctttcccttttctcctcctatccctaacgcagccgccgccgccgctcggctctcccttgccaatgcacacatgcactcgccgccgccgctcgactctcccctcccaatggcaccccgtcgctcaccatcaaatgtttcctcccctacaagtgcaagatcgccaatgagatattgatggcgctgttggtggacccacctgacatcaagagggagatgtagatggagatgcagcccgcaccaccaccatctgctgcggcgtcggcatcgcagacggcgtggccactggattggccggtggacgggcgctcgctcaatcctccatcgccgcccactatatcagtccagtatagcgctaggtatgctctctatgcctacgatgatttatatgaggatgacttagataaggaggtggatcacatgtcagtttcgagcaaggattggccaccagggtcgtggagtatatgttgcccaattttaatgaggtgtttggactggaatgcgcacagtctgttactttgatgcaaaacgtatgaattggttggacagagccgccaacgaagtaccatgggtaaggatgtgctggacaatgaaagcttctgtcttgaaataataggatacaagaagcttgcaagtggttttgtgaaggcttttgtgaatcacttgaatcattagttcttttaagaatggttttgtaaagcgttagcaaatatgtgtaaaacacaataagatgtgtggcaaattcagtgatctagttgtacaattttttgtgtttatgggatatgtggatatttcattgtggaatgttaatgaagtgtgtatgtctatgtgattatgtgtataaaatatatgttttgtggtgcttttgtgataatatctattc

SEQ ID NO: 2510 - DNA, 1329 bp, Zea Mays
ctaacgacgttaaagtcaggctcacagacggcctgtatgacccttgcctctgcctttcccttttctcctcctatccctaacgcagccgccgccgccgctcggctctcccttgccaatgcacacatgcactcgccgccgccgctcgactctcccctcccaatggcaccccgtcgctcaccatcaaatgtttcctcccctacaagtgcaagatcgccaatgaggtggtatagccatccgccacacctgccactgtccctttgccatttctggtcctagatctgtgttacctgcatttttctttgccacgggatcgggatggtggaggagcagctggtggggattagcatcttgcttcagatatctattctcgtgctctcgttcatgctcagatattgatggcgctgttggtggacccacctgacatcaagagggagatgtagatggagatgcagcccgcaccaccaccatctgctgcggcgtcggcatcgcagacggcgtggccactggattggccggtggacgggcgctcgctcaatcctccatcgccgcccactatatcagtccagtatgtgagtcatattgattttataattgattttatgcgccagttcttgcctcgactaatgggtcctcttccattttgtaatcacctctgcatgtttactgtatcactttggtaaattactattgttccatgttgtcttccacaacatactgcactagttcagtggttagtttcctattcaaccatttcgtaatgaaggaggtattggtatttaggtaaatatttatttatgattgtgctggtattatctcaataggctggaaaattttaaataacctaatatgacataaacctcaactgcccatgcactcttagttgttgttttgaaccggtctttcgttgtttttcttttcaccaaaaaataaaatcttgatgatgtgtgacacacctgtttggttatatcatgttatctatgtagttcggccaattaaactatgttatcaggtataactagatgaggcaaattatatatatatatatatatatatatatatcgaaataaattgttttatgaatatccaaataaaccatatagtgtcgaagctgggtactttccattgccatcattaatggacaacaatatgctactatctcacatatattatgaaatgtttctacacgcatggagcatttcttgcagtagagcgctaggtatgctctctatgcctacgatgatttatatgaggatgacttagataaggaggtggatcacatgtcagtttcgagcaagtggtttgtagctatctgtcattgcacactgattc

SEQ ID NO: 2511 - DNA, 1575 bp, Zea Mays
ctaacgacgttaaagtcaggctcacagacggcctgtatgacccttgcctctgcctttcccttttctcctcctatccctaacgcagccgccgccgccgctcggctctcccttgccaatgcacacatgcactcgccgccgccgctcgactctcccctcccaatggcaccccgtcgctcaccatcaaatgtttcctcccctacaagtgcaagatcgccaatgagatattgatggcgctgttggtggacccacctgacatcaagagggagatgtagatggagatgcagcccgcaccaccaccatctgctgcggcgtcggcatcgcagacggcgtggccactggattggccggtggacgggcgctcgctcaatcctccatcgccgcccactatatcagtccagtatgtgagtcatattgattttataattgattttatgcgccagttcttgcctcgactaatgggtcctcttccattttgtaatcacctctgcatgtttactgtatcactttggtaaattactattgttccatgttgtcttccacaacatactgcactagttcagtggttagtttcctattcaaccatttcgtaatgaaggaggtattggtatttaggtaaatatttatttatgattgtgctggtattatctcaataggctggaaaattttaaataacctaatatgacataaacctcaactgcccatgcactcttagttgttgttttgaaccggtctttcgttgtttttcttttcaccaaaaaataaaatcttgatgatgtgtgacacacctgtttggttatatcatgttatctatgtagttcggccaattaaactatgttatcaggtataactagatgaggcaaattatatatatatatatatatatatatatatcgaaataaattgttttatgaatatccaaataaaccatatagtgtcgaagctgggtactttccattgccatcattaatggacaacaatatgctactatctcacatatattatgaaatgtttctacacgcatggagcatttcttgcagtagagcgctaggtatgctctctatgcctacgatgatttatatgaggatgacttagataaggaggtggatcacatgtcagtttcgagcaagtaggattggccaccagggtcgtggagtatatgttgcccaattttaatgaggtgtttggactggaatgcgcacagtctgttactttgatgcaaaacgtatgaattggttggacagagccgccaacgaagtaccatgggtaaggatgtgctggacaatgaaagcttctgtcttgaaataataggatacaagaagcttgcaagtggttttgtgaaggcttttgtgaatcacttgaatcattagttcttttaagaatggttttgtaaagcgttagcaaatatgtgtaaaacacaataagatgtgtggcaaattcagtgatctagttgtacaattttttgtgtttatgggatatgtggatatttcattgtggaatgttaatgaagtgtgtatgtctatgtgattatgtgtataaaatatatgttttgtggtgcttttgtgataatatctattc

SEQ ID NO: 2512 - DNA, 1976 bp, Zea Mays
ctaacgacgttaaagtcaggctcacagacggcctgtatgacccttgcctctgcctttcccttttctcctcctatccctaacgcagccgccgccgccgctcggctctcccttgccaatgcacacatgcactcgccgccgccgctcgactctcccctcccaatggcaccccgtcgctcaccatcaaatgtttcctcccctacaagtgcaagatcgccaatgagatattgatggcgctgttggtggacccacctgacatcaagagggagatgtagatggagatgcagcccgcaccaccaccatctgctgcggcgtcggcatcgcagacggcgtggccactggattggccggtggacgggcgctcgctcaatcctccatcgccgcccactatatcagtccagtatgtgagtcatattgattttataattgattttatgcgccagttcttgcctcgactaatgggtcctcttccattttgtaatcacctctgcatgtttactgtatcactttggtaaattactattgttccatgttgtcttccacaacatactgcactagttcagtggttagtttcctattcaaccatttcgtaatgaaggaggtattggtatttaggtaaatatttatttatgattgtgctggtattatctcaataggctggaaaattttaaataacctaatatgacataaacctcaactgcccatgcactcttagttgttgttttgaaccggtctttcgttgtttttcttttcaccaaaaaataaaatcttgatgatgtgtgacacacctgtttggttatatcatgttatctatgtagttcggccaattaaactatgttatcaggtataactagatgaggcaaattatatatatatatatatatatatatatatcgaaataaattgttttatgaatatccaaataaaccatatagtgtcgaagctgggtactttccattgccatcattaatggacaacaatatgctactatctcacatatattatgaaatgtttctacacgcatggagcatttcttgcagtagagcgctaggtatgctctctatgcctacgatgatttatatgaggatgacttagataaggaggtggatcacatgtcagtttcgagcaaggattggccaccagggtcgtggagtatatgttgcccaattttaatgaggtctggtgggatatcattaccttagatatcttgatatgcaaatagtttggtgagacatttgaagataattgatgttcatgtcacaaacattcagttaccttgtttatattaatgtgatctgcaataagttagaattaagcagccgacatgtcctccgtttgcttgattttatacagtttctttacatcagatatatatctattagtcagaaaggaaaataaaaactaatacatatttgacatacttctgacatcacattttgtttgactatactatttaatgttatgccacttgtcgaatatgcatggccttgggaatccaagaagaattgttggcatttgtaacattatttggtaatgatagttctatgctttctacttaaacaacaattatttttgatgcaggtgtttggactggaatgcgcacagtctgttactttgatgcaaaacgtatgaattggttggacagagccgccaacgaagtaccatgggtaaggatgtgctggacaatgaaagcttctgtcttgaaataataggatacaagaagcttgcaagtggttttgtgaaggcttttgtgaatcacttgaatcattagttcttttaagaatggttttgtaaagcgttagcaaatatgtgtaaaacacaataagatgtgtggcaaattcagtgatctagttgtacaattttttgtgtttatgggatatgtggatatttcattgtggaatgttaatgaagtgtgtatgtctatgtgattatgtgtataaaatatatgttttgtggtgcttttgtgataatatctattc

SEQ ID NO: 2513 - DNA, 1979 bp, Zea Mays
ctaacgacgttaaagtcaggctcacagacggcctgtatgacccttgcctctgcctttcccttttctcctcctatccctaacgcagccgccgccgccgctcggctctcccttgccaatgcacacatgcactcgccgccgccgctcgactctcccctcccaatggcaccccgtcgctcaccatcaaatgtttcctcccctacaagtgcaagatcgccaatgaggtgatattgatggcgctgttggtggacccacctgacatcaagagggagatgtagatggagatgcagcccgcaccaccaccatctgctgcggcgtcggcatcgcagacggcgtggccactggattggccggtggacgggcgctcgctcaatcctccatcgccgcccactatatcagtccagtatgtgagtcatattgattttataattgattttatgcgccagttcttgcctcgactaatgggtcctcttccattttgtaatcacctctgcatgtttactgtatcactttggtaaattactattgttccatgttgtcttccacaacatactgcactagttcagtggttagtttcctattcaaccatttcgtaatgaaggaggtattggtatttaggtaaatatttatttatgattgtgctggtattatctcaataggctggaaaattttaaataacctaatatgacataaacctcaactgcccatgcactcttagttgttgttttgaaccggtctttcgttgtttttcttttcaccaaaaaataaaatcttgatgatgtgtgacacacctgtttggttatatcatgttatctatgtagttcggccaattaaactatgttatcaggtataactagatgaggcaaattatatatatatatatatatatatatatatcgaaataaattgttttatgaatatccaaataaaccatatagtgtcgaagctgggtactttccattgccatcattaatggacaacaatatgctactatctcacatatattatgaaatgtttctacacgcatggagcatttcttgcagtagagcgctaggtatgctctctatgcctacgatgatttatatgaggatgacttagataaggaggtggatcacatgtcagtttcgagcaaggattggccaccagggtcgtggagtatatgttgcccaattttaatgaggtctggtgggatatcattaccttagatatcttgatatgcaaatagtttggtgagacatttgaagataattgatgttcatgtcacaaacattcagttaccttgtttatattaatgtgatctgcaataagttagaattaagcagccgacatgtcctccgtttgcttgattttatacagtttctttacatcagatatatatctattagtcagaaaggaaaataaaaactaatacatatttgacatacttctgacatcacattttgtttgactatactatttaatgttatgccacttgtcgaatatgcatggccttgggaatccaagaagaattgttggcatttgtaacattatttggtaatgatagttctatgctttctacttaaacaacaattatttttgatgcaggtgtttggactggaatgcgcacagtctgttactttgatgcaaaacgtatgaattggttggacagagccgccaacgaagtaccatgggtaaggatgtgctggacaatgaaagcttctgtcttgaaataataggatacaagaagcttgcaagtggttttgtgaaggcttttgtgaatcacttgaatcattagttcttttaagaatggttttgtaaagcgttagcaaatatgtgtaaaacacaataagatgtgtggcaaattcagtgatctagttgtacaattttttgtgtttatgggatatgtggatatttcattgtggaatgttaatgaagtgtgtatgtctatgtgattatgtgtataaaatatatgttttgtggtgcttttgtgataatatctattc

SEQ ID NO: 2514 - DNA, 1570 bp, Zea Mays
ctaacgacgttaaagtcaggctcacagacggcctgtatgacccttgcctctgcctttcccttttctcctcctatccctaacgcagccgccgccgccgctcggctctcccttgccaatgcacacatgcactcgccgccgccgctcgactctcccctcccaatggcaccccgtcgctcaccatcaaatgtttcctcccctacaagtgcaagatcgccaatgagatattgatggcgctgttggtggacccacctgacatcaagagggagatgtagatggagatgcagcccgcaccaccaccatctgctgcggcgtcggcatcgcagacggcgtggccactggattggccggtggacgggcgctcgctcaatcctccatcgccgcccactatatcagtccagtatgtgagtcatattgattttataattgattttatgcgccagttcttgcctcgactaatgggtcctcttccattttgtaatcacctctgcatgtttactgtatcactttggtaaattactattgttccatgttgtcttccacaacatactgcactagttcagtggttagtttcctattcaaccatttcgtaatgaaggaggtattggtatttaggtaaatatttatttatgattgtgctggtattatctcaataggctggaaaattttaaataacctaatatgacataaacctcaactgcccatgcactcttagttgttgttttgaaccggtctttcgttgtttttcttttcaccaaaaaataaaatcttgatgatgtgtgacacacctgtttggttatatcatgttatctatgtagttcggccaattaaactatgttatcaggtataactagatgaggcaaattatatatatatatatatatatatatatatcgaaataaattgttttatgaatatccaaataaaccatatagtgtcgaagctgggtactttccattgccatcattaatggacaacaatatgctactatctcacatatattatgaaatgtttctacacgcatggagcatttcttgcagtagagcgctaggtatgctctctatgcctacgatgatttatatgaggatgacttagataaggaggtggatcacatgtcagtttcgagcaagtaggattggccaccagggtcgtggagtatatgttgcccaattttaatgaggtgtttggactggaatgcgcacagtctgttactttgatgcaaaacgtatgaattggttggacagagccgccaacgaagtaccatgggatgtgctggacaatgaaagcttctgtcttgaaataataggatacaagaagcttgcaagtggttttgtgaaggcttttgtgaatcacttgaatcattagttcttttaagaatggttttgtaaagcgttagcaaatatgtgtaaaacacaataagatgtgtggcaaattcagtgatctagttgtacaattttttgtgtttatgggatatgtggatatttcattgtggaatgttaatgaagtgtgtatgtctatgtgattatgtgtataaaatatatgttttgtggtgcttttgtgataatatctattc

SEQ ID NO: 2515 - DNA, 1789 bp, Zea Mays
ctaacgacgttaaagtcaggctcacagacggcctgtatgacccttgcctctgcctttcccttttctcctcctatccctaacgcagccgccgccgccgctcggctctcccttgccaatgcacacatgcactcgccgccgccgctcgactctcccctcccaatggcaccccgtcgctcaccatcaaatgtttcctcccctacaagtgcaagatcgccaatgaggtggtatagccatccgccacacctgccactgtccctttgccatttctggtcctagatctgtgttacctgcatttttctttgccacgggatcgggatggtggaggagcagctggtggggattagcatcttgcttcagatatctattctcgtgctctcgttcatgctcagatattgatggcgctgttggtggacccacctgacatcaagagggagatgtagatggagatgcagcccgcaccaccaccatctgctgcggcgtcggcatcgcagacggcgtggccactggattggccggtggacgggcgctcgctcaatcctccatcgccgcccactatatcagtccagtatgtgagtcatattgattttataattgattttatgcgccagttcttgcctcgactaatgggtcctcttccattttgtaatcacctctgcatgtttactgtatcactttggtaaattactattgttccatgttgtcttccacaacatactgcactagttcagtggttagtttcctattcaaccatttcgtaatgaaggaggtattggtatttaggtaaatatttatttatgattgtgctggtattatctcaataggctggaaaattttaaataacctaatatgacataaacctcaactgcccatgcactcttagttgttgttttgaaccggtctttcgttgtttttcttttcaccaaaaaataaaatcttgatgatgtgtgacacacctgtttggttatatcatgttatctatgtagttcggccaattaaactatgttatcaggtataactagatgaggcaaattatatatatatatatatatatatatatatcgaaataaattgttttatgaatatccaaataaaccatatagtgtcgaagctgggtactttccattgccatcattaatggacaacaatatgctactatctcacatatattatgaaatgtttctacacgcatggagcatttcttgcagtagagcgctaggtatgctctctatgcctacgatgatttatatgaggatgacttagataaggaggtggatcacatgtcagtttcgagcaaggattggccaccagggtcgtggagtatatgttgcccaattttaatgaggtctggtgggatatcattaccttagatatcttgatatgcaaatagtttggtgtttggactggaatgcgcacagtctgttactttgatgcaaaacgtatgaattggttggacagagccgccaacgaagtaccatgggtaaggatgtgctggacaatgaaagcttctgtcttgaaataataggatacaagaagcttgcaagtggttttgtgaaggcttttgtgaatcacttgaatcattagttcttttaagaatggttttgtaaagcgttagcaaatatgtgtaaaacacaataagatgtgtggcaaattcagtgatctagttgtacaattttttgtgtttatgggatatgtggatatttcattgtggaatgttaatgaagtgtgtatgtctatgtgattatgtgtataaaatatatgttttgtggtgcttttgtgataatatctattc

SEQ ID NO: 2516 - DNA, 1572 bp, Zea Mays
ctaacgacgttaaagtcaggctcacagacggcctgtatgacccttgcctctgcctttcccttttctcctcctatccctaacgcagccgccgccgccgctcggctctcccttgccaatgcacacatgcactcgccgccgccgctcgactctcccctcccaatggcaccccgtcgctcaccatcaaatgtttcctcccctacaagtgcaagatcgccaatgagatattgatggcgctgttggtggacccacctgacatcaagagggagatgtagatggagatgcagcccgcaccaccaccatctgctgcggcgtcggcatcgcagacggcgtggccactggattggccggtggacgggcgctcgctcaatcctccatcgccgcccactatatcagtccagtatgtgagtcatattgattttataattgattttatgcgccagttcttgcctcgactaatgggtcctcttccattttgtaatcacctctgcatgtttactgtatcactttggtaaattactattgttccatgttgtcttccacaacatactgcactagttcagtggttagtttcctattcaaccatttcgtaatgaaggaggtattggtatttaggtaaatatttatttatgattgtgctggtattatctcaataggctggaaaattttaaataacctaatatgacataaacctcaactgcccatgcactcttagttgttgttttgaaccggtctttcgttgtttttcttttcaccaaaaaataaaatcttgatgatgtgtgacacacctgtttggttatatcatgttatctatgtagttcggccaattaaactatgttatcaggtataactagatgaggcaaattatatatatatatatatatatatatatatcgaaataaattgttttatgaatatccaaataaaccatatagtgtcgaagctgggtactttccattgccatcattaatggacaacaatatgctactatctcacatatattatgaaatgtttctacacgcatggagcatttcttgcagtagagcgctaggtatgctctctatgcctacgatgatttatatgaggatgacttagataaggaggtggatcacatgtcagtttcgagcaaggattggccaccagggtcgtggagtatatgttgcccaattttaatgaggtgtttggactggaatgcgcacagtctgttactttgatgcaaaacgtatgaattggttggacagagccgccaacgaagtaccatgggtaaggatgtgctggacaatgaaagcttctgtcttgaaataataggatacaagaagcttgcaagtggttttgtgaaggcttttgtgaatcacttgaatcattagttcttttaagaatggttttgtaaagcgttagcaaatatgtgtaaaacacaataagatgtgtggcaaattcagtgatctagttgtacaattttttgtgtttatgggatatgtggatatttcattgtggaatgttaatgaagtgtgtatgtctatgtgattatgtgtataaaatatatgttttgtggtgcttttgtgataatatctattc

SEQ ID NO: 2517 - DNA, 951 bp, Zea Mays
gttaaagtcaggctcacagacggcctgtatgacccttgcctctgcctttcccttttctcctcctatccctaacgcagccgccgccgccgctcggctctcccttgccaatgcacacatgcactcgccgccgccgctcgactctcccctcccaatggcaccccgtcgctcaccatcaaatgtttcctcccctacaagtgcaagatcgccaatgaggtggtatagccatccgccacacctgccactgtccctttgccatttctggtcctagatctgtgttacctgcatttttctttgccacgggatcgggatggtggaggagcagctgagggagatgtagatggagatgcagcccgcaccaccaccatctgctgcggcgtcggcatcgcagacggcgtggccactggattggccggtggacgggcgctcgctcaatcctccatcgccgcccactatatcagtccagtatagcgctaggtatgctctctatgcctacgatgatttatatgaggatgacttagataaggaggtggatcacatgtcagtttcgagcaaggtgtttggactggaatgcgcacagtctgttactttgatgcaaaacgtatgaattggttggacagagccgccaacgaagtaccatgggtaaggatgtgctggacaatgaaagcttctgtcttgaaataataggatacaagaagcttgcaagtggttttgtgaaggcttttgtgaatcacttgaatcattagttcttttaagaatggttttgtaaagcgttagcaaatatgtgtaaaacacaataagatgtgtggcaaattcagtgatctagttgtacaattttttgtgtttatgggatatgtggatatttcattgtggaatgttaatgaagtgtgtatgtctatgtgattatgtgtataaaatatatgttttgtggtgcttttgtgataatatctattc

SEQ ID NO: 2518 - DNA, 1035 bp, Zea Mays
cacagacggcctgtatgacccttgcctctgcctttcccttttctcctcctatccctaacgcagccgccgccgccgctcggctctcccttgccaatgcacacatgcactcgccgccgccgctcgactctcccctcccaatggcaccccgtcgctcaccatcaaatgtttcctcccctacaagtgcaagatcgccaatgaggtggtatagccatccgccacacctgccactgtccctttgccatttctggtcctagatctgtgttacctgcatttttctttgccacgggatcgggatggtggaggagcagctggtggggattagcatcttgcttcagatatctattctcgtgctctcgttcatgctcagatattgatggcgctgttggtggacccacctgacatcaagagggagatgtagatggagatgcagcccgcaccaccaccatctgctgcggcgtcggcatcgcagacggcgtggccactggattggccggtggacgggcgctcgctcaatcctccatcgccgcccactatatcagtccagtattagagcgctaggtatgctctctatgcctacgatgatttatatgaggatgacttagataaggaggtggatcacatgtcagtttcgagcaaggtgtttggactggaatgcgcacagtctgttactttgatgcaaaacgtatgaattggttggacagagccgccaacgaagtaccatgggtaaggatgtgctggacaatgaaagcttctgtcttgaaataataggatacaagaagcttgcaagtggttttgtgaaggcttttgtgaatcacttgaatcattagttcttttaagaatggttttgtaaagcgttagcaaatatgtgtaaaacacaataagatgtgtggcaaattcagtgatctagttgtacaattttttgtgtttatgggatatgtggatatttcattgtggaatgttaatgaagtgtgtatgtctatgtgattatgtgtataaaatatatgttttgtggtgcttttgtgataatatctattc

SEQ ID NO: 2519 - DNA, 987 bp, Zea Mays
cttgcctctgcctttcccttttctcctcctatccctaacgcagccgccgccgccgctcggctctcccttgccaatgcacacatgcactcgccgccgccgctcgactctcccctcccaatggcaccccgtcgctcaccatcaaatgtttcctcccctacaagtgcaagatcgccaatgaggtggtatagccatccgccacacctgccactgtccctttgccatttctggtcctagatctgtgttacctgcatttttctttgccacgggatcgggatggtggaggagcagctggtggggattagcatcttgcttcagatatctattctcgtgctctcgttcatgctcagatattgatggcgctgttggtggacccacctgacatcaagagggagatgtagatggagatgcagcccgcaccaccaccatctgctgcggcgtcggcatcgcagacggcgtggccactggattggccggtggacgggcgctcgctcaatcctccatcgccgcccactatatcagtccagtatcatttcttgcagtagagcgctaggtatgctctctatgcctacgatgatttatatgaggatgacttagataaggaggtggatcacatgtcagtttcgagcaaggtgtttggactggaatgcgcacagtctgttactttgatgcaaaacgtatgaattggttggacagagccgccaacgaagtaccatgggtaaggatacaagaagcttgcaagtggttttgtgaaggcttttgtgaatcacttgaatcattagttcttttaagaatggttttgtaaagcgttagcaaatatgtgtaaaacacaataagatgtgtggcaaattcagtgatctagttgtacaattttttgtgtttatgggatatgtggatatttcattgtggaatgttaatgaagtgtgtatgtctatgtgattatgtgtataaaatatatgttttgtggtgcttttgtgataatatctattc

SEQ ID NO: 2520 - DNA, 1221 bp, Zea Mays
cttttctcctcctatccctaacgcagccgccgccgccgctcggctctcccttgccaatgcacacatgcactcgccgccgccgctcgactctcccctcccaatggcaccccgtcgctcaccatcaaatgtttcctcccctacaagtgcaagatcgccaatgaggtggtatagccatccgccacacctgccactgtccctttgccatttctggtcctagatctgtgttacctgcatttttctttgccacgggatcgggatggtggaggagcagctggtggggattagcatcttgcttcagatatctattctcgtgctctcgttcatgctcagatattgatggcgctgttggtggacccacctgacatcaagagggagatgtagatggagatgcagcccgcaccaccaccatctgctgcggcgtcggcatcgcagacggcgtggccactggattggccggtggacgggcgctcgctcaatcctccatcgccgcccactatatcagtccagtatgtgagtcatattgattttataattgattttatgcgccagttcttgcctcgactaatgggtcctcttccattttgtaatcacctctgcatgtttactgtatcactttggtaaattactattgttccatgttgtcttccacaacatactgcactagttcagtggttagtttcctattcaaccatttcgtaatgaaggaggtattggtatttagcatttcttgcagtagagcgctaggtatgctctctatgcctacgatgatttatatgaggatgacttagataaggaggtggatcacatgtcagtttcgagcaaggtgtttggactggaatgcgcacagtctgttactttgatgcaaaacgtatgaattggttggacagagccgccaacgaagtaccatgggtaaggatgtgctggacaatgaaagcttctgtcttgaaataataggatacaagaagcttgcaagtggttttgtgaaggcttttgtgaatcacttgaatcattagttcttttaagaatggttttgtaaagcgttagcaaatatgtgtaaaacacaataagatgtgtggcaaattcagtgatctagttgtacaattttttgtgtttatgggatatgtggatatttcattgtggaatgttaatgaagtgtgtatgtctatgtgattatgtgtataaaatatatgttttgtggtgcttttgtgataatatctattc

SEQ ID NO: 2521 - DNA, 991 bp, Zea Mays
ccctaacgcagccgccgccgccgctcggctctcccttgccaatgcacacatgcactcgccgccgccgctcgactctcccctcccaatggcaccccgtcgctcaccatcaaatgtttcctcccctacaagtgcaagatcgccaatgaggtggtatagccatccgccacacctgccactgtccctttgccatttctggtcctagatctgtgttacctgcatttttctttgccacgggatcgggatggtggaggagcagctggtggggattagcatcttgcttcagatatctattctcgtgctctcgttcatgctcagatattgatggcgctgttggtggacccacctgacatcaagagggagatgtagatggagatgcagcccgcaccaccaccatctgctgcggcgtcggcatcgcagacggcgtggccactggattggccggtggacgggcgctcgctcaatcctccatcgccgcccactatatcagtccacatttcttgcagtagagcgctaggtatgctctctatgcctacgatgatttatatgaggatgacttagataaggaggtggatcacatgtcagtttcgagcaaggtgtttggactggaatgcgcacagtctgttactttgatgcaaaacgtatgaattggttggacagagccgccaacgaagtaccatgggtaaggatgtgctggacaatgaaagcttctgtcttgaaataataggatacaagaagcttgcaagtggttttgtgaaggcttttgtgaatcacttgaatcattagttcttttaagaatggttttgtaaagcgttagcaaatatgtgtaaaacacaataagatgtgtggcaaattcagtgatctagttgtacaattttttgtgtttatgggatatgtggatatttcattgtggaatgttaatgaagtgtgtatgtctatgtgattatgtgtataaaatatatgttttgtggtgcttttgtgataatatctattc

SEQ ID NO: 2522 - DNA, 755 bp, Zea Mays
cgcagccgccgccgccgctcggctctcccttgccaatgcacacatgcactcgccgccgccgctcgactctcccctcccaatggcaccccgtcgctcaccatcaaatgtttcctcccctacaagtgcaagatcgccaatgagatggagatgcagcccgcaccaccaccatctgctgcggcgtcggcatcgcagacggcgtggccactggattggccggtggacgggcgctcgctcaatcctccatcgccgcccactatatcagtccagtatagcgctaggtatgctctctatgcctacgatgatttatatgaggatgacttagataaggaggtggatcacatgtcagtttcgagcaaggtgtttggactggaatgcgcacagtctgttactttgatgcaaaacgtatgaattggttggacagagccgccaacgaagtaccatgggtaaggatgtgctggacaatgaaagcttctgtcttgaaataataggatacaagaagcttgcaagtggttttgtgaaggcttttgtgaatcacttgaatcattagttcttttaagaatggttttgtaaagcgttagcaaatatgtgtaaaacacaataagatgtgtggcaaattcagtgatctagttgtacaattttttgtgtttatgggatatgtggatatttcattgtggaatgttaatgaagtgtgtatgtctatgtgattatgtgtataaaatatatgttttgtggtgcttttgtgataatatctattc

SEQ ID NO: 2523 - DNA, 806 bp, Zea Mays
cgcagccgccgccgccgctcggctctcccttgccaatgcacacatgcactcgccgccgccgctcgactctcccctcccaatggcaccccgtcgctcaccatcaaatgtttcctcccctacaagtgcaagatcgccaatgagatattgatggcgctgttggtggacccacctgacatcaagagggagatgtagatggagatgcagcccgcaccaccaccatctgctgcggcgtcggcatcgcagacggcgtggccactggattggccggtggacgggcgctcgctcaatcctccatcgccgcccactatatcagtccagtatagcgctaggtatgctctctatgcctacgatgatttatatgaggatgacttagataaggaggtggatcacatgtcagtttcgagcaaggtgtttggactggaatgcgcacagtctgttactttgatgcaaaacgtatgaattggttggacagagccgccaacgaagtaccatgggtaaggatgtgctggacaatgaaagcttctgtcttgaaataataggatacaagaagcttgcaagtggttttgtgaaggcttttgtgaatcacttgaatcattagttcttttaagaatggttttgtaaagcgttagcaaatatgtgtaaaacacaataagatgtgtggcaaattcagtgatctagttgtacaattttttgtgtttatgggatatgtggatatttcattgtggaatgttaatgaagtgtgtatgtctatgtgattatgtgtataaaatatatgttttgtggtgcttttgtgataatatctattc

SEQ ID NO: 2524 - DNA, 623 bp, Zea Mays
atgcagcccgcaccaccaccatctgctgcggcgtcggcatcgcagacggcgtggccactggattggccggtggacgggcgctcgctcaatcctccatcgccgcccactatatcagtccagtatcatttcttgcagtagagcgctaggtatgctctctatgcctacgatgatttatatgaggatgacttagataaggaggtggatcacatgtcagtttcgagcaaggtgtttggactggaatgcgcacagtctgttactttgatgcaaaacgtatgaattggttggacagagccgccaacgaagtaccatgggtaaggatgtgctggacaatgaaagcttctgtcttgaaataataggatacaagaagcttgcaagtggttttgtgaaggcttttgtgaatcacttgaatcattagttcttttaagaatggttttgtaaagcgttagcaaatatgtgtaaaacacaataagatgtgtggcaaattcagtgatctagttgtacaattttttgtgtttatgggatatgtggatatttcattgtggaatgttaatgaagtgtgtatgtctatgtgattatgtgtataaaatatatgttttgtggtgcttttgtgataatatctattc

SEQ ID NO: 2525 - DNA, 568 bp, Zea Mays
atgcagcccgcaccaccaccatctgctgcggcgtcggcatcgcagacggcgtggccactggattggccggtggacgggcgctcgctcaatcctccatcgccgcccactatatcagtccagtatagcgctaggtatgctctctatgcctacgatgatttatatgaggatgacttagataaggaggtggatcacatgtcagtttcgagcaaggtgtttggactggaatgcgcacagtctgttactttgatgcaaaacgtatgaattggttggacagagccgccaacgaagtaccatgggtaaggatacaagaagcttgcaagtggttttgtgaaggcttttgtgaatcacttgaatcattagttcttttaagaatggttttgtaaagcgttagcaaatatgtgtaaaacacaataagatgtgtggcaaattcagtgatctagttgtacaattttttgtgtttatgggatatgtggatatttcattgtggaatgttaatgaagtgtgtatgtctatgtgattatgtgtataaaatatatgttttgtggtgcttttgtgataatatctattc

SEQ ID NO: 2526 - DNA, 397 bp, Zea Mays
cgcgctcgccgcgcttgaggctcgggtgcgcctccccgctcgctgccctcgtgcctctggcttctgcaccgccgtcggccagggagacacaaccgacctccctctccgccaggtggcctacgacgcccatgcgtccctggggaacccgtggccactccaggccgaccacgcgcgttctctgcactgctgccggcagcgtccaaagagaggggaaagaactgctagttcagcatttgcttgttggtgaaaaggatgtcaggcttctggttgatctcgaaaagaatatcattgcaggagacttgagtgatttagccgtggagcactccttatgtccatccaaagcaaatggtggtatgcttggtgggtttgaaggcgacagatggtacaacattaactt

SEQ ID NO: 2527 - DNA, 403 bp, Zea Mays
cgcgctcgccgcgcttgaggctcgggtgcgcctccccgctcgctgccctcgtgcctctggcttctgcaccgccgtcggccagggagacacaaccgacctccctctccgccaggtggcctacgacgcccatgcgtccctggggaacccgtggccactccaggccgaccacgcgcgttctctgcactgctgccggcagcgtccaaagagaggggaaagaactgctagttcagcatttgcttgttggtgaaaaggatgtcaggcttctggttgatctcgaaaagaatatcattgcaggaggagtagacttgagtgatttagccgtggagcactccttatgtccatccaaagcaaatggtggtatgcttggtgggtttgaaggcgacagatggtacaacattaactt

SEQ ID NO: 2528 - DNA, 3069 bp, Zea Mays
cgacgctgtctgtcacacccggttttaagggacaaagccaggtgcatctcatatatgcgccaaagaagacaacacatataataacggagtgtataaagataaatgtcacaatataatcagagtacttattatatagtggaagtcttacaaaataaaagataaatatagatcgaactaaagtccatccttggcaccacaaagtcaactgggagacgccacctagatggaatcgaacacctcgctatgtggctcctcttgaaccacctgttcttctcctgtggggggtgtgagacagcaagggtgagctcacacatgttcatcactcaacaagttgtggggaataatgtgacatgaactcaccaaaggtcggagttcatgtgatgtgtaaagctgatcaacagtaggggttaaagatgagcattgcttttaataagttggtcaaattttattagcagttactaagtgtaagtaaatatcaaaccataataaataattgaacaaaattaataagtaatgacatgcaaatgcaaatgacaaattaaatttaagttacataaattaatcatgtgagagtcccgagctgctcttgaccatgagctcggctagtatatcagttttacactttgtagaggttgtaccctatactcacaagtcatgtatcccatgtcgctagggttagctagacccttaaacactaccgaggtgaatggctagggatccactacgaggcctttacaaagtcccactagcttccgaaaacccgctacattttatgggaagagcattgcaagaatctctcgtctgaccgccatcgcagcaaaatcaatccgagaacctcattgcatgcaactcccctactgcccttgcccctttcgggtaaggtagtcttccactagctttcctaattagtcagccaagggcgtcccattccacccttatggtggcacgtgtttctcaacttaagctccatgttccaattaaaattaatgatcttgacatgaacataaataacataacagaataattggaacatggatataataacccaaaaccatatgaagcaatagcaaaaactacccaagtgattcaggggtaaaccaggtaaaagataatcagactagggtgacctattgagtcccatcaaaattaaacctatgcattgaatactgataataaagacattattgggtaatagaagtggtcaagggcacaacttgcctagcacttgagattgtaggtaccaggatgattcttcaaatcctcgtgacctcactgctagtcgtagcaatacaaacaaacatggtatatataaaattaacatcacatcaaacataagtacaaactgaataataataatctacgcgatgctaagagctcgtgggatcgagaactactaagatcggagttacgagtaagaagttatgattttatagaagatctatgtgattaatatatcaatctatattataaattggttaatataaatcatatgagaggttattctataaataattatctgaactttaatctaggttatgaattgaccatagatcatattctagtagattataatgataagaagtttagccagactaaccgacataaattaaataaagatctacttagaaaagaatgagacatggtataataaatgttgttaatgcatagtaaatattcatataaagctaacgcaactgaaacagttcaattcggagttaaaatggggaagttatgaatttccaaaggttttatgtatttgatacaagattaatttaagagattaattttaatggggctttcatgtcagaacagtggtactagatgataaacaataatcttacaaaattatagaaactggaatggactcatttggacttaatatgaattttctagggattaaacaagtttccataattaattttgtgttaaaaatcatttcttaaatgaatttctctgttttcctagaggccaggactgcgcatcaatttctggaaaatacagggttcctggggtaagatttcctaagacacagatctatcccgcgggggatggcgggttaatttctagcgagtgcaggggttctttagcaatacgtcagccgcggaggggtatggatgtttccccaccaccggattagaaacggacggcacagattgaactaaggtaccgtttggttcaaatatttgtaacgtaatgggtaagtgataacgttaaatcatgtttgttttagtttaaccgtaatcagataccatactaaaaattgataccggactattcaaacttgttaccgcccgtaatcgagtgtaaaccattaccattatcctttacgttacatttcgtgaaccaaacagcacctaacttcatctcaaaccggtaccccatcctggctgtcagatcgccatccaacggtttaggttttatacaggtgagatcgatctgcacgcgcaggatcgggatcggacgaaccatatccactcatacaaaacgatgccccagattctaatctgcgccgccaaatccccatccaacaaccagccgttaaatacccgcagaccactctctttcgttcctcagctgatctatggttgcgatgcatcctatcacactgcccctgatgactcaatcccgatcgctaaaaacagaatcaacggcccacgccgttcttcttcccccagcacggacacagcagcgcccaggctagagcggcggtggcttcaccggaggtttccgatccgacaccacaaagcgtcccaaatccgaccggcaatggactcgcaactacggagatggcacgccccagccggatggtcaccccaagcgcggatcgacggtggcggctgcgcacacagcacagcgcccagacggtggtggtgttgcgatacaagaagggggttcctgacctggtgagctatggtaaaggaagcgccgcatttatatggccgaacccccgaaccatggccagaggagatcggtagttggggcgcgtgatttggggcgggcacggagctgctcgcaaattccgtggacggttgaagaagacgcggtcctgggtggcccactcgtcagccg

SEQ ID NO: 2529 - DNA, 3126 bp, Zea Mays
gtgggtcttggtgtggaggccgcgtgtctggggaccaagcagctgctggcaccagcgagtctttccgttgcgataaacacagacgcaacaaaacgttctttctccctcctcctgttatcttgttccttctcccagtgaaaaatctttatgtcctcaagctcaagcataccgccaccaccagtctcagcccaacgctctacctcaacaactcacctcgttgtttacatttttgttctttggtcgtcgtccatagaaaagaatccccatcgtcaggtcgtttatctactccaagctggcgtctgtgatagggtgaggcagccaggcaggtatggtctttgggctcatgttgtgctgaatggggcagggtagttgtggggggggaagcgctcgtcttatgcttgttgagattcggctgggtgcaagcagccagggccttgcagccagaaattgttcgtcctgtatgtttgtgtggagaagaagtggtgtgagtagaaaaggaacagcgagggggttgatgctaatttgtgtagatgttcgttttctttttcagatttcttctaagacctgaaaagtgctaagatatgaaatcagtttgttgggttcacaaacatgagttctctatgttaaaatatttgttctaggttaactgatacttctctgtataagttgtgttaatgttaaacataataatacttctttaatctattacaataaatctaaagcaccaacaatcataaaatgttatgagcacctagcttatgatgaatggttgagttgcttctattcgtatcctaaatttaggtgtccgaaagggctaagcctatgtttcattaagtctgtggatgattacctagcttaggcgtttataggtcgtgtctagggttattattttcttgagatttgagcaagcccggttaaaccgaacgaacatgattattgtgctagcgagtcataggtatataggatttacgtacgaagtttgtgatgctttttaatcctcttcggtataatgataattagtcgtgtgctattcctgtctatatgcattcatgtgcattatgcatttcatttaggcacgataattaatcacgtgatgcggaagacgacccaagtcgaccccaggataatgcagagattggacatctccgcaagacgatgttgtcagtcggataaatctgaagatggataatctaaacaagtgtgagaccaaaagctgattgccaagtggacgccacctaacaaacactaacgtagtgtttattccaggcaagcctcggtgcatgcaaccccttccttgtgtttttaaataatttttacacactttaagtctagcgaaatgtgcattaggtttataggagttgcttggaaaccctttgatgcattgtctaccttgatatccatacctttatagatacttctgatgaagtatcaaaatatgatttacaaaaattcttatccctgcttagatcttatggatagaggttgtcctttgcgttaatgcctagctcaggggttatcttgaggaaggatggcttctgcctgcaagaatattttcattgggagcaatggtgggatcttactgcaaagttccctataatgctcttttcatcctaaggaatacaaacaatcctaaggatggaagtacttaaatcgggacttgggctaggaacatgtgatgttctaccgaggttgattaaggattatacttaatgtagtcttgatgatcgaggatcttttaaccggtcacatgcctcgtcatgggtaagctttgcctcgggcagactaataccagaataagatagcacacaatgggagtggagagatggcgagagtagcgtgtaccctccgtggcaagaggctggacggtggtgtatctgtactctcggttggcgtgaacctgatctggtcttaagaaccccgattgcaagttgacatatgcaagggttaagtgctacatatgtcgtgtgattggagatccctagctaggtattaatcgattcggatcgccgttacttctcggacatgaagacttggtcattgacctgcaatctaagtcatggatggaatcttaatgagaaaaaatcatgttggattgattaatgtgatggtgaaattagactagatgcaaacaaggtctattaatacttaatctagcattaaaatgttgaaagtaaggactcactttagtaagctatttctgcaaaagtctctaagttgattcttgctaaagccttttccttgattcctatttaaccaacatatccttgacagtcttttctttagtcgggtaagtcttgctttgtacttgcatacttagggttttacccattgttggtgcaggttacgagtcacttgattgtgattggtgttaagcgccggtgggcacggccttcttataagtctaagtacttcttctagacttcttattgaggatggtcacttaagctagcatatatttcatacttataataattttataacatttcaaagtttattgctttgaatcactttgtaaccacaccgataaatataatgtaaatttgttgaaacttgtaactttttgtaataaagaaattccactgcaaaatgttggtgtgtgatttgtgtttacttaatcttgcgatcttggttttaagtggtttatccagggtccttgggacactcagacggatcctgttaagttatttgttgcacatgcatagccatgtgaggtctttgagacaagggcaggtgcatgtgggcccaataacttgggaggttctaccacacaccacccctccgaccgcaagcccatctcatcccaaattcgcgacacactcgagcgatcactataaattgagtgttccgcctgctccgctatcttgttacgaagccagtgcaccgctcctcactgccgattagccaccacaacccttgaattcctattttcccccaattcggtcagtcgcgccatcgtgagacacctcgccctggacagccatccacaggtcggttcgtgcttctctggtttgtgttctagcatccttagggtctcctgttgctcgtagactcgatcaattgaatgctaccgcgctaggtcgacgggaacagctctgcctgtccttgttattcgttgtcgtcgtggac

SEQ ID NO: 2530 - DNA, 526 bp, Zea Mays
cgagtctttccgttgcgataaacacagacgcaacaaaacgttctttctccctcctcctgttatcttgttccttctcccagtgaaaaatctttatgtcctcaagctcaagcataccgccaccaccagtctcagcccaacgctctacctcaacaactcacctcgttgtttacatttttgttctttggtcgtcgtccatagaaaagaatccccatcgtcaggtcgtttatctactccaagctggcgtctgtgatagggtgaggcagccaggcacgataattaatcacgtgatgcggaagacgacccaagtcgaccccaggataatgcagagattggacatctccgcaagacgatgttgtcagtcggataaatctgaagatggataatctaaacaagtgtgagaccaaaagctgattgccaagtggacgccacctaacaaacactaacgtagtgtttattccaggcaagcctcggtgcatgcaaccccttccttgtgtttttaaataatttttacacactttaagtctag

SEQ ID NO: 2531 - DNA, 530 bp, Zea Mays
cgagtctttccgttgcgataaacacagacgcaacaaaacgttctttctccctcctcctgttatcttgttccttctcccagtgaaaaatctttatgtcctcaagctcaagcataccgccaccaccagtctcagcccaacgctctacctcaacaactcacctcgttgtttacatttttgttctttggtcgtcgtccatagaaaagaatccccatcgtcaggtcgtttatctactccaagctggcgtctgtgatagggtgaggcagccaggcaggcacgataattaatcacgtgatgcggaagacgacccaagtcgaccccaggataatgcagagattggacatctccgcaagacgatgttgtcagtcggataaatctgaagatggataatctaaacaagtgtgagaccaaaagctgattgccaagtggacgccacctaacaaacactaacgtagtgtttattccaggcaagcctcggtgcatgcaaccccttccttgtgtttttaaataatttttacacactttaagtctag

SEQ ID NO: 2532 - DNA, 473 bp, Zea Mays
cgagtctttccgttgcgataaacacagacgcaacaaaacgttctttctccctcctcctgttatcttgttccttctcccagtgaaaaatctttatgtcctcaagctcaagcataccgccaccaccagtctcagcccaacgctctacctcaacaactcacctcgttgtttacatttttgttctttggtcgtcgtccatagaaaagaatccccatcgtcaggtcgtttatctactccaagctggcgtctgtgatagggtgaggcagccaggcaggtgatgaaacaaccaagttctgctgtttctgctcaaaggtggtgcccaattaggaggaaaaacactaaacttatttggggaggatgttttgcctcccggtaatgtaataataagttctgcactcgaacacccagttatgtaatatgtactctttctatattttcatatgaatgaaaattatattattgtaatcctttcctct

SEQ ID NO: 2533 - DNA, 1640 bp, Zea Mays
cgagtctttccgttgcgataaacacagacgcaacaaaacgttctttctccctcctcctgttatcttgttccttctcccagtgaaaaatctttatgtcctcaagctcaagcataccgccaccaccagtctcagcccaacgctctacctcaacaactcacctcgttgtttacatttttgttctttggtcgtcgtccatagaaaagaatccccatcgtcaggtcgtttatctactccaagctggcgtctgtgatagggtgaggcagccaggcagaaaatgaggaagaaactgtgattgaagaagttgtcgctcaagctgagaatcctccagccgagaataacttctacttcgacatctgtggagtagacccagaacctcctgcaacacaaggcaagccccggtgcattatcccctttccttgatgttttaaaaactttatcaccttatatgatgcattaggtggtaggagttgtgtgctaaacaattgatgcattcccttccttggaactgattaccattccttgtcacttgatttacataaagttttctaatgcttagctttgctgtagaaaacaaaatgttttgttttaaacaaaaggtgatgcttcatataggatgggaattttacaaagaaaagactgatgacggtgaatccatcatggccgtgatgggttcaacatctgaaaagatgtacctctgttaggtaccaaactttgggttgtaaatgataaagacgagaccgggtgtgttacttgcacgagaaggaagtctcggtgtagtgtctctgtctgagttgattaaggaccgaatcgatgtaggcttgatgatcgaggatcttttaactggccacatgcctcgtcatgggtaagcttttcctcgatcggaccaataccagaaaggccaccatgcaataggagtggagagatggtgagagtagcgtgtaccctccgtggcaagaggctggacggtggtgtatatgtgctcttggttggcgtgaatccattctggttttgagaaacccggtggcgagttgacatatgcaagggttaagtgctacatatatcatgcggttggagatccccagctgggtcttaatcgattcagatcgccgttacttctcgaacatgaagacttggtcactgacttacatgtagcaatccagtgaactgatgggatgataaaagacgactagtataggccaagtgcctgatctaggatagaaagaactctagatgtaggtaactacttaacctgataataaaaatggatttttaaggatccactcatagtaagcttttctgcaaacagagtctttgaatttttatgagctttaccttgattcctaaaaggcagcatatccttgatagtcttttcctttcacgggtaagacttgcaaaagtacactttgacctcatggttttcgaacccatgttattgtaggtgatgaaacaaccaagttctgctgtttctgctcaaaggtggtgcccaattaggaggaaaaacactaaacttatttggggaggatgttttgcctcccggtaatgtaataataagttctgcactcgaacacccagttatgtaatatgtactctttctatattttcatatgaatgaaaattatattattgtaatcctttcctct

SEQ ID NO: 2534 - DNA, 1695 bp, Zea Mays
cgcaattagactgtggtcaatcttccccgctagtccttgttcaccttctccggcggcagcctccaaaccaccctcgcgctctaccactccggtcgtgtagctccccagcaggcaaccaccatcgcgcacccaccggccaccgcgtctacatttgccaatctctgcttgaagcgttctgcccactctttcaaccgagaagttcactattatcctgcgcatgttccctttccccctttcgtcgtggcacgcacgttaggagttcgaccgattgccggaacgtcttccgccgtcttctgcgccatcgaaagagcgatgaggtttgtggtgacgaaagtttgcagcggcggagggaaggcgcgggcgggtgcgctccatatagccggcgccggcattggcattgagacgccggcgctgctgctgtccactcgtaaggggctgccggcattcttgtcctgtgacctccttgcctccttgccactcccggactccctccttctccatgtctgtcctacccattttatagaaggccctccagtgaagacaatatcagctattaggggtttgcacggtatgctgggtttacctgatcacattcttgtagcggcggcaagcgattctattgagagtctgccatcatgtgaagccaccaacaaatttggtgcctcctttgaaactccttcgggtcgtagactggtaaaaccatcagactatatggagttgatttcctgtatgaagcctaatatatgggccagtttggcggatgaggtaccagcttgggtgactgagaaacgaaacaaagtctctgttgacaggacattgcggtggcttgatgcatgtattgctttggatgtggcttctgggactaatagttttggtgtaattgtgggaggatctagcttagaacagcgaaagctatgtgccactgaagtgtcgaagcggaatgtttcaggcttttggattgcaggatttggctttggagagagtattgaagaacgttgcactttgctcaatgccacaacagattgcttgccacgggaaaaacctcggctcgtatctaggcttggtcttccagatacatttaccaacttactatgggtggtttcgcactgatcttccctgttgacatggttgaaagagaaatgcagaatggtgtactcaacactactgatggcgattcaacaaagattaacctgcgtgctacaacatatcggaaggatacgtcacggctagttgatagctgtaattgcttcacatgccaaaatcacacccgtgcgtacctcaatcatttgctcaatgtccatgagatgttggctcaaattcttctggagatacacaatacccatcattatcttcgtttcttccattccatacgggaggcgatcaaggttggagagtttgatcttttccgacaggagttcgttaagaagagacgcacccatttcgctgctgttgtggtctagacgtgaccaagagttcatctggctgtcctcacaagattaacttatcaattaatcagacttgtgtacacctgaatccttactagtcaactttcacgtctatgattgacaagtctgaaaagattcatacattaagtgatagaagttgtgtgctaaacaactgatgcattttcttcattggaaaattaattaccattccttgttacctgatttattcaaacaagttttctgatgctta

SEQ ID NO: 2535 - DNA, 1657 bp, Zea Mays
caattagactgtggtcaatcttccccgctagtccttgttcaccttctccggcggcagcctccaaaccaccctcgcgctctaccactccggtcgtgtagctccccagcaggcaaccaccatcgcgcacccaccggccaccgcgtctacatttgccaatctctgcttgaagcgttctgcccactctttcaaccgagaagttcactattatcctgcgcatgttccctttccccctttcgtcgtggcacgcacgttaggagttcgaccgattgccggaacgtcttccgccgtcttctgcgccatcgaaagagcgatgaggtttgtggtgacgaaagtttgcagcggcggagggaaggcgcgggcgggtgcgctccatatagccggcgccggcattggcattgagacgccggcgctgctgctgtccactcgtaaggggctgccggcattcttgtcctgtgacctccttgcctccttgccactcccggactccctccttctccatgtctgtcctacccattttatagaaggccctccagtgaagacaatatcagctattaggggtttgcacggtatgctgggtttacctgatcacattcttgtagcggcggcaagcgattctattgagagtctgccatcatgtgaagccaccaacaaatttggtgcctcctttgaaactccttcgggtcgtagactggtaaaaccatcagactatatggagttgatttcctgtatgaagcctaatatatgggccagtttggcggatgaggtaccagcttgggtgactgagaaacgaaacaaagtctctgttgacaggacattgcggtggcttgatgcatgtattgctttggatgtggcttctgggactaatagttttggtgtaattgtgggaggatctagcttagaacagcgaaagctatgtgccactgaagtgtcgaagcggaatgtttcaggcttttggattgcaggatttggctttggagagagtattgaagaacgttgcactttgctcaatgccacaacagattgcttgccacgggaaaaacctcggctcgtatctaggcttggtcttccagaggaggtcttggagggtgtggctgctgagaaatgcagaatggtgtactcaacactactgatggcgattcaacaaagattaacctgcgtgctacaacatatcggaaggatacgtcacggctagttgatagctgtaattgcttcacatgccaaaatcacacccgtgcgtacctcaatcatttgctcaatgtccatgagatgttggctcaaattcttctggagatacacaatacccatcattatcttcgtttcttccattccatacgggaggcgatcaaggttggagagtttgatcttttccgacaggagttcgttaagaagagacgcacccatttcgctgctgttgtggtctagacgtgaccaagagttcatctggctgtcctcacaagattaacttatcaattaatcagacttgtgtacacctgaatccttactagtcaactttcacgtctatgattgacaagtctgaaaagattcatacattaagtgatagaagttgtgtgctaaacaactgatgcattttcttcattggaaaattaattaccattccttgttacctgatttattcaaacaagttttctgatgctta

SEQ ID NO: 2536 - DNA, 1737 bp, Zea Mays
caattagactgtggtcaatcttccccgctagtccttgttcaccttctccggcggcagcctccaaaccaccctcgcgctctaccactccggtcgtgtagctccccagcaggcaaccaccatcgcgcacccaccggccaccgcgtctacatttgccaatctctgcttgaagcgttctgcccactctttcaaccgagaagttcactattatcctgcgcatgttccctttccccctttcgtcgtggcacgcacgttaggagttcgaccgattgccggaacgtcttccgccgtcttctgcgccatcgaaagagcgatgaggtttgtggtgacgaaagtttgcagcggcggagggaaggcgcgggcgggtgcgctccatatagccggcgccggcattggcattgagacgccggcgctgctgctgtccactcgtaaggggctgccggcattcttgtcctgtgacctccttgcctccttgccactcccggactccctccttctccatgtctgtcctacccatttaaggccctccagtgaagacaatatcagctattaggggtttgcacggtatgctgggtttacctgatcacattcttgtagcggcggcaagcgattctattgagagtctgccatcatgtgaagccaccaacaaatttggtgcctcctttgaaactccttcgggtcgtagactggtaaaaccatcagactatatggagttgatttcctgtatgaagcctaatatatgggccagtttggcggatgaggtaccagcttgggtgactgagaaacgaaacaaagtctctgttgacaggacattgcggtggcttgatgcatgtattgctttggatgtggcttctgggactaatagttttggtgtaattgtgggaggatctagcttagaacagcgaaagctatgtgccactgaagtgtcgaagcggaatgtttcaggcttttggattgcaggatttggctttggagagagtattgaagaacgttgcactttgctcaatgccacaacagattgcttgccacgggaaaaacctcggctcgtatctaggcttggtcttccagaggaggtcttggagggtgtggctgctggtatcgacctttttgactccacatacatttaccaacttactatgggtggtttcgcactgatcttccctgttgacatggttgaaagagaaatgcagaatggtgtactcaacactactgatggcgattcaacaaagattaacctgcgtgctacaacatatcggaaggatacgtcacggctagttgatagctgtaattgcttcacatgccaaaatcacacccgtgcgtacctcaatcatttgctcaatgtccatgagatgttggctcaaattcttctggagatacacaatacccatcattatcttcgtttcttccattccatacgggaggcgatcaaggttggagagtttgatcttttccgacaggagttcgttaagaagagacgcacccatttcgctgctgttgtggtctagacgtgaccaagagttcatctggctgtcctcacaagattaacttatcaattaatcagacttgtgtacacctgaatccttactagtcaactttcacgtctatgattgacaagtctgaaaagattcatacattaagtgatagaagttgtgtgctaaacaactgatgcattttcttcattggaaaattaattaccattccttgttacctgatttattcaaacaagttttctgatgctta

SEQ ID NO: 2537 - DNA, 1688 bp, Zea Mays
caattagactgtggtcaatcttccccgctagtccttgttcaccttctccggcggcagcctccaaaccaccctcgcgctctaccactccggtcgtgtagctccccagcaggcaaccaccatcgcgcacccaccggccaccgcgtctacatttgccaatctctgcttgaagcgttctgcccactctttcaaccgagaagttcactattatcctgcgcatgttccctttccccctttcgtcgtggcacgcacgttaggagttcgaccgattgccggaacgtcttccgccgtcttctgcgccatcgaaagagcgatgaggtttgtggtgacgaaagtttgcagcggcggagggaaggcgcgggcgggtgcgctccatatagccggcgccggcattggcattgagacgccggcgctgctgctgtccactcgtaaggggctgccggcattcttgtcctgtgacctccttgcctccttgccactcccggactccctccttctccatgtctgtcctacccatttaaggccctccagtgaagacaatatcagctattaggggtttgcacggtatgctgggtttacctgatcacattcttgtagcggcggcaagcgattctattgagagtctgccatcatgtgaagccaccaacaaatttggtgcctcctttgaaactccttcgggtcgtagactggtaaaaccatcagactatatggagttgatttcctgtatgaagcctaatatatgggccagtttggcggatgaggtaccagcttgggtgactgagaaacgaaacaaagtctctgttgacaggacattgcggtggcttgatgcatgtattgctttggatgtggcttctgggactaatagttttggtgtaattgtgggaggatctagcttagaacagcgaaagctatgtgccactgaagtgtcgaagcggaatgtttcaggcttttggattgcaggatttggctttggagagagtattgaagaacgttgcactttgctcaatgccacaacagattgcttgccacgggaaaaacctcggctcgtatctaggcttggtcttccagatacatttaccaacttactatgggtggtttcgcactgatcttccctgttgacatggttgaaagagaaatgcagaatggtgtactcaacactactgatggcgattcaacaaagattaacctgcgtgctacaacatatcggaaggatacgtcacggctagttgatagctgtaattgcttcacatgccaaaatcacacccgtgcgtacctcaatcatttgctcaatgtccatgagatgttggctcaaattcttctggagatacacaatacccatcattatcttcgtttcttccattccatacgggaggcgatcaaggttggagagtttgatcttttccgacaggagttcgttaagaagagacgcacccatttcgctgctgttgtggtctagacgtgaccaagagttcatctggctgtcctcacaagattaacttatcaattaatcagacttgtgtacacctgaatccttactagtcaactttcacgtctatgattgacaagtctgaaaagattcatacattaagtgatagaagttgtgtgctaaacaactgatgcattttcttcattggaaaattaattaccattccttgttacctgatttattcaaacaagttttctgatgctta

SEQ ID NO: 2538 - DNA, 1655 bp, Zea Mays
caattagactgtggtcaatcttccccgctagtccttgttcaccttctccggcggcagcctccaaaccaccctcgcgctctaccactccggtcgtgtagctccccagcaggcaaccaccatcgcgcacccaccggccaccgcgtctacatttgccaatctctgcttgaagcgttctgcccactctttcaaccgagaagttcactattatcctgcgcatgttccctttccccctttcgtcgtggcacgcacgttaggagttcgaccgattgccggaacgtcttccgccgtcttctgcgccatcgaaagagcgatgaggtttgtggtgacgaaagtttgcagcggcggagggaaggcgcgggcgggtgcgctccatatagccggcgccggcattggcattgagacgccggcgctgctgctgtccactcgtaaggggctgccggcattcttgtcctgtgacctccttgcctccttgccactcccggactccctccttctccatgtctgtcctacccattttatagaaggccctccagtgaagacaatatcagctattaggggtttgcacggtatgctgggtttacctgatcacattcttgtagcggcggcaagcgattctattgagagtctgccatcatgtgaagccaccaacaaatttggtgcctcctttgaaactccttcgggtcgtagactggtaaaaccatcagactatatggagttgatttcctgtatgaagcctaatatatgggccagtttggcggatgaggcttctgggactaatagttttggtgtaattgtgggaggatctagcttagaacagcgaaagctatgtgccactgaagtgtcgaagcggaatgtttcaggcttttggattgcaggatttggctttggagagagtattgaagaacgttgcactttgctcaatgccacaacagattgcttgccacgggaaaaacctcggctcgtatctaggcttggtcttccagaggaggtcttggagggtgtggctgctggtatcgacctttttgactccacatacatttaccaacttactatgggtggtttcgcactgatcttccctgttgacatggttgaaagagaaatgcagaatggtgtactcaacactactgatggcgattcaacaaagattaacctgcgtgctacaacatatcggaaggatacgtcacggctagttgatagctgtaattgcttcacatgccaaaatcacacccgtgcgtacctcaatcatttgctcaatgtccatgagatgttggctcaaattcttctggagatacacaatacccatcattatcttcgtttcttccattccatacgggaggcgatcaaggttggagagtttgatcttttccgacaggagttcgttaagaagagacgcacccatttcgctgctgttgtggtctagacgtgaccaagagttcatctggctgtcctcacaagattaacttatcaattaatcagacttgtgtacacctgaatccttactagtcaactttcacgtctatgattgacaagtctgaaaagattcatacattaagtgatagaagttgtgtgctaaacaactgatgcattttcttcattggaaaattaattaccattccttgttacctgatttattcaaacaagttttctgatgctta

SEQ ID NO: 2539 - DNA, 1679 bp, Zea Mays
caattagactgtggtcaatcttccccgctagtccttgttcaccttctccggcggcagcctccaaaccaccctcgcgctctaccactccggtcgtgtagctccccagcaggcaaccaccatcgcgcacccaccggccaccgcgtctacatttgccaatctctgcttgaagcgttctgcccactctttcaaccgagaagttcactattatcctgcgcatgttccctttccccctttcgtcgtggcacgcacgttaggagttcgaccgattgccggaacgtcttccgccgtcttctgcgccatcgaaagagcgatgaggtttgtggtgacgaaagtttgcagcggcggagggaaggcgcgggcgggtgcgctccatatagccggcgccggcattggcattgagacgccggcgctgctgctgtccactcgtaaggggctgccggcattcttgtcctgtgacctccttgcctccttgccactcccggactccctccttctccatgtctgtcctacccattttatagaaggccctccagtgaagacaatatcagctattaggggtttgcacggtatgctgggtttacctgatcacattcttgtagcggcggcaagcgattctattgagagtctgccatcatgtgaagccaccaacaaatttggtgcctcctttgaaactccttcgggtcgtagactggtaaaaccatcagactatatggagttgatttcctgtatgaagcctaatatatgggccagtttggcggatgaggtaccagcttgggtgactgagaaacgaaacaaagtctctgttgacaggacattgcggtggcttgatgcatgtattgctttggatgtggcttctgggactaatagttttggtgtaattgtgggaggatctagcttagaacagcgaaagctatgtgccactgaagtgtcgaagcggaatgtttcaggcttttggattgcaggatttggctttggagagagtattgaagaacgttgcactttgctcaatgccacaacagattgcttgccacgggaaaaacctcggctcgtatctaggcttggtcttccagaggaggtcttggagggtgtggctgctggtatcgacctttttgactccacagaaatgcagaatggtgtactcaacactactgatggcgattcaacaaagattaacctgcgtgctacaacatatcggaaggatacgtcacggctagttgatagctgtaattgcttcacatgccaaaatcacacccgtgcgtacctcaatcatttgctcaatgtccatgagatgttggctcaaattcttctggagatacacaatacccatcattatcttcgtttcttccattccatacgggaggcgatcaaggttggagagtttgatcttttccgacaggagttcgttaagaagagacgcacccatttcgctgctgttgtggtctagacgtgaccaagagttcatctggctgtcctcacaagattaacttatcaattaatcagacttgtgtacacctgaatccttactagtcaactttcacgtctatgattgacaagtctgaaaagattcatacattaagtgatagaagttgtgtgctaaacaactgatgcattttcttcattggaaaattaattaccattccttgttacctgatttattcaaacaagttttctgatgctta

SEQ ID NO: 2540 - DNA, 2102 bp, Zea Mays
caattagactgtggtcaatcttccccgctagtccttgttcaccttctccggcggcagcctccaaaccaccctcgcgctctaccactccggtcgtgtagctccccagcaggcaaccaccatcgcgcacccaccggccaccgcgtctacatttgccaatctctgcttgaagcgttctgcccactctttcaaccgagaagttcactattatcctgcgcatgttccctttccccctttcgtcgtggcacgcacgttaggagttcgaccgattgccggaacgtcttccgccgtcttctgcgccatcgaaagagcgatgaggtttgtggtgacgaaagtttgcagcggcggagggaaggcgcgggcgggtgcgctccatatagccggcgccggcattggcattgagacgccggcgctgctgctgtccactcgtaaggggctgccggcattcttgtcctgtgacctccttgcctccttgccactcccggactccctccttctccatgtctgtcctacccattttatagaaggccctccagtgaagacaatatcagctattaggggtttgcacggtatgctgggtttacctgatcacattcttgtagcggcggcaagcgattctattgagagtctgccatcatgtgaagccaccaacaaatttggtgcctcctttgaaactccttcgggtcgtagactggtaaaaccatcagactatatggagttgatttcctgtatgaagcctaatatatgggccagtttggcggatgaggtaccagcttgggtgactgagaaacgaaacaaagtctctgttgacaggacattgcggtggcttgatgcatgtattgctttggatgtggcttctgggactaatagttttggtgtaattgtgggaggatctagcttagaacagcgaaagctatgtgccactgaagtgtcgaagcggaatgtttcaggcttttggattgcaggatttggctttggagagagtattgaagaacgttgcactttgctcaatgccacaacagattgcttgccacgggaaaaacctcggctcgtatctaggcttggtcttccaggtgcctgtgctgtattttccccagtaactttggattttgttatgctgtttccacaggggcaatggcttaggaagcttcactttcttttttgtctgatctgtgacttcttacattttaacctcatcatcataattaacaagctacagcctagctgttaaacttatccaaaatttagcctgtcacttaatggtggtttataaatacattggttagtaattttttttccttttccatatgagaagctttacatagatctttttgacaattttccgaaagttaattctgagatatctttgtattaaaaactttttttttacaattatcacacattgataactcagtacattttgtgacttctagaggaggtcttggagggtgtggctgctggtatcgacctttttgactccacatacatttaccaacttactatgggtggtttcgcactgatcttccctgttgacatggttgaaagagaaatgcagaatggtgtactcaacactactgatggcgattcaacaaagattaacctgcgtgctacaacatatcggaaggatacgtcacggctagttgatagctgtaattgcttcacatgccaaaatcacacccgtgcgtacctcaatcatttgctcaatgtccatgagatgttggctcaaattcttctggagatacacaatacccatcattatcttcgtttcttccattccatacgggaggcgatcaaggttggagagtttgatcttttccgacaggagttcgttaagaagagacgcacccatttcgctgctgttgtggtctagacgtgaccaagagttcatctggctgtcctcacaagattaacttatcaattaatcagacttgtgtacacctgaatccttactagtcaactttcacgtctatgattgacaagtctgaaaagattcatacattaagtgatagaagttgtgtgctaaacaactgatgcattttcttcattggaaaattaattaccattccttgttacctgatttattcaaacaagttttctgatgctta

SEQ ID NO: 2541 - DNA, 933 bp, Zea Mays
ggataagctgttttcatcaaactgtgtttgatgactttaatgcttctgggactaatagttttggtgtaattgtgggaggatctagcttagaacagcgaaagctatgtgccactgaagtgtcgaagcggaatgtttcaggcttttggattgcaggatttggctttggagagagtattgaagaacgttgcactttgctcaatgccacaacagattgcttgccacgggaaaaacctcggctcgtatctaggcttggtcttccagaggaggtcttggagggtgtggctgctggtatcgacctttttgactccacatacatttaccaacttactatgggtggtttcgcactgatcttccctgttgacatggttgaaagagaaatgcagaatggtgtactcaacactactgatggcgattcaacaaagattaacctgcgtgctacaacatatcggaaggatacgtcacggctagttgatagctgtaattgcttcacatgccaaaatcacacccgtgcgtacctcaatcatttgctcaatgtccatgagatgttggctcaaattcttctggagatacacaatacccatcattatcttcgtttcttccattccatacgggaggcgatcaaggttggagagtttgatcttttccgacaggagttcgttaagaagagacgcacccatttcgctgctgttgtggtctagacgtgaccaagagttcatctggctgtcctcacaagattaacttatcaattaatcagacttgtgtacacctgaatccttactagtcaactttcacgtctatgattgacaagtctgaaaagattcatacattaagtgatagaagttgtgtgctaaacaactgatgcattttcttcattggaaaattaattaccattccttgttacctgatttattcaaacaagttttctgatgctta

SEQ ID NO: 2542 - DNA, 956 bp, Zea Mays
gcacaattgcccaagtgcggcaacgacctcccactgcttctgattccgcggaagttggatcctggtgctgccaattctgtcaaggatggggtcaatttgggtggtggtggacaggtggagttggagttgggtggataagttggagaggaggacagctgtgggcctcatttgtcttaagagggacattttctgcactagaaatatatggaaatagctctgcaggtagtggaaccatcgtgtatgtgacttatacataacggaatttggtggaagtggcaaccaaggaaatgcaaatttcaatagtgacagtgaaggaaagtgaccatttttatgatacatttaccaacttactatgggtggtttcgcactgatcttccctgttgacatggttgaaagagaaatgcagaatggtgtactcaacactactgatggcgattcaacaaagattaacctgcgtgctacaacatatcggaaggatacgtcacggctagttgatagctgtaattgcttcacatgccaaaatcacacccgtgcgtacctcaatcatttgctcaatgtccatgagatgttggctcaaattcttctggagatacacaatacccatcattatcttcgtttcttccattccatacgggaggcgatcaaggttggagagtttgatcttttccgacaggagttcgttaagaagagacgcacccatttcgctgctgttgtggtctagacgtgaccaagagttcatctggctgtcctcacaagattaacttatcaattaatcagacttgtgtacacctgaatccttactagtcaactttcacgtctatgattgacaagtctgaaaagattcatacattaagtgatagaagttgtgtgctaaacaactgatgcattttcttcattggaaaattaattaccattccttgttacctgatttattcaaacaagttttctgatgctta

SEQ ID NO: 2543 - DNA, 1366 bp, Zea Mays
ctgttccgcagaatccgagtccaatagctctcctccccagggctttcaacttctccaaaccccatctcgccgccgaggccgagcgagcagagcagaacaccacgtcggcggcttttccctgtctctccgctggatactacacccgccgccgcagcgccgatcctgtccgagtcaagcggagcgggggatcggattggttgcttccttccctccatctcatgttggtggactgagagatggagttttaatttcaaatagcatctagaggactgccactaagcttttaagttggtatataatgggtggctgttgttgctgttcgtcgagaacatctgaagcagttagagcacgagcaccagttgatatatatcatcaacaaaatcttgaggagcaggagccattgtcttcaatttttgatggatcatctccagcctctgcaattgttgcagtagacacaaatctggatacttccacacctgacacatatcgagcgccgcctgcacccttgccttatgatgttattttggcagtcccaaataaccctggttttggaaactctgtaggtttggagaagccagacactaagagcaaaactgatgaccaacaagagtccataaatgatcaggagtctttaaaggtggatgagtcatgtaagaaaagtgtcactgaagataaggctgatgaggaggatgtttgccctatctgccttgaagaatatgatgaagaaaatccccgttctataactaaatgcgagcatcatttccatctttgctgcattctcgaatggatggagcgaaaagatacttgcccagtttgtgaccagatgttcgaataggtttggtaaccttggtggatcatcactcgaagctgttcgttactgagaaagtgcagcaactaatttacttttgatattgatccattccgggtggctcgcatggtaatgaattgagggggcaaaaattgaaaggatgaatgtcatgaaatgtatttacaacgcctcctttgtcatgcgttgtgtcatgctatatatatgccggcttgcgggttcattcagttcaaagtccaggactatccttttgcttttctgaattcagagtttcagacatctgctggttcttccaggttccggtcagctgtgtatatcatatattaggtggttgcaggtaaaaatggtctagagggtgggggttgctttgtacaatccacatggtatttaagcttcatgtatataatcttttctgtttctcttcgttttgttctgctgaatacttgcagatccttactgttctgataaaacttactgactcccaaatctgtgccagacaaaacgtgtttcaggaacataatacatctgatagcacttgtt

SEQ ID NO: 2544 - DNA, 1353 bp, Zea Mays
ctgttccgcagaatccgagtccaatagctctcctccccagggctttcaacttctccaaaccccatctcgccgccgaggccgagcgagcagagcagaacaccacgtcggcggcttttccctgtctctccgctggatactacacccgccgccgcagcgccgatcctgtccgagtcaagcggagcgggggatcggattggttgcttccttccctccatctcatgttggtgcatctagaggactgccactaagcttttaagttggtatataatgggtggctgttgttgctgttcgtcgagaacatctgaagcagttagagcacgagcaccagttgatatatatcatcaacaaaatcttgaggagcaggagccattgtcttcaatttttgatggatcatctccagcctctgcaattgttgcagtagacacaaatctggatacttccacacctgacacatatcgagcgccgcctgcacccttgccttatgatgttattttggcagtcccaaataaccctggttttggaaactctgtaggtttggagaagccagacactaagagcaaaactgatgaccaacaagagtccataaatgatcaggagtctttaaaggtggatgagtcatgtaagaaaagtgtcactgaagataaggctgatgaggaggatgtttgccctatctgccttgaagaatatgatgaagaaaatccccgttctataactaaatgcgagcatcatttccatctttgctgcattctcgaatggatggagcgaaaagatacttgcccagtttgtgaccagattactttggtggatgagatgttcgaataggtttggtaaccttggtggatcatcactcgaagctgttcgttactgagaaagtgcagcaactaatttacttttgatattgatccattccgggtggctcgcatggtaatgaattgagggggcaaaaattgaaaggatgaatgtcatgaaatgtatttacaacgcctcctttgtcatgcgttgtgtcatgctatatatatgccggcttgcgggttcattcagttcaaagtccaggactatccttttgcttttctgaattcagagtttcagacatctgctggttcttccaggttccggtcagctgtgtatatcatatattaggtggttgcaggtaaaaatggtctagagggtgggggttgctttgtacaatccacatggtatttaagcttcatgtatataatcttttctgtttctcttcgttttgttctgctgaatacttgcagatccttactgttctgataaaacttactgactcccaaatctgtgccagacaaaacgtgtttcaggaacataatacatctgatagcacttgtt

SEQ ID NO: 2545 - DNA, 1241 bp, Zea Mays
ctgttccgcagaatccgagtccaatagctctcctccccagggctttcaacttctccaaaccccatctcgccgccgaggccgagcgagcagagcagaacaccacgtcggcggcttttccctgtctctccgctggatactacacccgccgccgcagcgccgatcctgtccgagtcaagcggagcgggggatcggattggttgcttccttccctccatctcatgttggtgcatcaacaaaatcttgaggagcaggagccattgtcttcaatttttgatggatcatctccagcctctgcaattgttgcagtagacacaaatctggatacttccacacctgacacatatcgagcgccgcctgcacccttgccttatgatgttattttggcagtcccaaataaccctggttttggaaactctgtaggtttggagaagccagacactaagagcaaaactgatgaccaacaagagtccataaatgatcaggagtctttaaaggtggatgagtcatgtaagaaaagtgtcactgaagataaggctgatgaggaggatgtttgccctatctgccttgaagaatatgatgaagaaaatccccgttctataactaaatgcgagcatcatttccatctttgctgcattctcgaatggatggagcgaaaagatacttgcccagtttgtgaccagattactttggtggatgagatgttcgaataggtttggtaaccttggtggatcatcactcgaagctgttcgttactgagaaagtgcagcaactaatttacttttgatattgatccattccgggtggctcgcatggtaatgaattgagggggcaaaaattgaaaggatgaatgtcatgaaatgtatttacaacgcctcctttgtcatgcgttgtgtcatgctatatatatgccggcttgcgggttcattcagttcaaagtccaggactatccttttgcttttctgaattcagagtttcagacatctgctggttcttccaggttccggtcagctgtgtatatcatatattaggtggttgcaggtaaaaatggtctagagggtgggggttgctttgtacaatccacatggtatttaagcttcatgtatataatcttttctgtttctcttcgttttgttctgctgaatacttgcagatccttactgttctgataaaacttactgactcccaaatctgtgccagacaaaacgtgtttcaggaacataatacatctgatagcacttgtt

SEQ ID NO: 2546 - DNA, 1645 bp, Zea Mays
tggcgctgccactactacacaatagtacagcacactatacacgcaatgtggtatacaagtacgtactcagtacgttatacgtataaaacaacgggtagttgggtacactacttgtgtggtagagtgaacacaggacaccagtatgttttttattccaggcagtcttctctgagaccatgccaggcccgtgttccccgccaacctcgagccacgcatgaacaaacagtggcaacaaacaacatagcacgacggcgattaacttaatcaatcaatgcccacccgcaagcatgcattaatttcttctctagaactagaactagaaccagaaccagtactagcagacacaagtgtctaatcctgcgactaactcaacatcatcaattgatagtaatcatctacagacactgctacaatgtaaggtaaggtacagtacagtgctactacgtacgagtgggtttcctctaccctctccatcaccactacagcagaagccgccgcaaatggaggccgcagagcaatgtcgccaccacgaaccgagccgaagccaccagcggggcgcccgcggcggacgcgtcgccggtggccatgttggcgagccaagagacgccgccttcgccgctgctggctccgagtagcacgctgccttgttccccgccctcgatgcccaggccaccaccaccacccatcggcatcccgctgtccggggtggcgtccgtgaacgtagtgcccggcatcatggtccctgtcggcaacgctggggtcgcgcccggcattggcatcgtccccggcaccgtcgtgggcgtcgcccctggcactgtcgtcgttgtcccccccggcaccatcgtcggcgtcgcgctcggcatggtcgtcgacttctggctgcgctcacgttacggatacacacaatagcagcgccaaccgatcagtgttcacatgctcagtagtacggacaaaagcaattcacgcaaatggaaaatagccccaaaaaaataaaaacaaaagagtatgccagatcttgcaagtaaaccatgcatgttcctacttccttgtctttcggctttctaggaatacaaataagattagtagtagattgcattactagataatgccttaaactatttcaagtcttcaacttctcgcagagaagccagaaatctctgacaatgtcaatcttgttaacaacaattagctaagtactggtttagtaggtaattaatagctggaaatcttgcggtgagtcagaaacctctgactgttttagtgacaagaggagctaaaggacgacagaaggctgtgtagtatagtgtagactagctggcaggcacggtaaaaaagagctgcggcagatcaaccccacattcacaagccaagaacccatccacagatccagacaaacttggcagaaacgcagtgccaaatcttgtttcatagtctctttctctccctctctctagagagagcgagaaattgcaagtgtacgatgggagtgaccaataaatcaggcaatggtgcgagaaaagaagggcgagtgaaatcaaaggccggaccttggggtggcgccggggcagaatgtcacggtgtagtccgggccgccgccgcaggtgaatgtggaggtgggatcgtcgaatgcgtagctgtaagagcg

SEQ ID NO: 2547 - DNA, 737 bp, Zea Mays
cagagttggcacggcccacagcagcgtgaagtcgacggggcagaaccctcaggccgccgggttaccgcagcagctgaacaacggcaccaccatggtcttcttcggcggcaacacacagaccagcagcgccgccgcctcatctgccaactctctcttcgccgtcaccgtcaccatcacagcagccgtcgcgctcgcgctctcgcgctcgactcgcctgtgaccggtcatcatcgctgtcaggtgggccacgcttatcagaagaccggtgagcatacatacagtatgttgagcccctagcgactgcgacggaacatgagcatagtattctaggcttgtagcttaggtaggacgagtagaatttcttcttttgttttttggcttcgaaaatattcttttcatccgttgggcagagactacaggtggtgtggggcaattctttcactgttctttctcctagttaggtcgtatgcatcgggaggatgtgctgtaacctcaaaagcgattattggttgattgattcgattggggggataatcaaaatttaagcttctttcttctcacacttcattacgctctcaacatttttcaacaaccgacagcaactatgccagtgaatgattgggagtgctcgggtgctaaataatcaacgtgttgtcgcgagccggctatattcctggactcgtgtattgacactagttaaatatctgcacgtcacatacagaaaataaaataacaca

SEQ ID NO: 2548 - DNA, 756 bp, Zea Mays
cttagttatatgtactgtattatgagcacaattgtagtagtatcgtgaagtcgacggggcagaaccctcaggccgccgggttaccgcagcagctgaacaacggcaccaccatggtcttcttcggcggcaacacacagaccagcagcgccgccgcctcatctgccaactctctcttcgccgtcaccgtcaccatcacagcagccgtcgcgctcgcgctctcgcgctcgactcgcctgtgaccggtcatcatcgctgtcaggtgggccacgcttatcagaagaccggtgagcatacatacagtatgttgagcccctagcgactgcgacggaacatgagcatagtattctaggcttgtagcttaggtaggacgagtagaatttcttcttttgttttttggcttcgaaaatattcttttcatccgttgggcagagactacaggtggtgtggggcaattctttcactgttctttctcctagttaggtcgtatgcatcgggaggatgtgctgtaacctcaaaagcgattattggttgattgattcgattggggggataatcaaaatttaagcttctttcttctcacacttcattacgctctcaacatttttcaacaaccgacagcaactatgccagtgaatgattgggagtgctcgggtgctaaataatcaacgtgttgtcgcgagccggctatattcctggactcgtgtattgacactagttaaatatctgcacgtcacatacagaaaataaaataacaca

SEQ ID NO: 2549 - DNA, 481 bp, Zea Mays
gtcatgtcgtgaatcggctcgaccacaacatgtcaacatcgttaccgatcaagaacaagtactgcaagatgaggagcatgaaggatgttacgatgagttcggagaggtctaggctgtcgtctcctagttaactatggttacggaggattgttgtcatgatatgatgtatttatttagctattttgtatagaacctctattatgcaataaagatgtgacattaatttatgtaccatgagtcatcatatgtgtgagacttgatcctagcacacatttgagacacactcaggtttgccattacatccaggtatgaaaaatacatttctttcagatcctgatacttcttagtacttccagggtgtatagagtatgctgaatcatgagcctctctaagaataagctgatgaagacgttcaatttctagtacacaaattctctttttgaaccaatttgtgccttgttcgtcttctgtgaaatctggg

SEQ ID NO: 2550 - DNA, 1756 bp, Zea Mays
gtggggatcttttgtggctgtggatcccatgtgccaatttatgtcccttcatgcggcgaaattccaatcggtagtatcgcgccacgtgtcaacggatgtaggcgcactaggatgtttttcattccaactatcggagtctgctagaaatatcccgtggtacacatccatgtaagaagtatcacaaaacagtccaaaactttataagtttaaccctgacttttaccaaaatagaagtcgtcgtcctttcaagaataaaaatattaaacataaattcaaaattctcaataatgctcctggaattattttttacatgtaaaattaataaaacaatacctagaaactcagataatttataatttattcgtcttaactccgattttagtggttctcaaacctatgatctcttagcgacgcatagaatattattgtgtagtttgttctcatgatttggtgtaatgttatcatatccattattatagaagtgaggtcacgaggagattcgaagcccaactcggttaagtacctggaaacacaagtaaaacacaagttgtgtccttgatcactttctttgacctaataatgttctcttaatcaccatggcactgttaggttaagatgatgggacctaataggttacctagttttgtttatcctataccatgcatacaaattaattattgggtagacttgctactgttgtacctggttttgggatacatggtacttatgattcatgatcatgtaccatgatgatttattattgttggctttattatgatacatgataggatcattttgttaattggaacatggagcgaccacccgagataacagtgctaccacaagggtggaatgggacacccttggctgattaattagggatgctagtgagagattaccttaccctaaagggcaagcaaggaggagttgctgcaagtataggaaggttctcggatcgaatagtttgtgatagcttttcggacgagggattcctatacccccctctacctaaaaccgcagtgggatttcttgagctagtggaactttgtaagggcctcgtagtgaaccattgccaactcaccttggaagtgtttaagggtctgtacaacccaggtgaaaagggaacacaacttatgggtaaaaatgcgcaatctctacagagtgtaaaattggtatatcagccgtgctcatggtcatgagtggctcgaaccttcacatgagtaatttgttgaattaaacttaacctgtcatacattgcattgcatgtgggttttattcattattgtgatcaattatttaattgggtttgtatacagttatactagtaattgctaataaaattttgaccaccactaaaagcaatgcttagccttaaccattctccttgccaagccttacactacacttttccccacacttgttgagcaatgactatatgggagatcactctttctataatcacaccagatcaagaacaagtactgcaagatgaggagcatgaaggatgttacgatgagttcggagaggtctaggctgtcgtctcctagttaactatggttacggaggattgttgtcatgatatgatgtatttatttagctattttgtatagaacctctattatgcaataaagatgtgacattaatttatgtaccatgagtcatcatatgtgtgagacttgatcctagcacacatttgagacacactcaggtttgccattacatccaggtatgaaaaatacatttctttcagatcctg

SEQ ID NO: 2551 - DNA, 467 bp, Zea Mays
ttatcagctattgtttgagagaagcataccaagttctcagtgaccctacacagcgccaagcttatgactcgcatgggaaagacggcatctcaacggaggggataattgatcctgcaacaatttttgcaattctgtttggtagtgagctttttgaggaatatattggtcaactggcaatggcatcaatggcttcacttgataattttggtgaagatgagcagattgatgcaagaaagctgcaagagagaatgcaggtatgttcctttagcaggattgttctataaaattccagatagttggttaatatcatccagcatgctgaaggagaggtgtccaaacttagaaatgtaggttttagccattactaatcagcccttctgtccctcgatgctaaatatgttttttttttcttttgattctatgctgtctgtgttcttagttggcatatggtatggaataagtttttc

SEQ ID NO: 2552 - DNA, 1528 bp, Zea Mays
cttagagctacattttttcatctggttggccattaacatcaggtgttggatggcggatcaccttgcaaagggtggcccacctcacccaattgcctgccccttttgtgatcaagccaaggagacaatcaatcacattctgcttccctgtgttttcactcggcaaatttggtctctggtcctgcagagtttggtcctggctgctgttgcacctactgcagcggtgtggcacttatctacctggtgggacaccaacaggagctctcccaaagagttccacaagggtttgaattatataatcatatcatggcttgggaagtttggaagcataagaattcctgtgtttttattagattcaaactaacatgcatgggctcctccaagccgttgagtgtagtgtttggccggggcatcgatactcgctggtgaaatcattgatcacagcatcttaggttcttgtagtccttggtcaagttttctatttctgtttgtgagatgttttttgactgttaccttcctagggaatgtgggtgtgagtggttttttgtactcaggatgggcttctctgttacagcccattgtactctgttctctattttaatgaaatgggacgcggctctcttgcgtaattcgaaagaaaaaactttgttattttatattctggttcccttattttactattatcatctgttgatcccccttgtcaagtaacattagaacacctttgtcatctactggagcacaacctagtcaattgctcaattaaagtggaaaaatgttgttctctaccaaataaaaaaactgctcgttgtcatcagcatcattagagcctcaagtcccgcatgttcggcctggagggtggtgagctcctcatcggcagcgaccacgaccacgaaggctgagcggtcatcaccgatgatctcctgctcgacgagcaagacatcgatgtttcgtggcacggggacctggcgccaggccaggaacttgagcagggtggaatccaggtgataaattcagttattttgcatcaatttcttactgtagcggggtttaatctccagtttacattgttgaaaaaacaacttttgtggtctctgacatgagattcctcacgcttaggtttacaaaatttcttggtgtgtagcaactggcccaagcgctacgaccgcatcgctgccgcaaagaggtatatttttctccccactggtttgatcggaacagattttcgctccctgtctggtacttatgagctgaccaatctgctatttgttgatttattgtgtgtgcagaccagaagaggaggaagatctcaaggcccatttgcaatcaggtcaattagttaagatgcttaacgtgagatgatccatggttgtgcttatcatcaggtcaattcatggttgacagtccagatgaaccatgaatatcatatcatggcttgggaaacaccatgaattatataatcatatctgatgatatagctgacagtccagattatctggactatcaggtcaattcatagctgatagtccag

SEQ ID NO: 2553 - DNA, 990 bp, Zea Mays
ctgattcatggaccaagcaaaggtaacctcttgtcagttgtctcccactgcagtaccctctccaatctataaatttcttcacaatatcttctgcacctctcacacaagacatccttacattttcttgctgatcacagctagtagggagcgagagttaccttgaaatcaaggcagtacgtacgagtacgatcgacaatgtcgacggtcacttcttgcacctttctgagcctcgggtccccagtgcggccggcagtctcctccgcgagaccggcggcggcggcggtggcttcccgacggaggccccggtccctttctgtgtgctgcgaggccggccggaaaggggatcacaacccaaagacggatctgcatccatttaacatccctgccttcgctggaggaggacgccgacaaggtgaacctgtggttcgaggtgcctgggcagtccaaggatgacctcaccgtggagatcgacgaagacgtgctcgtcatcaagaagaggaaggagctggtgggccagcggagccctgctggcggtggcgtcgcagagtacggctcgcagtcccagcagcagagcaggaggggcaccgcagatggcaaggagctgccggcggcacagcagggccaggccggcgaggtggtctatgcccggatgctcctcccggcggggtacagcagggatggcgtgcaggccgagctcaagtccggcgtgctcagggtcactgtcgtcaaggtcacggagcgagcgcgcaggaagatcgacgtccccattcaagtcaagtagatatgcgtgtatgtgtatgcacattcgtcctgcgcacgtgtcagcaggggtgctttatttacatctgtctcatgtccaacatgcagactacagcggtcgatctcaccacgtactcgatcgcgtcgactacacatgttcatgggctttgtgttcccatgtactcatcaatcaataaaatgagcatatgtgttctccgccatgcaacataa

SEQ ID NO: 2554 - DNA, 615 bp, Zea Mays
caccgtgctcctctgttagccgcgacctcgccttggttcccatggcgctcggccgcgcatctcccaggtgctcggagtcgaccgccgcgtagcaggacgcggagacgaacgcatgcagactgtggtggcccgcgcgacgggactggccgtcccagctccttgtcctcccctcgactctctccctgctggagctccttcgctagtcgccatcaaccgtgctcggccttgctgtgtcaagagatggagaagaaaggagttagatgaaggaaggaaagcccaatgcaacacttgcttcgtgttcggaagaaatcaaagccatgtggtgtttgatggactgttcgaaccgaagagcatggacgatctcgtggatttaaatcaaattggtcatggtaagctaaattgttgtttatgctagttggattgaggagtagatcgggcatatctattagtcgcgatgattatctatctatagcttacatgaagtgaatatatagttgatggcaatatattgtttatgctagtttggctgagatgaagtatggatatgagcttgctaattatgcgaaaaatttatgggtagatatatctgcgctatgtggtcgaagtaataatatg

SEQ ID NO: 2555 - DNA, 3095 bp, Zea Mays
gcaccagataacttaacaggatctgtccgagtgccccaaggacctcggataaaccacttacaaccaggaccataggataaaataaacacaaatcacataccaacattttgcagcggaaatcttattaccaaattttacaagttacatcaatttttatgatgtacatgatcggagtgattacaaaaagtgattcaaagaagtaactttgaactgttatagattattggtagttttgaaatatatgctagcttaagggaccatcctcaataagaagtatagaagggttacttagacttacaagaaggccgagcccaccggcacttaacaccatcaatagcagcacaaagttatgacctaaaaaacaatagggaataaaaccctgagtacggaattactcagcaagacttacccgactaaagaaaagactctcaagggtatgctggctagagggattcaaggtttggcttatcaagaatcaaagtctttgttttgcagaaaagcttactatgagtggatccttaaaaatccatttttacttgtcaggttaagtaaagttacctgcatctaaagttctttctatcctagttcaagcacatggcctacactagccatcttttcatcatccctttagttcactggatttctacgtgtagggcagtgaccaagtcttcatatccgagaagtaacggcgatccgaatcgattaatacccagatggggatctccaatcacacgacatatgtagcacttaacccttgcatatgtcaactcaccactggggttcttaagaccagatcaggttcacggcaaccgagagcacagatacaccaccatctagcctcttgccacggagggcacacgctactctcgccatctctccactcacattgcatgttatcttattctggtattagtctgcccgaggcaaagcttacccatgatgaggcatgtgactagttaaaaggtccacgatcagcaagcctacatcgacaaagtccttaatcgactcagacggagacactacaccgagactcccttctcgtgcaagtcaaccgcccggtctcagctttattattttcaacccaaagtttggtacctggcagaggtacatcttatccgatgttgaacccatcacggccgtgatggatccaccatcaagttttattttcgaaaacattcccacccactgaagcatcacttttgttttaaaacaaaacatttttgtttgctaaagcaaggctaagcatcataaaaatcctttttataaaagggtgtcaaggaagggtaatcaatttttcaaggaaggaaatgcatcaatggtttagcacacaactcctatcacctaatgcatcaaacaaggtgataaatattttaaaacatcaaggaggtggcaaatgcaccggggcttgcctgggtaacactaggttagtgttgttagacgacgaccaattgatgatcatccttgtcctagcacttgatcaggcaggttcgtccatcagcatcaccatgcggagtagcccgcgcttggggtcgacttggcttgccttccacatcacgcgattatttatcgtacctcatgagatacacgatgcacatgtatgagcacgagtataaagagtataagatagatatctacaccgaagagaatgaaacactcataacaaaacattaagcaaatactagctagcgatgtacaactaattataataattacgcctttctagcctattcggaggtagcgcatacatcgcaatacaataaaatatacacacgctctactttcttttatgatttattgacagattcatattactacatatatttttacctagtcaacatattttatacaatataccattacaccaatcactaggtaagaaaatcatcgatcatatcctacttcaacattatcaatcacaaacagagatgacactaactactagcacacgacatcgactttacttacgtgtattgaacaccattagcatcgacagagttatcgaaaatagcataaaattctaaatttaacctacgcgtcactaaaatattatgctctgcaaaatagaactatttcaaatatactctgcaactaaactcctcgaagcatctctcgcatcactggtatttctaacttaattttatacgccattataatataaaaataaaacaaaggaagggagatccttccaaagacgcttcggagtatcaacaacaggtacgattaccgatttaaaagtcgtcacacaatgtgtctatgctacaaggggattgaggagtagggcgagctcgacagccacgggcgagcgcagaggcgagccagagagctcagcgcacaggaagtcgacgcgcgcagcaggggcgagctcaaggagcaggagcgccacgcaggagaacaggccgggcgctgcgagcagagaggaagaagcacggggaagagacctcggtagggtgcgccgagcagcaggcgcgcgcagcgagctggagctcaaggaacgcgcggctggggaggaaggggagctcgatagaagcgccgggcgccataggagaggccgagccggcgttggggcgagctagcagaagaagtctgcgtgcaggggagcagagaaccgcgcgcgcatcaggtagctgggcagcagagcgcgacgaggaggaggaaggaggagcgcgcggtggatcgccgcggcatgggtgagcagagccgggcgccatgggagcttggaggagggagaccacagcgcgcaggggaagaggagcagaggaacaagagcttggggaaaagggaatcagcgagcagtagagaggaaagagcggccgagctcccgaactggagcaccagggagatccgagcagagaggggcgcgacaccagggacctccgagcaggggcgccgcggcactggagccttgggcaccgagcgctgaggggagaaagtggaggagcggctagagaagcctgcaccgcgtgggagataaggcagccggtgaagaagaaatatcagggatgaagagcggcgatagggatagagatcggctgtgggacattttctttctttttttaatttctttaaagaattttgtagatatttttgggattctg

SEQ ID NO: 2556 - DNA, 6803 bp, Zea Mays
cttggattacttcatgaaacgccgctcggaattgccttctgtttacaagtccttcactcgcatggttcacacccagttttctgttactattacaatttttcgttcagattatggtggtgaatttttatctgataatttccgccagatattgaccatagagggtactctagctcaactttcttgtcctggtgctcatgcccaaaatggtgttgctgaacgcaaacaccgtcatattattgagcgtgctcgtactcttttgatatcttcttttgttccctcacacttttggagtgaagctgtttccactaccgtgtatctcattaatagacaaccatcatctaaactttctggcaaatcaccgggtgaagttctttttgtgactcctccacggtatgatcatcttcgtgtgtttggatgtatatgttatgtcttgttaccaccacgtgagcggactaaattgactgctcattctgtagagtgtgtatttcttggatacggttctgaacacaaaggttatcgttgttatgatccatctactcgtcgtattcgaatttctagagatgtgagtttcaatgaaaatcgccccttctttcataatcagtctactcactcctcatattatttcacataatctacttctttcatgtgtcttccttccattcctgcatctgaaccgtcatcttctacatccacatctgatgttctcattcttataacacaccttccacctccacgtcatcttcttcttagtctttcagaccacctgtcatccaaatctacattcgtcgttcccgctccatttctacggctggccctgatcgtgatcctgtacccgattcttgtactaataataatgagtctaatgatgtttttaatcagggatatcgtcttcgtgaccgtggtaccattgaacctcccagatcgttatggttttccacgagctagtgtggcaattgttgaacccactacttatcaagaagcttctgagattcttgagtgacagctagctatgattgatgaattggctgctcttgaacgcactgatacatgggatatcgttcctttaccctcgcatgttgtttctatcacatgtaaatgggtcttcaaagttaagacaaaatcagatggttccattgagaggtataaagctcgtcttgtggctcgtggtttccaacagactcaaggacttgattatgatgagacttttgcacctgttgtgcatatgactactgttcgaaccttgattgcagttgcagcctcttcttcttggactatctcctagatggatgtcaagaatgcttttctcagtggtgatctacatgaagtttatatgcatcctcctctgggggttcatactccctcatggcacgtttgtcgtctctgtcgcgtattgtatggactgaaacaagcccctcgtgcttggtttgagcgattcctctctgtcatcacagctgctggtttctctactagtgaacatgatcctgcattgtttgttcatgtctctccaaaaggccgcactttacttctattatatgttgatgatatgctgattacaggtgacaactcagaacatatttctaatgtcaagcagtatcttagtaaggaatttcagatgtctgatttgggtccacttagctatttcttgggtattgaagttccgcagactccaaaaggcttttatctgtctcagtccaagtatatacaagatattcttgatcgctctggaattactgatacacgcatagttgcaacaccaatggatattcatttaaaacttcgtctgaaggatgggacaccactagaagacccaactcgatatcgtcatattgtgggtagtcttgtttatctcaccatcaccagaccttatattgctcgtgctgttcatatgttgaaccaatttgtatccacaccaacctcagttcattatggtcatttgcttcgtgtgcttcgatatttacgcgggacaagatccagatgtttactctatgcttttgatagcccacttcagctacatgcgtattctgatgccacttgggcaagtgatctgttgaccgttgctctactacaagttactgtattcttcttggatcctctcctattgcttggaaatccaagaagcaagcggccatatctcgttctagtgctgaagccgaacttcaggctcttgctactaccactgttgaaattatttggctgcgctgactcttggctgatcttggtgtctcctgtgacactcctacacctctgttatgtgataacttgagtgctatacagatttctcatgatccagtgaagcatgaacttactaaacacattggtgtcgatgcatcttttactcgatctcattgtcagcagaagactattgatcttcaatatgtgtcctcagaatctcaattgccagatttcttcaccaaaagcacaaacaagagcacaacatcagtttcacttgatcaaactcaaagcttcagatcctccatttccaccttgagtttgaggaggtgtgttaaggcccattaggcctaggcctattgcctatatatatcatatgtccttagggactaattatcatttgtcaatcccagggttagtaacacttgcaagcctatccgtagtccaacatctgttgtgagccactaactatataaagaagcgacatttgttagaagcccaagtcttccaaattctatcagcttgcttgaacataactgagccatggaacattgctgtgtatgtagattttgccgtatattcacatcaaacagaaaacctccaaacatggcgatcttgcacttcaggttgcagcaagaacccttccaaaacctcagccaaatcaagaaactatatcaagaaatcaaaggagagctccccgaacatcctcaatccaattcgaatcttgcactaatgattgtctttgaatttgctcctcctcatcatccacttgatcaagaggcacttcatcatcaacactttcatgttcaccttccaccagggttggcatcttttggggttgatgaccttcttcaagacttggatgacttgaggttgatggatttgcttgagtggaggatttatcacccacctcctttgcgcccacatcaaaatcctcattagtcatccacaaggttccttcctcgtcatccttttcttgaggtcttacttcacctattgcaagcttctttatggcatcacaaggtggttcttcatttcctgcaatgtcattagaaacatgcccttgcgagccattagactcatcaaatgtcacgtctatcgctatttcaacaagaccagtggtattgttgaaaacacgatatacatgcgcatttgatgcataaccaagcaagaagccctcgtccactctaggagcaaactttcgagctcttgactttctagttaagaataaaacatttacaccaaatactctaaagtaatcaactttaggtttgttaccagtgagaagctcataagcagtcttcttatagaccttatgaagatatagccggttgattgcatgacaggcggtgttgaccgcttcagcccagaagttgtcaggtgtcttgtattcatctaacatggttcttgcggcttcaattagtgttctatttttcctttctactacaccattttgttgtggagtgttttttcttgaacgcgcaggagagctgcacatcattatattaagagaagaaaagggtccaaagtggaccaaagtacaaagcccaaaaggcagaacaaacagacccaccaacctcctgctgtgcacagtgccccaacctccaacaaaaggaggcaaacaacaaacgtgccaacaggccccccacacacacctgcactactcacccagaaactccctggacctaataatggcagcacctaggcctaagccctcaagatgcttggcaccggctagaccccaacattctaactcttccaagaaaactttttgaattctgcttatggaaggactgacaccctcgaaaactgccttattacgatgaatccataaacaccaagcccccatgatgatgacgttgttaatgcctcttcttttggatttgtgcacttgcttacacaccttcctccaccactcagcaaaagatatctcaatagaagcaggagaaagattagcaagccccaacggtgcaagaatgcaatgccaaaactgtctagcaaagatgcaactgcaaaggagatgttggatattctccggctcctgatcacatagaggacagacctcaggatgatccagccctctcttctgaagtctatcagctgtccaacatttattccttattgacaaccataggaagaatttgcatttgggtggagcccaagatttccataacctcttccaaggttcaaaggtaatcgaacccatgaaaaaagccttatagcatgatctagaagagaactgcccagaggaagaatgaatccacacatgtctatcagcctcttgtgtgagcaccactcctcttatagcgtcccaaagctgtaggtactgctgcagcccaatcaaattaagaggggtctctaagtcgctgacccactgccagttctcaagagcatgggccaccgttctggaagaactagcccttttcccaacactagcaactacatcaggggcaagatcctggatacaagagccatccaaccacctatctgtccagaataaagtagtagacccgtctccaaccaaggtaataattgaagaagcaaagaatctcctgacatgctgctgaatagggaatttcagcccaacccaaggcctatttggatctgttttttccaaccataaccatttagtctgcagcgcccagctttggtaaagtaagttagaaatcccaaggccaccaagatataaaggccttgtaattatatcccaagagacaagacaacaacctccagttacctcctttcttcctttccaaagaaatcctcttcgaatcttatctatagaattaatcacccacttgggaatattcatggcaatgagaaggtataccgggatggccgaaagcacgaagcgcactatagctgtcctgccagccagattaagcagccgggccttccaattaggaagccgatcagcaattttgtcgacccaaaccatgagatcattccttctgagcttcttgtctgatatcggcaagcccaaataagtgcaagggaaagatgaagaagagcactgaagaatattgcagcccacctgcaccgcttgctgattacacctaattggaataacatagcttttttgcaagttagacaccaacccagaggctgaaccaaagcaatccaaaattgttctgacgcagtgaagatcttcctcaaaaggctgaacaaaaaggactacatcatcagcataaatggacagcctgtttcgaatattagcgccctccaatctatgcagcagccccctgttttcagccagcttgaataaactgttgagcacatccataaccaagacgaacaacataggagaaagaggatccccctagcgaagccctctccggtgcttaataggaataccaggagacccattcaaaagcacctgagtggaggacgaggtcagcaaatttgaaatcatacttcgccacacaggaccaaaaccaagatgtgaaagcacttcagtcaaaaaagcccaagaaactgaatcaaaggctttggagatatccaacttcaagaacaaactagagactttcttcttgtggagagatttaattgaatgctgcaccaacatgaagttgtcatgaatcgatcttcctctcacaaaagcactttggttagcagccaccaactcctgtaggtgaggacccaacctattagcaagcattttggtgaccaacttagcaaaactatgaattaagctaattggtctaaagtcccttgctgtcaaggcatcaattttcttaggaagaagagctataaaagcataattcagcagccccaacttgtaagcatttccttgatgaagcgaatttatagctgccaacaaatctgacttaataatatgccaacaacgcttataaaacctccctgtaaacccatcaggaccaggagccttatcagaggggagagctccaatcgtgtcttgaacctccttttccgagaaaggagcctccaggagactcaaatcaatagcatctctatggcaactagccagatcaagagtaaaaggcctctggacaatagaacccaaaagattggaaaagaaatcatccagaacttcctgcatctgatcatggctggtgactaaccttccctcatcctccaaatgagagataaaattcctcttcttgcggtggcgagcctgcaagtggaaaaattttgtgttggcatctccttccctcaaataatggacccgggatcttaaccgtgcaactgtcctttccaaagaagcaaggacaaggcaatgctgcttcaatttgcgcagcagccacacttcctcagacgacaacaccctgctgtcctgagccatctccatcctgtgcagcacctcacgagccacccccagctgagaactgacattgccgaccgcgttatgcccccaagattgcaatcttctcgctaatcttttaaactttatcgacaccctctcaaaagggcaagaagcctgaaccggctggtcccaagaagcagcaacctcttccataaaacccgggatttaggccaaaagctctcgaaatgaaatctacgcttccctttaagatccaaactgagtttaaggattagaggacaatgatcagaagtttcagatgcactgctgtaaagaaagcaatcggggaaagcctcctcccaacaggtagaac

SEQ ID NO: 2557 - DNA, 8773 bp, Zea Mays
acaacatatacgtggaaagattgagagaagaaacacttaccttgtagtgctggcttccacaatgctcctaaggtaacataagcgttggttgaatatgctgtgtgctgaaattcttctttctaaaagtgaaaacaagaccttaccaatcatttctaaaccaaccaagatctctgaggcaactgaaagtcaatacaaactaaacaaaacataagaaactctaaagtgttcgcagataatgtgtaacaatacatgcaatcgatgtatgggagttaatggcacagtacaaatattcttagccatacatgttcaaataaactatcatcatatacgacacaatgtagagaggaataggtttagaaaccttgtgtagctcaaattatttttactgtagcaatttctttaataaaagagtatgcaaacatatgtttgcatttttgtaacaaaaatattttagtggttagttatggaccagtttgggctaaagcattactgtagcagcgctacggtttctagggtttagatatttatttccttagttgcgattagtttcttagaaatcaagttacctcgtctatatatagatgggattgtgccctagttcattaagcaatcatagaagtcaagctacctcatctatatatagatgggattgtgctctagttcattaagcaatcaatcaaacaaagaaatccttacccaatcctgtaatgtctctcaagctcttggcaaagtataaagcccatttatcccctacctccccattatatggttatacgaaaaatgtggtaccacaaatgaatatgcagctgcacaaacaaatgccacacaactttttggaagtataaaatgatctatgacatcaacttttaaggattgacagagatacactattgaattaacttggcaatatttgcagggcacacataccaaaacattgtcgagtataaggttaactatcaactgctcaacttcttcttttctaagatcaacagcttcattgaaactacctgcttgaacattatcagctgtaatgtaagatcggttgaaatgattttttcctccaaagcgtagaagaactgcggatcattgtattaagaagaaagattggggtctatttacaacatataatgctggatgatgattgatagcataataatttccaggaaacaaggcattaacaaaaaaggtaaatttttttcttgaacgcgcagaagaactacgcatcattatatcaagaaggaataaaaggtcggtccaaagaggaccaacacagagtacaaaacagccacttcatggcggccaaaaacgagagtacaagaaagcatctctatccattaaactagaataaatcaccctctactacagccctggaataggcgccatgaagagggaagacttctgtctcctgccatcttccataggacaccttcctccttagcttttgtgatggctgtctccatattggggtttgccatatcaaaaacacaaccatttttgtggttccaaatggtccaagctcctaggatgattaacgaattatggccttgccttgcgatgccatgcacctgctcagacacttatttccaccagtccatgaagacacaatcacctggctgaggcgctaaggtctgaaggttaacaagtcctaggaagcggaaccagaattcactagcaaaggggcaatcagtgagtagatgattaattgtttcaggagcctgatcacagaggagacatctgtccagatgtgcaagcccacgcctctgtaaccccccacacctccaccaatccctcgccggattccactccggacccggcgaccaactcctcgacccccaccccctcggtgaatgcccccagtctagctagtcgcctggtcctccaggaggaaggacgttccaagacccagagatggtgtgatgatgatagtggcgctgcctcgtcgggaggatcctctctggcctcttgttcctataaagaggcacttctccatacttcagggcgtgctgatattgctgcttccgtagcaaatcacgctcctgctccgcccttcacgaagacaacggttggtgaccattcggaggtacagcgtccttctgttgtaagccgacatctggatgatgatggatgcgggtggttgagcgcaggaggagatatcgtgatgtgcaccttcctcgtcgagggtccatagtggatctccgagggaagtgttataagtgtttctctgcctcccacctggtggattcttgccgacgccctacgaggtgttttcgcttcttcaagtttggtcatcaggcggcgagggggaagacagtgtggtagcgtctgggtccttgcgatgagcgagttccaatgtggcagaggctatctgttatggacaattccactccaccggtgggcgtgcgtccatcctttcagcacaaggccccagaccccagtgtggagaaggctctccctgccacaagattcctcaatggtgggcagaagatcggaggacgacatgcatctggctgagtggcatatgaagaagagaagacgttccaagcaaggaaaaggcaattctgggttgtactcggggccgagccagccccaccccaatccttcaggtgttgttcagacctctttgccttggaaaccttcctgagttttggagttctccactgcattggcaagggaggaagtggatcttcggagagccttgtttgtttcggtgattggcaccaggccgactgttcgcggtgaagatgtgctagaggaattggcgcgaagctttgacatcaaccctgatgacatgtctattcaacatgccatgccagaggatttcctattgttcctgcctgatgaacacacaacaacacaaattcttaatgagggaagacctttcagaggccctaggttttctctcagttttaaaagatggtcgagattctcgcatgcctcgtcgacgtccatgacggcactggttgatattgaaattcaggggattccagcgcatgcatgggaactctccacgacaaagatgctgctgcaggactcttgctgggtcttggaactacttcgtgattcaggatcgacatttctgctgcgcgcctggtgttttgatccgaatcgattatatcgggaaatggatctgcatattgttgagtcgggtgttgatgagcagaagaaccgatgtctgacatacaacatcagtattgcagtttctccggtgccccttcagttaacctccatcagtgttacttcctccccttcatcagagggtgggcaatttggtgaaggggatgaccgtgatccgtcaagttctcagcagcgccgccttccccctcaacctcggcggggttcagttcatcttcgccagctgcccactaaagcacgcgctgcctccttaaatgagccgcaccctggagctcgtgttgcctcctttaaagacgtcgctagaaccaaggtgccgcctgttgttgggtcgctggacgggtctaggccaacctcgccccaacactacactgttgttgctaggccgctggagttggacgggacggattcgccccaagataccgggcctttgggatctattgatgatgggctgcgagatccgcttagcctgacttcgcctcgccaggacgttcccggggctgagccgctggagcaggctatgacaggtccgtcccatgacgcaggtcgtaccccaggaaatatatttgaagtcatgtgggcgcctgaggatctaggatctactatttctccggacactgggatgccgtcctcaaccaggccatctctgccccaactcatccactgcaccaatgatgagaatctgcctgaacatgatcatttgaggacaccgccaattgggtgtcctcactcgcccaagctggtagtatattcaagaaagaggatcaacaaaaagagtatttcagaaaacaaggatgaagaaaggaatgggccaaatgaatctgagatggggggtaaagccaaaaaggtctctgacctccttgcaacacctcatgatccatctttgatgtcgaagagtgcccaggctcctgatattatcccacgtcgtagtcatcaaattgcaggggtgggggttgaatttgacaagcaggacttatgctcaaggtccacaaagagagtcatgcaggccctgaaagtgattggggactcggagggaatcagccagcaagccaaagaagactatctgaaagttttctccaatgaactacctctttctcatgttgaagcattggtggccttctttggatgggcggtgccagatgaattaaagataggcagtaacagcgttggcattagtgcctgttaattctccttccctaatttagttgatgaaaatgttattaaatggatccaaaaaaatcttgagttggaattggaatgtaagggaccttaattctgcatctaggaaaagttccgttagaacctttatcgaatcatgtggtgcagatgttatctatcttcaggaaacaaaaatgcaggaaatcaacaaaggaaaggtgttggctatattgggaacatattttgaccagttcatctttttaccatctaatggagctagtggaggaattctggtttcttggagaagacatataaaggtgacagggcttaatagagtggattcctatagtgtcccagtgcaagaaaactaatggtcagccctggtggttaacctgtgtttatggaccccaaagtaataatgaaaagatcctttttctccaagagttaaggcaaatcagaagtgtttttttgatccatgggttattgtaggagacttcaatctaatttacaaggtggaagacaagaataatgacaatgtaaacagagcaatgatgggtcgagtcaggaaatttatcaatgatgttggtctgattgatgctcccctaattggccgcaaatatacgtggtctaaccatcaaacttcaccatcattggtcagactagatagagttctttgcacctcagactgggaggcactgttccctaatcatcttcttcaaagtgctgcatcggaggactcagatcattgcccattgattcttgggcttaatagtaagtgttctggcacgcgtcggtttcattttgaatctttctggccaaaactggaagggtttcaggtgacagttcaggaagcttggacctcggtcaaggaaagaaactgtcctttcctgacctttgaattgaaattgaaagcaactgctaaagctcttcaagggtggagtgctaaaaaggtaggtcatgtggcctcccagttggcccttgctagagaagtcctacatcaattggaagttgctcaaggttttcaactcttgtctccaatggaggtgtggcttatgaggggtcttaaaaagcattctttagcccttgcttcctcacgcactattgcccgtttgagatcaagaatcagttggataaaggagggtgatgccaattccaaactttttcatatgcacgctagacacaggataaggaagaactttgtcgccaagattgtctcgggtaatgacacattcattgatcaagatgagaaggccaaagaggtggatgagttttactataagctttttgggctgcagggtggacagatccttgactgttgatttggactacttgggtttaccctctcatgacttggctgctttagatgcaccgatcgatgaaaatgaggttctggaatccataaaacagctaccttcagacaaggcgccaggtccagatgggtacacaggcagattctataaagtgtgtgggccaattatcaaaggatatgtaatggctgttgtttctgcaatttggtgcaggaaatttgggcagtttggaaggctaaatacaacatttgttactcttatccctaagaaggagggggctgaggaggtaaaggatttttgacctatcagtctagtgcacagtattgctaagcttgtcaccaaattgatggctaacagactgtcccaattgctgcatgatctagtttctctaaggcagagcgcttttattaaaggtcgtttcattcaagacaacttcatgatggttcagcagcctgccagattgcttcatcaacaaagaaaaccaagggtacttctgaagctagacatcaccaaagcctttgattctgtctcttggcctttcttgcttgaagttctccaaaaactgggatttggacagatatggagagatatcttaagcgggctattggcaacttcctccacacaagttctcctcaacggagttccaggggacatcattcatcataagagagggttgagacaaggggatcctctctcacctatgctttttattttagtaatggacatccttggatgccttgttactaaagcagaagaggaacctctctcctccaaacctaaacccagctttttatttttttcatccaagggagaatgaaatccatactattctcagtattttgaatctggttggagaagcttcaggcttaaaaactaatattcagaagagtagtgtttatcccatccgatgtggtgaggaggagttgataacccttcatgatcggcttccacgtgacctatcttcttttccctgcaaataccttggtctgcctctgtctttaaagaaactgtccaaaaatcaggtgcaacccattattgacagagtggctgatcaactgtctgggtggaaagcggatctaatgacaagggctggcagaagagtacaggttcagtatgtgatgacaggcatgctcatttatttagccatggcagttgacatacccccaggttcactcaaagctattgacaagatcagaaaaggctttctctggcgtggaaggaaagatgtcagaggaggacattgtttagtggcttggggcaagagtctatagacctatcgaaatcggcggtcttggtatttctagtctcaaagaattaggatggaccttaagaatgaaatggttgtggctgagaaaaacggaaccggataaaccgtggtcctcactgcctatacagttttccaaaaaaaatgaaggccttcttttacactgccatgctcattgaaattgggaatggttcttgaaccttattttggcaagaccgttgggtccatggaaagaaaattgaagaccttgctcctcgactgcttgcagttgtgccaaacaggattaggaacaacagaactgttcttgaggccttaacagatagaaaatggttaactgatattaaagggggcttgacagtaggagtttttgctgacctcatagatctctgggatgcacttcaaacaatccagcttcatccagacatggaggataaacatattttcaggtttgctactgatggaaattactcagctaaagcagcctatgagggtttcttcattgggtcgacccaagctgagcattgggagttaatttggaaaacttggtctccttctaaatgtaaattcttcttatggcttgctgatttaggaagatgttggacagcagaccgtctagagaaaagaggtttaagccatcctgacaaatgtcctttgtgtgaccaagatcaagaaagcatagaccacattttggtgggttgtgtctgtgctaggaacttttggttccagctgcttggacaagtcaatctacctggttttgctcctcggctgggggaagtgaacactatgcagtggtggagtagaaccagtgagcaactgcaggggattgcaaaaaaagggcttaattctttaatcaccctcgggctatggactctctgaaaccatagaaatgggtgtctgacagaattaaacccagtctagaggtagctataagaatagttgaagaagatattgatttatggacgttcgcgggggccaaacatcttgctcttctcacagctcccatttcaggtgtcttacaggagtctggtagagggagcagttgacaacatcatagatgaagatattgtctggtgctgggctggtgcgtcgggtctgtgtagatggtggcctttttaggtgtccgtttatggatgttttcatgttttctaagttgcggccaccatagggtgtccttttttttcttttcttgtatttgtaattggtctatttttggaccctccttcctttcttaatttaatgatacacagctctcctgcgcgttcgagaaaaaaaagtagacagagccaaggagggggaggaagccagcgccgcctgggcggggagggtggtcgtcagcgccggagtggttgctggcgaggggctgggggtttgcgtggcgccgacattggtgggaaacaaggggtgggggcatgagccgagggggcaggcacaggccgactatccatctctatcaacaaaagaggtaaaattacatcaataaaaagttacaacatcgtaaaaattttgtcgaggagatgtacctaaacctttccactttgacttgaacttatccaccagctgtagtagtgtagctctttgatcattaaagttgcatatcgtgaagaagtgaaactataatttttgtatggtctaaacaggaagtagaaaaaattactgtgagaatatcatgaaataaaaaacattttccccctgaaataaagtgaataaatgttggtcatttgttgtaatttttaaactgacgcaaaataaatcatacaggtgacatcaatatccttctgctcaatagtggaagcacaattgtcgcacattcctgcaaaaagaaatccttcagaatgaatgcccaaacgtttggctcctaacaaacataaagtataaaataaaataccgttgcagtcctgagggacctctccaaaat

SEQ ID NO: 2558 - DNA, 3549 bp, Zea Mays
ctagctcttcccctctcctattactgtagcatttgtagggctacaattcgcccccttcccgcacaacgcatcccccttcctcctccccgtcgatggtgttgtcttctctctcaccctaggacaagggagacactatcgctcctctgccaacgatgtcgagtgctcccccacacgtacggagttgttccaaagactcctgtacttcccctgcaagcctcggcggtgaccatcatcgatctatggacctcggtgagtggaggtcacggatctactccaccggtgtcgacgaggtttgtttccccgtcctggagaagcgacgacgcaatagatcttcgtgcactgcagagtcgtctcccccaagccgcaaaggaatcactccactccatcctcgttctttgaatcgatctggacattatgatctgttttcttgatggtacataaactgagtttttatagttgttagatgcttgttgtattcgtttgtttagttcagactgcagaggttcaacaacagcaggcttagggtatgtgttgatcttaactccattttcattagcccattagaagcaatgtgttattttttggttacattattatcttttggccgtgaatggcaccaatacataattagttggtatgcacagacaactttgtaagcctgacttggtgatagctatggtattatgtaatccaccttagtacacaacactagctgttcatgcatttacttatctgtcatgatatactccaattatcctagtacatctaaataatctggtaaggtatattacatcattcatttgagttgtacactaataaacaaatgttatccatgtgtagagccttgtggtgaaatacttgtcacttgtgtccgtcatcttgtttgttggtttgtttatctatctttttgcaagctcgtccaagagccggccaaaagcaagcaagaagagatgttgatttacttataggttgtagttttaggtgtatctggtggttttgccagaggaactcttagtagtttgagctgagtgaaagcttttaagtttacaattactgaccacaccatgaattacaacgacgtgagcatcagttttgaaggtttagcaaactctggcattttctgactttcatgctgtccatcttccaaatgaagcccttttggaggcaaatctagttttatctgctctatgttatgtcaatactgattttgtatatttgtaagtgctgtggcaatactgattagttatgattattgaaaatatataatttaatggatatgatatacatatttatccttctttaagacactctatttttgtgtgagtgcagtggcaaatgttttcggctgttggccatgaatttatttagtattttatttgatctcatgagattagaacatacatctctagaagctttgaaggacattccttagtcgatatgcccaaatgatggttttcttgaccaggtgacatttgctattcaaccattaattactaagtaaccttgaagtataatttatttagtatgctattcagcctttactaagtaatcttgaagtataatttatctgcactgattgatttttgttctgtgctaccagctaaccagggtcattaaaatgtagtgttggccatttttaactatgtcagctcacctagaaaattttccttaaccaagcatcccatatacaacacaatgtcctctagagaaaacatttgaattctttgtcttggaacaatgtctcggtctgcaggtctggttctcaaatacaatcgtcaagtcttgcgagcatttctttgagcctcattctctaccaatgaagcactttcctgtcactagaactgaactatagtcttcatagtttcactacactcaatttgggaattgtatatcataattgtacttttcttttctttttctatatactaaattttcttgtttttattaacacaattgtgaaggcttatcattacacgtccatgtgtcattgtgctcacttggatcttactaaagacaaagtatgggctgagaaagttcattggcatttgagtttgcatggctggccttattttggtcgtattttctgatgtgtgttcttcttatcgagcaagtatgaacaagcttcattttttatacatatggaattgcactattacagttctgatgtcatactgaatgcattttcttgaaaaaatgataatatgaatttacaacaacgaatgttcatctcacagtatttacatagatgagaataatgtccatattacctcactatgacatggttaaataaaatttatcacaggaaatgaaactgtcagctatgaaaacccaaagccaactgctggaatacattgccttgtctttgtagtctcctgctagtttatccagcaaacagtttatgcataagggtcttcttttggttaattagggttcttttggtcagttatcatatgatcacttgttgctttattaggatcctgtctggggaatcttcatccttttcacccttcacctgtttttgtttcgaatacaaatttgtatgttttgaatgggattgctaaagtgatattacagttactttctgtcggtttaaagtctgatgataaatggagtgtggagtatggactactaccatttattcctactgcaaaatcatttaaaatggatatagttttggccatgttactacaattgcaacgatggataagttatccctgcttgttctttatgggtatgtgttctagattctagaagattaatgcttgaacccatctaacaatgttgtggctttaaccgatttcaggtgtggatctgatttgtaatggcttattaggatttaggccaggtgtgatctggtttgtaaatgaatctctttgccatgcattgagttgttttttctgtgctgtctcatggttacactctattggcattgtacagttcatcagactaggtgcaagtttttttcctgataaaacatcaaaaaggtctaaattacatgtatgattcaggcatgttttcttaattttatgacagtcactgatgttctgaataaaatactactattttgtgacaatcttatagcatggccttcgagttgtgtatgaaattgaagaggactatagtctatagatcatatgctcatttcaacatcaagggcaatttgattcaattaagtctaggatgatgattttcagtacctaggatgaagtttcagagctgccacctaatttcagagctgcaagatttctacagaattggaagactatgctaccaaaaaagctttcctaatttacctaagatgaagttcagtattgtttaggacgagtcatatgtttatgtctttgtgtctccaaaaatatttgtacacgtatcaagtggtgattattttaagtttcgctactctatatattggctattttatttcaatgagaaatggtttgtccattgcaaccgtgtggagtttctcatttttattaatggcaaatgctgatgtatattcatttttgttgaataaatggtttatttcttgaaacatgtatatgtgttccc

SEQ ID NO: 2559 - DNA, 2074 bp, Zea Mays
ctcttcccctctcctattactgtagcatttgtagggctacaattcgcccccttcccgcacaacgcatcccccttcctcctccccgtcgatggtgttgtcttctctctcaccctaggacaagggagacactatcgctcctctgccaacgatgtcgagtgctcccccacacgtacggagttgttccaaagactcctgtacttcccctgcaagcctcggcggtgaccatcatcgatctatggacctcggtgagtggaggtcacggatctactccaccggtgtcgacgaggtttgtttccccgtcctggagaagcgacgacgcaatagatcttcgtgcactgcagagtcgtctcccccaagccgcaaaggaatcactccactccatcctcgttctttgaatcgatctggcttatcattacacgtccatgtgtcattgtgctcacttggatcttactaaagacaaagtatgggctgagaaagttcattggcatttgagtttgcatggctggccttattttggtcgtattttctgatgtgtgttcttcttatcgagcaagtatgaacaagcttcattttttatacatatggaattgcactattacagttctgatgtcatactgaatgcattttcttgaaaaaatgataatatgaatttacaacaacgaatgttcatctcacagtatttacatagatgagaataatgtccatattacctcactatgacatggttaaataaaatttatcacaggaaatgaaactgtcagctatgaaaacccaaagccaactgctggaatacattgccttgtctttgtagtctcctgctagtttatccagcaaacagtttatgcataagggtcttcttttggttaattagggttcttttggtcagttatcatatgatcacttgttgctttattaggatcctgtctggggaatcttcatccttttcacccttcacctgtttttgtttcgaatacaaatttgtatgttttgaatgggattgctaaagtgatattacagttactttctgtcggtttaaagtctgatgataaatggagtgtggagtatggactactaccatttattcctactgcaaaatcatttaaaatggatatagttttggccatgttactacaattgcaacgatggataagttatccctgcttgttctttatgggtatgtgttctagattctagaagattaatgcttgaacccatctaacaatgttgtggctttaaccgatttcaggtgtggatctgatttgtaatggcttattaggatttaggccaggtgtgatctggtttgtaaatgaatctctttgccatgcattgagttgttttttctgtgctgtctcatggttacactctattggcattgtacagttcatcagactaggtgcaagtttttttcctgataaaacatcaaaaaggtctaaattacatgtatgattcaggcatgttttcttaattttatgacagtcactgatgttctgaataaaatactactattttgtgacaatcttatagcatggccttcgagttgtgtatgaagtatgaactaccctcttgattaactagtcattactactccaagctactactatcaatttaagtattgtgatcattcatgcagattgaagaggactatagtctatagatcatatgctcatttcaacatcaagggcaatttgattcaattaagtctaggatgatgattttcagtacctaggatgaagtttcagagctgccacctaatttcagagctgcaagatttctacagaattggaagactatgctaccaaaaaagctttcctaatttacctaagatgaagttcagtattgtttaggacgagtcatatgtttatgtctttgtgtctccaaaaatatttgtacacgtatcaagtggtgattattttaagtttcgctactctatatattggctattttatttcaatgagaaatggtttgtccattgcaaccgtgtggagtttctcatttttattaatggcaaatgctgatgtatattcatttttgttgaataaatggtttatttcttgaaacatgtatatgtgttccc

SEQ ID NO: 2560 - DNA, 846 bp, Zea Mays
cttcccctctcctattactgtagcatttgtagggctacaattcgcccccttcccgcacaacgcatcccccttcctcctccccgtcgatggtgttgtcttctctctcaccctaggacaagggagacactatcgctcctctgccaacgatgtcgagtgctcccccacacgtacggagttgttccaaagactcctgtacttcccctgcaagcctcggcggtgaccatcatcgatctatggacctcggtgagtggaggtcacggatctactccaccggtgtcgacgaggtttgtttccccgtcctggagaagcgacgacgcaatagatcttcgtgcactgcagagtcgtctcccccaagccgcaaaggaatcactccactccatcctcgttctttgaatcgatctgattgaagaggactatagtctatagatcatatgctcatttcaacatcaagggcaatttgattcaattaagtctaggatgatgattttcagtacctaggatgaagtttcagagctgccacctaatttcagagctgcaagatttctacagaattggaagactatgctaccaaaaaagctttcctaatttacctaagatgaagttcagtattgtttaggacgagtcatatgtttatgtctttgtgtctccaaaaatatttgtacacgtatcaagtggtgattattttaagtttcgctactctatatattggctattttatttcaatgagaaatggtttgtccattgcaaccgtgtggagtttctcatttttattaatggcaaatgctgatgtatattcatttttgttgaataaatggtttatttcttgaaacatgtatatgtgttccc

SEQ ID NO: 2561 - DNA, 1206 bp, Zea Mays
atttgtagggctacaattcgcccccttcccgcacaacgcatcccccttcctcctccccgtcgatggtgttgtcttctctctcaccctaggacaagggagacactatcgctcctctgccaacgatgtcgagtgctcccccacacgtacggagttgttccaaagactcctgtacttcccctgcaagcctcggcggtgaccatcatcgatctatggacctcggtgagtggaggtcacggatctactccaccggtgtcgacgaggtttgtttccccgtcctggagaagcgacgacgcaatagatcttcgtgcactgcagagtcgtctcccccaagccgcaaaggaatcactccactccatcctcgttctttgaatcgatctggtgtggatctgatttgtaatggcttattaggatttaggccaggtgtgatctggtttgtaaatgaatctctttgccatgcattgagttgttttttctgtgctgtctcatggttacactctattggcattgtacagttcatcagactaggtgcaagtttttttcctgataaaacatcaaaaaggtctaaattacatgtatgattcaggcatgttttcttaattttatgacagtcactgatgttctgaataaaatactactattttgtgacaatcttatagcatggccttcgagttgtgtatgaagtatgaactaccctcttgattaactagtcattactactccaagctactactatcaatttaagtattgtgatcattcatgcagattgaagaggactatagtctatagatcatatgctcatttcaacatcaagggcaatttgattcaattaagtctaggatgatgattttcagtacctaggatgaagtttcagagctgccacctaatttcagagctgcaagatttctacagaattggaagactatgctaccaaaaaagctttcctaatttacctaagatgaagttcagtattgtttaggacgagtcatatgtttatgtctttgtgtctccaaaaatatttgtacacgtatcaagtggtgattattttaagtttcgctactctatatattggctattttatttcaatgagaaatggtttgtccattgcaaccgtgtggagtttctcatttttattaatggcaaatgctgatgtatattcatttttgttgaataaatggtttatttcttgaaacatgtatatgtgttccc

SEQ ID NO: 2562 - DNA, 3082 bp, Zea Mays
tagggctacaattcgcccccttcccgcacaacgcatcccccttcctcctccccgtcgatggtgttgtcttctctctcaccctaggacaagggagacactatcgctcctctgccaacgatgtcgagtgctcccccacacgtacggagttgttccaaagactcctgtacttcccctgcaagcctcggcggtgaccatcatcgatctatggacctcggtgagtggaggtcacggatctactccaccggtgtcgacgaggtttgtttccccgtcctggagaagcgacgacgcaatagatcttcgtgcactgcagagtcgtctcccccaagccgcaaaggaatcactccactccatcctcgttctttgaatcgatctggtaaaccttggcctttcccccaaatcttcccgctgtccttccaccccctcgcctccataaccccacccactgtactgcttttgtttcacttgctttctgttgaatccatgctacatttgactgtgaattcaggaaatcattaagtataatcgaagtcccgttgatttctggttttgtaggacattatgatctgttttcttgatggtacataaactgagtttttatagttgttagatgcttgttgtattcgtttgtttagttcagactgcagaggttcaacaacagcaggcttagggtatgtgttgatcttaactccattttcattagcccattagaagcaatgtgttattttttggttacattattatcttttggccgtgaatggcaccaatacataattagttggtatgcacagacaactttgtaagcctgacttggtgatagctatggtattatgtaatccaccttagtacacaacactagctgttcatgcatttacttatctgtcatgatatactccaattatcctagtacatctaaataatctggtaaggtatattacatcattcatttgagttgtacactaataaacaaatgttatccatgtgtagagccttgtggtgaaatacttgtcacttgtgtccgtcatcttgtttgttggtttgtttatctatctttttgcaagctcgtccaagagccggccaaaagcaagcaagaagagatgttgatttacttataggttgtagttttaggtgtatctggtggttttgccagaggaactcttagtagtttgagctgagtgaaagcttttaagtttacaattactgaccacaccatgaattacaacgacgtgagcatcagttttgaaggtttagcaaactctggcattttctgactttcatgctgtccatcttccaaatgaagcccttttggaggcaaatctagttttatctgctctatgttatgtcaatactgattttgtatatttgtaagtgctgtggcaatactgattagttatgattattgaaaatatataatttaatggatatgatatacatatttatccttctttaagacactctatttttgtgtgagtgcagtggcaaatgttttcggctgttggccatgaatttatttagtattttatttgatctcatgagattagaacatacatctctagaagctttgaaggacattccttagtcgatatgcccaaatgatggttttcttgaccaggtgacatttgctattcaaccattaattactaagtaaccttgaagtataatttatttagtatgctattcagcctttactaagtaatcttgaagtataatttatctgcactgattgatttttgttctgtgctaccagctaaccagggtcattaaaatgtagtgttggccatttttaactatgtcagctcacctagaaaattttccttaaccaagcatcccatatacaacacaatgtcctctagagaaaacatttgaattctttgtcttggaacaatgtctcggtctgcaggtctggttctcaaatacaatcgtcaagtcttgcgagcatttctttgagcctcattctctaccaatgaagcactttcctgtcactagaactgaactatagtcttcatagtttcactacactcaatttgggaattgtatatcataattgtacttttcttttctttttctatatactaaattttcttgtttttattaacacaattgtgaaggcttatcattacacgtccatgtgtcattgtgctcacttggatcttactaaagacaaagtatgggctgagaaagttcattggcatttgagtttgcatggctggccttattttggtcgtattttctgatgtgtgttcttcttatcgagcaagtgtggatctgatttgtaatggcttattaggatttaggccaggtgtgatctggtttgtaaatgaatctctttgccatgcattgagttgttttttctgtgctgtctcatggttacactctattggcattgtacagttcatcagactaggtgcaagtttttttcctgataaaacatcaaaaaggtctaaattacatgtatgattcaggcatgttttcttaattttatgacagtcactgatgttctgaataaaatactactattttgtgacaatcttatagcatggccttcgagttgtgtatgaagtatgaactaccctcttgattaactagtcattactactccaagctactactatcaatttaagtattgtgatcattcatgcagattgaagaggactatagtctatagatcatatgctcatttcaacatcaagggcaatttgattcaattaagtctaggatgatgattttcagtacctaggatgaagtttcagagctgccacctaatttcagagctgcaagatttctacagaattggaagactatgctaccaaaaaagctttcctaatttacctaagatgaagttcagtattgtttaggacgagtcatatgtttatgtctttgtgtctccaaaaatatttgtacacgtatcaagtggtgattattttaagtttcgctactctatatattggctattttatttcaatgagaaatggtttgtccattgcaaccgtgtggagtttctcatttttattaatggcaaatgctgatgtatattcatttttgttgaataaatggtttatttcttgaaacatgtatatgtgttccc

SEQ ID NO: 2563 - DNA, 1701 bp, Zea Mays
tagggctacaattcgcccccttcccgcacaacgcatcccccttcctcctccccgtcgatggtgttgtcttctctctcaccctaggacaagggagacactatcgctcctctgccaacgatgtcgagtgctcccccacacgtacggagttgttccaaagactcctgtacttcccctgcaagcctcggcggtgaccatcatcgatctatggacctcggtgagtggaggtcacggatctactccaccggtgtcgacgaggtttgtttccccgtcctggagaagcgacgacgcaatagatcttcgtgcactgcagagtcgtctcccccaagccgcaaaggaatcactccactccatcctcgttctttgaatcgatctggcttatcattacacgtccatgtgtcattgtgctcacttggatcttactaaagacaaagtatgggctgagaaagttcattggcatttgagtttgcatggctggccttattttggtcgtattttctgatgtgtgttcttcttatcgagcaagtatgaacaagcttcattttttatacatatggaattgcactattacagttctgatgtcatactgaatgcattttcttgaaaaaatgataatatgaatttacaacaacgaatgttcatctcacagtatttacatagatgagaataatgtccatattacctcactatgacatggttaaataaaatttatcacaggaaatgaaactgtcagctatgaaaacccaaagccaactgctggaatacattgccttgtctttgtagtctcctgctagtttatccagcaaacagtttatgcataagggtcttcttttggttaattagggttcttttggtcagttatcatatgatcacttgttgctttattaggatcctgtctggggaatcttcatccttttcacccttcacctgtttttgtttcgaatacaaatttgtatgttttgaatgggattgctaaagtgatattacagttactttctgtcggtttaaagtctgatgataaatggagtgtggagtatggactactaccatttattcctactgcaaaatcatttaaaatggatatagttttggccatgttactacaattgcaacgatggataagttatccctgcttgttctttatgggtatgtgttctagattctagaagattaatgcttgaacccatctaacaatgttgtggctttaaccgatttcaggtgtggatctgatttgtaatggcttattaggatttaggccagattgaagaggactatagtctatagatcatatgctcatttcaacatcaagggcaatttgattcaattaagtctaggatgatgattttcagtacctaggatgaagtttcagagctgccacctaatttcagagctgcaagatttctacagaattggaagactatgctaccaaaaaagctttcctaatttacctaagatgaagttcagtattgtttaggacgagtcatatgtttatgtctttgtgtctccaaaaatatttgtacacgtatcaagtggtgattattttaagtttcgctactctatatattggctattttatttcaatgagaaatggtttgtccattgcaaccgtgtggagtttctcatttttattaatggcaaatgctgatgtatattcatttttgttgaataaatggtttatttcttgaaacatgtatatgtgttccc

SEQ ID NO: 2564 - DNA, 3430 bp, Zea Mays
ggctacaattcgcccccttcccgcacaacgcatcccccttcctcctccccgtcgatggtgttgtcttctctctcaccctaggacaagggagacactatcgctcctctgccaacgatgtcgagtgctcccccacacgtacggagttgttccaaagactcctgtacttcccctgcaagcctcggcggtgaccatcatcgatctatggacctcggtgagtggaggtcacggatctactccaccggtgtcgacgaggtttgtttccccgtcctggagaagcgacgacgcaatagatcttcgtgcactgcagagtcgtctcccccaagccgcaaaggaatcactccactccatcctcgttctttgaatcgatctggtaaaccttggcctttcccccaaatcttcccgctgtccttccaccccctcgcctccataaccccacccactgtactgcttttgtttcacttgctttctgttgaatccatgctacatttgactgtgaattcaggaaatcattaagtataatcgaagtcccgttgatttctggttttgtaggacattatgatctgttttcttgatggtacataaactgagtttttatagttgttagatgcttgttgtattcgtttgtttagttcagactgcagaggttcaacaacagcaggcttagggtatgtgttgatcttaactccattttcattagcccattagaagcaatgtgttattttttggttacattattatcttttggccgtgaatggcaccaatacataattagttggtatgcacagacaactttgtaagcctgacttggtgatagctatggtattatgtaatccaccttagtacacaacactagctgttcatgcatttacttatctgtcatgatatactccaattatcctagtacatctaaataatctggtaaggtatattacatcattcatttgagttgtacactaataaacaaatgttatccatgtgtagagccttgtggtgaaatacttgtcacttgtgtccgtcatcttgtttgttggtttgtttatctatctttttgcaagctcgtccaagagccggccaaaagcaagcaagaagagatgttgatttacttataggttgtagttttaggtgtatctggtggttttgccagaggaactcttagtagtttgagctgagtgaaagcttttaagtttacaattactgaccacaccatgaattacaacgacgtgagcatcagttttgaaggtttagcaaactctggcattttctgactttcatgctgtccatcttccaaatgaagcccttttggaggcaaatctagttttatctgctctatgttatgtcaatactgattttgtatatttgtaagtgctgtggcaatactgattagttatgattattgaaaatatataatttaatggatatgatatacatatttatccttctttaagacactctatttttgtgtgagtgcagtggcaaatgttttcggctgttggccatgaatttatttagtattttatttgatctcatgagattagaacatacatctctagaagctttgaaggacattccttagtcgatatgcccaaatgatggttttcttgaccaggtgacatttgctattcaaccattaattactaagtaaccttgaagtataatttatttagtatgctattcagcctttactaagtaatcttgaagtataatttatctgcactgattgatttttgttctgtgctaccagctaaccagggtcattaaaatgtagtgttggccatttttaactatgtcagctcacctagaaaattttccttaaccaagcatcccatatacaacacaatgtcctctagagaaaacatttgaattctttgtcttggaacaatgtctcggtctgcaggtctggttctcaaatacaatcgtcaagtcttgcgagcatttctttgagcctcattctctaccaatgaagcactttcctgtcactagaactgaactatagtcttcatagtttcactacactcaatttgggaattgtatatcataattgtacttttcttttctttttctatatactaaattttcttgtttttattaacacaattgtgaaggcttatcattacacgtccatgtgtcattgtgctcacttggatcttactaaagacaaagtatgggctgagaaagttcattggcatttgagtttgcatggctggccttattttggtcgtattttctgatgtgtgttcttcttatcgagcaagtatgaacaagcttcattttttatacatatggaattgcactattacagttctgatgtcatactgaatgcattttcttgaaaaaatgataatatgaatttacaacaacgaatgttcatctcacagtatttacatagatgagaataatgtccatattacctcactatgacatggttaaataaaatttatcacaggaaatgaaactgtcagctatgaaaacccaaagccaactgctggaatacattgccttgtctttgtagtctcctgctagtttatccagcaaacagtttatgcataagggtcttcttttggttaattagggttcttttggtcagttatcatatgatcacttgttgctttattaggatcctgtctggggaatcttcatccttttcacccttcacctgtttttgtttcgaatacaaatttgtatgttttgaatgggattgctaaagtgatattacagttactttctgtcggtttaaagtctgatgataaatggagtgtggagtatggactactaccatttattcctactgcaaaatcatttaaaatggatatagttttggccatgttactacaattgcaacgatggataagttatccctgcttgttctttatgggtatgtgttctagattctagaagattaatgcttgaacccatctaacaatgttgtggctttaaccgatttcaggtgtggatctgatttgtaatggcttattaggatttaggccagattgaagaggactatagtctatagatcatatgctcatttcaacatcaagggcaatttgattcaattaagtctaggatgatgattttcagtacctaggatgaagtttcagagctgccacctaatttcagagctgcaagatttctacagaattggaagactatgctaccaaaaaagctttcctaatttacctaagatgaagttcagtattgtttaggacgagtcatatgtttatgtctttgtgtctccaaaaatatttgtacacgtatcaagtggtgattattttaagtttcgctactctatatattggctattttatttcaatgagaaatggtttgtccattgcaaccgtgtggagtttctcatttttattaatggcaaatgctgatgtatattcatttttgttgaataaatggtttatttcttgaaacatgtatatgtgttccc

SEQ ID NO: 2565 - DNA, 2737 bp, Zea Mays
ggctacaattcgcccccttcccgcacaacgcatcccccttcctcctccccgtcgatggtgttgtcttctctctcaccctaggacaagggagacactatcgctcctctgccaacgatgtcgagtgctcccccacacgtacggagttgttccaaagactcctgtacttcccctgcaagcctcggcggtgaccatcatcgatctatggacctcggtgagtggaggtcacggatctactccaccggtgtcgacgaggtttgtttccccgtcctggagaagcgacgacgcaatagatcttcgtgcactgcagagtcgtctcccccaagccgcaaaggaatcactccactccatcctcgttctttgaatcgatctggtaaaccttggcctttcccccaaatcttcccgctgtccttccaccccctcgcctccataaccccacccactgtactgcttttgtttcacttgctttctgttgaatccatgctacatttgactgtgaattcaggaaatcattaagtataatcgaagtcccgttgatttctggttttgtaggacattatgatctgttttcttgatggtacataaactgagtttttatagttgttagatgcttgttgtattcgtttgtttagttcagactgcagaggttcaacaacagcaggcttagggtatgtgttgatcttaactccattttcattagcccattagaagcaatgtgttattttttggttacattattatcttttggccgtgaatggcaccaatacataattagttggtatgcacagacaactttgtaagcctgacttggtgatagctatggtattatgtaatccaccttagtacacaacactagctgttcatgcatttacttatctgtcatgatatactccaattatcctagtacatctaaataatctggtaaggtatattacatcattcatttgagttgtacactaataaacaaatgttatccatgtgtagagccttgtggtgaaatacttgtcacttgtgtccgtcatcttgtttgttggtttgtttatctatctttttgcaagctcgtccaagagccggccaaaagcaagcaagaagagatgttgatttacttataggttgtagttttaggtgtatctggtggttttgccagaggaactcttagtagtttgagctgagtgaaagcttttaagtttacaattactgaccacaccatgaattacaacgacgtgagcatcagttttgaaggtttagcaaactctggcattttctgactttcatgctgtccatcttccaaatgaagcccttttggaggcaaatctagttttatctgctctatgttatgtcaatactgattttgtatatttgtaagtgctgtggcaatactgattagttatgattattgaaaatatataatttaatggatatgatatacatatttatccttctttaagacactctatttttgtgtgagtgcagtggcaaatgttttcggctgttggccatgaatttatttagtattttatttgatctcatgagattagaacatacatctctagaagctttgaaggacattccttagtcgatatgcccaaatgatggttttcttgaccaggtgacatttgctattcaaccattaattactaagtaaccttgaagtataatttatttagtatgctattcagcctttactaagtaatcttgaagtataatttatctgcactgattgatttttgttctgtgctaccagctaaccagggtcattaaaatgtagtgttggccatttttaactatgtcagctcacctagaaaattttccttaaccaagcatcccatatacaacacaatgtcctctagagaaaacatttgaattctttgtcttggaacaatgtctcggtctgcaggtctggttctcaaatacaatcgtcaagtcttgcgagcatttctttgagcctcattctctaccaatgaagcactttcctgtcactagaactgaactatagtcttcatagtttcactacactcaatttgggaattgtatatcataattgtacttttcttttctttttctatatactaaattttcttgtttttattaacacaattgtgaaggcttatcattacacgtccatgtgtcattgtgctcacttggatcttactaaagacaaagtatgggctgagaaagttcattggcatttgagtttgcatggctggccttattttggtcgtattttctgatgtgtgttcttcttatcgagcaagtgtggatctgatttgtaatggcttattaggatttaggccagattgaagaggactatagtctatagatcatatgctcatttcaacatcaagggcaatttgattcaattaagtctaggatgatgattttcagtacctaggatgaagtttcagagctgccacctaatttcagagctgcaagatttctacagaattggaagactatgctaccaaaaaagctttcctaatttacctaagatgaagttcagtattgtttaggacgagtcatatgtttatgtctttgtgtctccaaaaatatttgtacacgtatcaagtggtgattattttaagtttcgctactctatatattggctattttatttcaatgagaaatggtttgtccattgcaaccgtgtggagtttctcatttttattaatggcaaatgctgatgtatattcatttttgttgaataaatggtttatttcttgaaacatgtatatgtgttccc

SEQ ID NO: 2566 - DNA, 3440 bp, Zea Mays
ggctacaattcgcccccttcccgcacaacgcatcccccttcctcctccccgtcgatggtgttgtcttctctctcaccctaggacaagggagacactatcgctcctctgccaacgatgtcgagtgctcccccacacgtacggagttgttccaaagactcctgtacttcccctgcaagcctcggcggtgaccatcatcgatctatggacctcggtgagtggaggtcacggatctactccaccggtgtcgacgaggtttgtttccccgtcctggagaagcgacgacgcaatagatcttcgtgcactgcagagtcgtctcccccaagccgcaaaggaatcactccactccatcctcgttctttgaatcgatctggtaaaccttggcctttcccccaaatcttcccgctgtccttccaccccctcgcctccataaccccacccactgtactgcttttgtttcacttgctttctgttgaatccatgctacatttgactgtgaattcaggaaatcattaagtataatcgaagtcccgttgatttctggttttgtaggacattatgatctgttttcttgatggtacataaactgagtttttatagttgttagatgcttgttgtattcgtttgtttagttcagactgcagaggttcaacaacagcaggcttagggtatgtgttgatcttaactccattttcattagcccattagaagcaatgtgttattttttggttacattattatcttttggccgtgaatggcaccaatacataattagttggtatgcacagacaactttgtaagcctgacttggtgatagctatggtattatgtaatccaccttagtacacaacactagctgttcatgcatttacttatctgtcatgatatactccaattatcctagtacatctaaataatctggtaaggtatattacatcattcatttgagttgtacactaataaacaaatgttatccatgtgtagagccttgtggtgaaatacttgtcacttgtgtccgtcatcttgtttgttggtttgtttatctatctttttgcaagctcgtccaagagccggccaaaagcaagcaagaagagatgttgatttacttataggttgtagttttaggtgtatctggtggttttgccagaggaactcttagtagtttgagctgagtgaaagcttttaagtttacaattactgaccacaccatgaattacaacgacgtgagcatcagttttgaaggtttagcaaactctggcattttctgactttcatgctgtccatcttccaaatgaagcccttttggaggcaaatctagttttatctgctctatgttatgtcaatactgattttgtatatttgtaagtgctgtggcaatactgattagttatgattattgaaaatatataatttaatggatatgatatacatatttatccttctttaagacactctatttttgtgtgagtgcagtggcaaatgttttcggctgttggccatgaatttatttagtattttatttgatctcatgagattagaacatacatctctagaagctttgaaggacattccttagtcgatatgcccaaatgatggttttcttgaccaggtgacatttgctattcaaccattaattactaagtaaccttgaagtataatttatttagtatgctattcagcctttactaagtaatcttgaagtataatttatctgcactgattgatttttgttctgtgctaccagctaaccagggtcattaaaatgtagtgttggccatttttaactatgtcagctcacctagaaaattttccttaaccaagcatcccatatacaacacaatgtcctctagagaaaacatttgaattctttgtcttggaacaatgtctcggtctgcaggtctggttctcaaatacaatcgtcaagtcttgcgagcatttctttgagcctcattctctaccaatgaagcactttcctgtcactagaactgaactatagtcttcatagtttcactacactcaatttgggaattgtatatcataattgtacttttcttttctttttctatatactaaattttcttgtttttattaacacaattgtgaaggcttatcattacacgtccatgtgtcattgtgctcacttggatcttactaaagacaaagtatgggctgagaaagttcattggcatttgagtttgcatggctggccttattttggtcgtattttctgatgtgtgttcttcttatcgagcaagtatgaacaagcttcattttttatacatatggaattgcactattacagttctgatgtcatactgaatgcattttcttgaaaaaatgataatatgaatttacaacaacgaatgttcatctcacagtatttacatagatgagaataatgtccatattacctcactatgacatggttaaataaaatttatcacaggaaatgaaactgtcagctatgaaaacccaaagccaactgctggaatacattgccttgtctttgtagtctcctgctagtttatccagcaaacagtttatgcataagggtcttcttttggttaattagggttcttttggtcagttatcatatgatcacttgttgctttattaggatcctgtctggggaatcttcatccttttcacccttcacctgtttttgtttcgaatacaaatttgtatgttttgaatgggattgctaaagtgatattacagttactttctgtcggtttaaagtctgatgataaatggagtgtggagtatggactactaccatttattcctactgcaaaatcatttaaaatggatatagttttggccatgttactacaattgcaacgatggataagttatccctgcttgttctttatgggtatgtgttctagattctagaagattaatgcttgaacccatctaacaatgttgtggctttaaccgatttcaggtgtggatctgatttgtaatggcttattaggatttaggccaggtgtgatctgattgaagaggactatagtctatagatcatatgctcatttcaacatcaagggcaatttgattcaattaagtctaggatgatgattttcagtacctaggatgaagtttcagagctgccacctaatttcagagctgcaagatttctacagaattggaagactatgctaccaaaaaagctttcctaatttacctaagatgaagttcagtattgtttaggacgagtcatatgtttatgtctttgtgtctccaaaaatatttgtacacgtatcaagtggtgattattttaagtttcgctactctatatattggctattttatttcaatgagaaatggtttgtccattgcaaccgtgtggagtttctcatttttattaatggcaaatgctgatgtatattcatttttgttgaataaatggtttatttcttgaaacatgtatatgtgttccc

SEQ ID NO: 2567 - DNA, 1708 bp, Zea Mays
ggctacaattcgcccccttcccgcacaacgcatcccccttcctcctccccgtcgatggtgttgtcttctctctcaccctaggacaagggagacactatcgctcctctgccaacgatgtcgagtgctcccccacacgtacggagttgttccaaagactcctgtacttcccctgcaagcctcggcggtgaccatcatcgatctatggacctcggtgagtggaggtcacggatctactccaccggtgtcgacgaggtttgtttccccgtcctggagaagcgacgacgcaatagatcttcgtgcactgcagagtcgtctcccccaagccgcaaaggaatcactccactccatcctcgttctttgaatcgatctggcttatcattacacgtccatgtgtcattgtgctcacttggatcttactaaagacaaagtatgggctgagaaagttcattggcatttgagtttgcatggctggccttattttggtcgtattttctgatgtgtgttcttcttatcgagcaagtatgaacaagcttcattttttatacatatggaattgcactattacagttctgatgtcatactgaatgcattttcttgaaaaaatgataatatgaatttacaacaacgaatgttcatctcacagtatttacatagatgagaataatgtccatattacctcactatgacatggttaaataaaatttatcacaggaaatgaaactgtcagctatgaaaacccaaagccaactgctggaatacattgccttgtctttgtagtctcctgctagtttatccagcaaacagtttatgcataagggtcttcttttggttaattagggttcttttggtcagttatcatatgatcacttgttgctttattaggatcctgtctggggaatcttcatccttttcacccttcacctgtttttgtttcgaatacaaatttgtatgttttgaatgggattgctaaagtgatattacagttactttctgtcggtttaaagtctgatgataaatggagtgtggagtatggactactaccatttattcctactgcaaaatcatttaaaatggatatagttttggccatgttactacaattgcaacgatggataagttatccctgcttgttctttatgggtatgtgttctagattctagaagattaatgcttgaacccatctaacaatgttgtggctttaaccgatttcaggtgtggatctgatttgtaatggcttattaggatttaggccaggtgtgatctgattgaagaggactatagtctatagatcatatgctcatttcaacatcaagggcaatttgattcaattaagtctaggatgatgattttcagtacctaggatgaagtttcagagctgccacctaatttcagagctgcaagatttctacagaattggaagactatgctaccaaaaaagctttcctaatttacctaagatgaagttcagtattgtttaggacgagtcatatgtttatgtctttgtgtctccaaaaatatttgtacacgtatcaagtggtgattattttaagtttcgctactctatatattggctattttatttcaatgagaaatggtttgtccattgcaaccgtgtggagtttctcatttttattaatggcaaatgctgatgtatattcatttttgttgaataaatggtttatttcttgaaacatgtatatgtgttccc

SEQ ID NO: 2568 - DNA, 2522 bp, Zea Mays
ggctacaattcgcccccttcccgcacaacgcatcccccttcctcctccccgtcgatggtgttgtcttctctctcaccctaggacaagggagacactatcgctcctctgccaacgatgtcgagtgctcccccacacgtacggagttgttccaaagactcctgtacttcccctgcaagcctcggcggtgaccatcatcgatctatggacctcggtgagtggaggtcacggatctactccaccggtgtcgacgaggtttgtttccccgtcctggagaagcgacgacgcaatagatcttcgtgcactgcagagtcgtctcccccaagccgcaaaggaatcactccactccatcctcgttctttgaatcgatctggtaaaccttggcctttcccccaaatcttcccgctgtccttccaccccctcgcctccataaccccacccactgtactgcttttgtttcacttgctttctgttgaatccatgctacatttgactgtgaattcaggaaatcattaagtataatcgaagtcccgttgatttctggttttgtaggacattatgatctgttttcttgatggtacataaactgagtttttatagttgttagatgcttgttgtattcgtttgtttagttcagactgcagaggttcaacaacagcaggcttagggtatgtgttgatcttaactccattttcattagcccattagaagcaatgtgttattttttggttacattattatcttttggccgtgaatggcaccaatacataattagttggtatgcacagacaactttgtaagcctgacttggtgatagctatggtattatgtaatccaccttagtacacaacactagctgttcatgcatttacttatctgtcatgatatactccaattatcctagtacatctaaataatctggtaaggtatattacatcattcatttgagttgtacactaataaacaaatgttatccatgtgtagagccttgtggtgaaatacttgtcacttgtgtccgtcatcttgtttgttggtttgtttatctatctttttgcaagctcgtccaagagccggccaaaagcaagcaagaagagatgttgatttacttataggttgtagttttaggtgtatctggtggttttgccagaggaactcttagtagtttgagctgagtgaaagcttttaagtttacaattactgaccacaccatgaattacaacgacgtgagcatcagttttgaaggtttagcaaactctggcattttctgactttcatgctgtccatcttccaaatgaagcccttttggaggcaaatctagttttatctgctctatgttatgtcaatactgattttgtatatttgtaagtgctgtggcaatactgattagttatgattattgaaaatatataatttaatggatatgatatacatatttatccttctttaagacactctatttttgtgtgagtgcagtggcaaatgttttcggctgttggccatgaatttatttagtattttatttgatctcatgagattagaacatacatctctagaagctttgaaggacattccttagtcgatatgcccaaatgatggttttcttgaccaggtgtggatctgatttgtaatggcttattaggatttaggccaggtgtgatctggtttgtaaatgaatctctttgccatgcattgagttgttttttctgtgctgtctcatggttacactctattggcattgtacagttcatcagactaggtgcaagtttttttcctgataaaacatcaaaaaggtctaaattacatgtatgattcaggcatgttttcttaattttatgacagtcactgatgttctgaataaaatactactattttgtgacaatcttatagcatggccttcgagttgtgtatgaagtatgaactaccctcttgattaactagtcattactactccaagctactactatcaatttaagtattgtgatcattcatgcagattgaagaggactatagtctatagatcatatgctcatttcaacatcaagggcaatttgattcaattaagtctaggatgatgattttcagtacctaggatgaagtttcagagctgccacctaatttcaggccagatttattttccagagccgctagatttcagtttcagagctgcacgatgaatccacacttgattctattttctcttgactttcagagctgcaagatttctacagaattggaagactatgctaccaaaaaagctttcctaatttacctaagatgaagttcagtattgtttaggacgagtcatatgtttatgtctttgtgtctccaaaaatatttgtacacgtatcaagtggtgattattttaagtttcgctactctatatattggctattttatttcaatgagaaatggtttgtccattgcaaccgtgtggagtttctcatttttattaatggcaaatgctgatgtatattcatttttgttgaataaatggtttatttcttgaaacatgtatatgtgttccc

SEQ ID NO: 2569 - DNA, 2760 bp, Zea Mays
ggctacaattcgcccccttcccgcacaacgcatcccccttcctcctccccgtcgatggtgttgtcttctctctcaccctaggacaagggagacactatcgctcctctgccaacgatgtcgagtgctcccccacacgtacggagttgttccaaagactcctgtacttcccctgcaagcctcggcggtgaccatcatcgatctatggacctcggtgagtggaggtcacggatctactccaccggtgtcgacgaggtttgtttccccgtcctggagaagcgacgacgcaatagatcttcgtgcactgcagagtcgtctcccccaagccgcaaaggaatcactccactccatcctcgttctttgaatcgatctgtggcaaatgttttcggctgttggccatgaatttatttagtattttatttgatctcatgagattagaacatacatctctagaagctttgaaggacattccttagtcgatatgcccaaatgatggttttcttgaccaggtgacatttgctattcaaccattaattactaagtaaccttgaagtataatttatttagtatgctattcagcctttactaagtaatcttgaagtataatttatctgcactgattgatttttgttctgtgctaccagctaaccagggtcattaaaatgtagtgttggccatttttaactatgtcagctcacctagaaaattttccttaaccaagcatcccatatacaacacaatgtcctctagagaaaacatttgaattctttgtcttggaacaatgtctcggtctgcaggtctggttctcaaatacaatcgtcaagtcttgcgagcatttctttgagcctcattctctaccaatgaagcactttcctgtcactagaactgaactatagtcttcatagtttcactacactcaatttgggaattgtatatcataattgtacttttcttttctttttctatatactaaattttcttgtttttattaacacaattgtgaaggcttatcattacacgtccatgtgtcattgtgctcacttggatcttactaaagacaaagtatgggctgagaaagttcattggcatttgagtttgcatggctggccttattttggtcgtattttctgatgtgtgttcttcttatcgagcaagtatgaacaagcttcattttttatacatatggaattgcactattacagttctgatgtcatactgaatgcattttcttgaaaaaatgataatatgaatttacaacaacgaatgttcatctcacagtatttacatagatgagaataatgtccatattacctcactatgacatggttaaataaaatttatcacaggaaatgaaactgtcagctatgaaaacccaaagccaactgctggaatacattgccttgtctttgtagtctcctgctagtttatccagcaaacagtttatgcataagggtcttcttttggttaattagggttcttttggtcagttatcatatgatcacttgttgctttattaggatcctgtctggggaatcttcatccttttcacccttcacctgtttttgtttcgaatacaaatttgtatgttttgaatgggattgctaaagtgatattacagttactttctgtcggtttaaagtctgatgataaatggagtgtggagtatggactactaccatttattcctactgcaaaatcatttaaaatggatatagttttggccatgttactacaattgcaacgatggataagttatccctgcttgttctttatgggtatgtgttctagattctagaagattaatgcttgaacccatctaacaatgttgtggctttaaccgatttcaggtgtggatctgatttgtaatggcttattaggatttaggccaggtgtgatctggtttgtaaatgaatctctttgccatgcattgagttgttttttctgtgctgtctcatggttacactctattggcattgtacagttcatcagactaggtgcaagtttttttcctgataaaacatcaaaaaggtctaaattacatgtatgattcaggcatgttttcttaattttatgacagtcactgatgttctgaataaaatactactattttgtgacaatcttatagcatggccttcgagttgtgtatgaagtatgaactaccctcttgattaactagtcattactactccaagctactactatcaatttaagtattgtgatcattcatgcagattgaagaggactatagtctatagatcatatgctcatttcaacatcaagggcaatttgattcaattaagtctaggatgatgattttcagtacctaggatgaagtttcagagctgccacctaatttcaggccagatttattttccagagccgctagatttcagtttcagagctgcacgatgaatccacacttgattctattttctcttgactttcagagctgcaagatttctacagaattggaagactatgctaccaaaaaagctttcctaatttacctaagatgaagttcagtattgtttaggacgagtcatatgtttatgtctttgtgtctccaaaaatatttgtacacgtatcaagtggtgattattttaagtttcgctactctatatattggctattttatttcaatgagaaatggtttgtccattgcaaccgtgtggagtttctcatttttattaatggcaaatgctgatgtatattcatttttgttgaataaatggtttatttcttgaaacatgtatatgtgttccc

SEQ ID NO: 2570 - DNA, 2747 bp, Zea Mays
ggctacaattcgcccccttcccgcacaacgcatcccccttcctcctccccgtcgatggtgttgtcttctctctcaccctaggacaagggagacactatcgctcctctgccaacgatgtcgagtgctcccccacacgtacggagttgttccaaagactcctgtacttcccctgcaagcctcggcggtgaccatcatcgatctatggacctcggtgagtggaggtcacggatctactccaccggtgtcgacgaggtttgtttccccgtcctggagaagcgacgacgcaatagatcttcgtgcactgcagagtcgtctcccccaagccgcaaaggaatcactccactccatcctcgttctttgaatcgatctggtaaaccttggcctttcccccaaatcttcccgctgtccttccaccccctcgcctccataaccccacccactgtactgcttttgtttcacttgctttctgttgaatccatgctacatttgactgtgaattcaggaaatcattaagtataatcgaagtcccgttgatttctggttttgtaggacattatgatctgttttcttgatggtacataaactgagtttttatagttgttagatgcttgttgtattcgtttgtttagttcagactgcagaggttcaacaacagcaggcttagggtatgtgttgatcttaactccattttcattagcccattagaagcaatgtgttattttttggttacattattatcttttggccgtgaatggcaccaatacataattagttggtatgcacagacaactttgtaagcctgacttggtgatagctatggtattatgtaatccaccttagtacacaacactagctgttcatgcatttacttatctgtcatgatatactccaattatcctagtacatctaaataatctggtaaggtatattacatcattcatttgagttgtacactaataaacaaatgttatccatgtgtagagccttgtggtgaaatacttgtcacttgtgtccgtcatcttgtttgttggtttgtttatctatctttttgcaagctcgtccaagagccggccaaaagcaagcaagaagagatgttgatttacttataggttgtagttttaggtgtatctggtggttttgccagaggaactcttagtagtttgagctgagtgaaagcttttaagtttacaattactgaccacaccatgaattacaacgacgtgagcatcagttttgaaggtttagcaaactctggcattttctgactttcatgctgtccatcttccaaatgaagcccttttggaggcaaatctagttttatctgctctatgttatgtcaatactgattttgtatatttgtaagtgctgtggcaatactgattagttatgattattgaaaatatataatttaatggatatgatatacatatttatccttctttaagacactctatttttgtgtgagtgcagtggcaaatgttttcggctgttggccatgaatttatttagtattttatttgatctcatgagattagaacatacatctctagaagctttgaaggacattccttagtcgatatgcccaaatgatggttttcttgaccaggtgacatttgctattcaaccattaattactaagtaaccttgaagtataatttatttagtatgctattcagcctttactaagtaatcttgaagtataatttatctgcactgattgatttttgttctgtgctaccagctaaccagggtcattaaaatgtagtgttggccatttttaactatgtcagctcacctagaaaattttccttaaccaagcatcccatatacaacacaatgtcctctagagaaaacatttgaattctttgtcttggaacaatgtctcggtctgcaggtctggttctcaaatacaatcgtcaagtcttgcgagcatttctttgagcctcattctctaccaatgaagcactttcctgtcactagaactgaactatagtcttcatagtttcactacactcaatttgggaattgtatatcataattgtacttttcttttctttttctatatactaaattttcttgtttttattaacacaattgtgaaggcttatcattacacgtccatgtgtcattgtgctcacttggatcttactaaagacaaagtatgggctgagaaagttcattggcatttgagtttgcatggctggccttattttggtcgtattttctgatgtgtgttcttcttatcgagcaagtgtggatctgatttgtaatggcttattaggatttaggccaggtgtgatctgattgaagaggactatagtctatagatcatatgctcatttcaacatcaagggcaatttgattcaattaagtctaggatgatgattttcagtacctaggatgaagtttcagagctgccacctaatttcagagctgcaagatttctacagaattggaagactatgctaccaaaaaagctttcctaatttacctaagatgaagttcagtattgtttaggacgagtcatatgtttatgtctttgtgtctccaaaaatatttgtacacgtatcaagtggtgattattttaagtttcgctactctatatattggctattttatttcaatgagaaatggtttgtccattgcaaccgtgtggagtttctcatttttattaatggcaaatgctgatgtatattcatttttgttgaataaatggtttatttcttgaaacatgtatatgtgttccc

SEQ ID NO: 2571 - DNA, 2074 bp, Zea Mays
gtccaaagtcatagtacctccacagttttgacccaatctacaaagtcaccgtggaaaaggaatagttcagaaactagtcacacatatggcacaaattgaaaatattaaacatagaaaaaacacgttcagaacttttgtatcaaaagggatataacacattaaaatcatactaaactgatagggatcaatatgaagttaggacaagctcctgactaaatataaaatggattgtaaacacgatagtataacatgaacagactcatgggacttgtaagtagattgacaattcatgtaataacatgtaatactactggacatagtcaatgcataagtaattaagtatgcaatgtcaaataaaacccttttgcaatatcatgtcctttgcatgtgcactatgatgtaaaaagatacaaactccaacagcaagaaaaaaacaacaggttgcaacacaccatagggtatgtagcatgtaactgatgatgcacttggtcaatgtgtgttgaaaggtaagacatctcagttggtcagcagatccgtcttagggcttgttcggttattgttattccatgtggattagagtggtttgagtgggtttggaatggatttttgacttgctatggatttaaaccgactcaataccatccaatccacatggattgaagaacaacagaacaagcccttaaaatgaaattcactcctttttgctaagtcgttacatttcaattgcctgaattttcagacaacagtcttacagaaccaactagtatcattaaaaggacaactcaaaagagacaattcacatttcttttctatagcccaacaatgaaaaaattacatatctggataacaacaaataaacagggagctgaaatatacaagaagtgtattgctaaataacttggctaagcagactaagtacaaagatatggaacgaaagtaaactaaggggatgtttggatcagctagggctaatttattagctggagctaaaaattagctaatactccttccattcattgatctacatcgttttatccttcggcacaatgaccaaggagcagcaaaggatcggcaatttccaattaatcaccgcagtcctcttaatgccctggcgttcattcgtttcaccaagttccgatgacaaaaagaggaagtactatcaggatgatctaaagatcaccatataccttgacttgttagcaaaagctgatcctcctacacttcgtcgtggagttttgaaataagtatctgcttggtgtccctttaagagttgtataggccatttggagcaaagtgttggctgcatgaagctccttgtcatgaagctccatgtccgtaactaggacatcagcagcatcacttcgatcaatatcagtaaatgtttcttgggagtcaggcacttcagattcaccagccaaaaaaatctataacaaaacgcaactcggtcgtggaagaattgttggattcattgcaggaatctgacaccgtgcacaagaccctgatcggcggcagtgccctggcactccattgtaatcaacgaaagttatggtgaggtgcgacggtgaaggacgatcatgtaggcgtgcgccaggacatactggtgtgatggactcctaacaggatgggacgggagatatttgaagcaacgggagaagagccgaagcaacaaaggtgcagcatatacgaggagtcacggacgtgcgaggacgaagcgaacccgtggtcccaatctaataccatgtagactcttggattttttttcagacgaggtagataatgaacggagggagtaactagcgttgggtgatccaaacaggacatagttagggacagctagcgagttagctcacaactccaacatagcccacctattagccccctatgtagatgagcaagaggggcaaaaattagctggctaacgagaaatagcagccctatgaatcaaacaggcccctctggagaaagttgagcagaacattacaagtatacacattgtagtgtctggagagatatcatcagattcaggtaaagatactgttcggattcaatattaccacaccaaattacaccaacc

SEQ ID NO: 2572 - DNA, 2639 bp, Zea Mays
cttagctccaccactagaattgagacatatatccgcaaagtcatcgggagggggaggagtcacttgatgaaagccgatgtggcggaaccgcccgaattattccaacttaagtgtctaagccccaccttaaatgctagaccacacttaaataggaataaaacgtcagtccctcggatccagtccgacgaggccactaacaggatcaagtaccatgtactcactcgatggtgaggcacagagcaaatacaataaagcataaaaccatacattaaggagtattaaatttattacaacatcatcggagttttagcaaaagtagtgatcattgttcggaatgcagcggaataaaactaacgataaataaacggagggatggggaagcctatcccatcactcctcatgctcctcctctgccgaggtagggtcccactcgactgtccaacccggtggcaagatggacggccaagtcactccagcaaccatgtcctctagagaacctgtaaaattatgccacaagcaaggctgggtatactaatactcagctagacttacccggtgtgaggagtctactcctctacctctagacatgtagctgtttgactgaggggtttggtttgccaaaagcactagctgagtctaaaatcaagttttagctttttcaagttttagtgtgactctcttaagactaaatgtgtacctatctaatcatacatggtatcaaacatttagcaatcaacaacttctgccaattcatcacatttccacttgttacacaatgtagcagcatggatcaagtagtctcattagctgcgagaagcagacgattcgaatcaagtttttaaaccttgcaaggtaaacctaaacacatgacgtggcgaggcactccgtccccacacacatcaaccgtccccatcgattccctgtcagcaggggctcaccgccttggcgtacaatggctcactgaccccgactatcgttgtgcagtgaccgcacatgtacccaccataaccggaatgggagaccacgtctcaggtcgcgtgaggagggcaatctactgccaggttcactcagatactaggcttactgatttaccatatttctcggcatgtgcttagtacgttcaaacgcttgacacacggtaccacaccttaagccttattccaatttccatctcgtagacaacacatccccatggaccgttatccacagaccatcatcattacgatatataaatggatacaaccaattcctgacctcgcgcgagtgctagaaaaatcactcgacttctaccgagatccctaattattaaagcagctactcgacctagcatactagtatccatctcaaagggaatcctgagtcatgcaactacagtttcaaacaactcctagacttaagtgcacattcgaacctacaaacaataagtgtagtaaaatagcataataagtaggttatgcataaaaccggggcttgccttccaaagctggggcaggcagatcctcgagggtaggctctggtgctagatcctgggctacctcctgagcaactccttgcttcggcacgaggatgtactccccatcagcgagattacagtctatcgaatgcaatgaataagatatatgcttattaatgacatgataaattataaaggctatgcatagtaaattagtactaagttcggtgggactctagggtttcttttgggtatacttaagggttttgcactttcatcttcgagattttgaatggagttacactttttaatcatatttttaggccccatgaggtacttaaaggttttgattgtatattatctaattttcccaacatttcccttttctttccactatgcttctatttaagcattttgaactatcatggtcagttaacattttgcaaaaatgttataaaaattacagtgggtattattcaccattgtgggttattctagaagtttgaggctgaatttaatttagatactacttgtgcaaaattaacaaaacaagtgtaaaagggcattttacactatagctacgatttaagtgaggtctctgtaccaaattttatttttgtcaagattcataggtgaatatatgcctatatgttaaataccacagaaaaagacctattggatatttagttttgattttctaaagtttaatgccaaaaaggtacttataactaacttgttatttgaaaaatatcaaacaacaaaactcatatttttcctatattcataataacaaaatattagttatcccaaggtttggggtgttttctcttcagggttatttttctaggatttttataagttttccttgttttcatgaaataaaaggtactgcatttcttttgtactaacagagggtctattaaaattttccagtgaactatgttcattaagtgagctagcaaaaaggtggttgccccctggtttttatcttaaatccactttttctatttttcttaactttggtccaaaataagtttaaatggtaaacccttccttaaattggtgtagtgaggggtgtactatttttaaacagattagggagtggttaagtacttctctgatttttcttaaccctagcctaacagtgtagctatttttccctattttatttagcttttggttagaa

SEQ ID NO: 2573 - DNA, 756 bp, Zea Mays
gcgccacgcaaaaccagcctacgacggccaacaacaaaccatcctaaatcctaatccctagccagccacaacatggcgagcaccatatcgacaaacatgactatgacaaacgtgctaaattgatttgaaacagcaaaataaaaatcaggatcgacgacagctcaccactaggtaggaagtagggagcaccacatagcaacgcagcaggacaacgatttgtcgaagttccaaaagaccaagacgttgtaacggcgaggtgaaactcacgacgccgaatccgtaaagcgatggcgaggaggcgagcgcctagaccgacgacgagcttgctgcagcacattgagcgacgtcgattcgaacacgaggacatgaaagtacgcgtccgccgccggtctaagctggagtggaggttggcgtggctgattgaaaacatcggcagaggactcgacgagcacagccaaggcgagaacaccggcgaggtggctggggaacgacgcccagggagccgccacggcgtgaaggagtttaccgcgagcacctgagggcagtgccgagctgatggaggaactagccaccgagcttgcctgatggaaggagctacgcgtgcgagtgtcaaggcaagcactgaggacaccaagcgcatagcaagagaagggctcgatcgatgtccagactttaccgggtgtttggcagctgctgcaccagcgttggggaggaggagagggagatgacgcggaggaaggagtattgagagccgag

SEQ ID NO: 2574 - DNA, 2486 bp, Zea Mays
atggagcagagcggcgccggcgctgtggctcctgctgcctcttctagttttgatggtgctcaagacaaatctcctgccagtgcttgcacgataacacgcagttcattggaaacgcaccattcagtagtcgggtctccacatatcgcggcatcaacacgcggtgcgagtgtgaccagcaacgacgtcgatgccccgaaagctgtggctgcaccaatgataagcagcaagctaatctgcaacttgagcaaccatcagtcgaacacgtgcaccatgaaaggcgacgtgcgcatccatggcaaatccgcaactgtatacgtcgtctcggcgtccacctactgtccggaaaattcgacgatcaagctccgcccgtatgcacgcaagtgggaggagcaggtgatgctgctggttcgcgaggtcaccgtgcgttccagttcgccaccagcaggcggcggtagtgcccacgacccaccaccaccgcagtgctcggttcggcacgacatgccagccgtggttttctctaccggcggatacaacaggaacttcttccacgtcatgaccgacgtgatcatcccactctacctgacggcccgagagtacgacggccacgtccaactgcttgccaccgactacgagcccaagtggatcgccaagtacaaggccatcctcgccgcactgtccagctacccagtcatcgacatggacaccgaggacaccgtgcgctgcttccagtcggcccatgtcgggctggagagccacaaggagctgggcatcgtcccggctctctcccgcaacggctacacgatggtcagcttccgggacttcatccgctccgcctactcgctgcagcgggcacgggtgacacccgtgagcaggagcacaaccgggcggaagcctcggctcgtcatggtcctgcggcgcaactcgaggcaactcaagaacgaggccgacgccatcgccgccgcggccggtgtcggcttcgaggtggtggctgcgggaccagacgacgtcagtgacctggagcgctttcccggggtggttaactcctgcgacgtgctcatgggcgtgcacggcgctgggctggccaacatgctcttcctgcctcacaacgccacggtggtgcagatcatcccgtggggcgagctcaggtgggcgtgccggcattcgtacggagacccggtgccagacatgggactccgctatctcgactacgaggcctcggcggaggagaccacgttgaaggagacctacccccgcgaccacgccgtctttacggacccgctctccatacatcaccagggattcgacaagatgtggaacatcttcatcaacggacagcatgtcatcgtagacatcgaccggttcacagggttcatgaagcaactttaccagtccatcaccacggagtagagtaggcatcagttggatggttcatgttagaccatatatagatgtgcaactctgctagctcttcattggatactcagataatctcaacaaggcatcatcctgtacacgcacatgcaagggcgatcagatttttgatgaggccgctacacatacgtgctcagccgctggtgggtggaggagtggtcgaggaaccagcagaggacgtgcagcgccacgaaagaaaagggcctcgccgccagctgccatccgccgttgtccaagagaaccagaagcaactgacaggagacgcgaccagagagaagccaccacaggagagtgccaaccgccatcaggaagccatcgcttctagcgttcacgccgttcagctagagaagtcatccacacgcagcaacacgcattcccggccatcatcagagaaaggaaggcatcaaaaggaagccagcagaggaagatgccaggaggctgctaaagaggcccaaatacaagggtaaaggacagaacgtgacgagccaccttatcgcccccggtccatcagccacctcaccttcatcatcgtcggtgcgtccacctcaccactaccgcgagttgcgctatcaacggctaccaaagttccctggcagcatcgtcccacgacacgcgcgcctatatcagcatcggcagcatcgtccaagcatccattggctcgccaacgacacattctggtgatctgatccacatgggctccctaccgtgacttcgcccctgcatggaggactcacacaaccacctcaacaccccgcaaaagctttctaaaaagtcttggatcactctttttggtgatctgaagattaagttatggatgtttaaattctgaagactgaatctgtctaattctggacagtaaagtctcctagtgtcttttaaccttgatacactttaaatcaacctgaattgtttataaataatttatagacaattttattatctttccagaaagtctagaatcactttgtttggatacctgaatcttgagttatgaatttttgaagtcgcaagacttaatctacccaaatctgaataaagttgtcgtttatcactat

SEQ ID NO: 2575 - DNA, 1038 bp, Zea Mays
atgagatcttcactaccttgtagaaattccatgaggataatctcaacaaggcatcatcctgtacacgcacatgcaagggcgatcagatttttgatgaggccgctacacatacgtgctcagccgctggtgggtggaggagtggtcgaggaaccagcagaggacgtgcagcgccacgaaagaaaagggcctcgccgccagctgccatccgccgttgtccaagagaaccagaagcaactgacaggagacgcgaccagagagaagccaccacaggagagtgccaaccgccatcaggaagccatcgcttctagcgttcacgccgttcagctagagaagtcatccacacgcagcaacacgcattcccggccatcatcagagaaaggaaggcatcaaaaggaagccagcagaggaagatgccaggaggctgctaaagaggcccaaatacaagggtaaaggacagaacgtgacgagccaccttatcgcccccggtccatcagccacctcaccttcatcatcgtcggtgcgtccacctcaccactaccgcgagttgcgctatcaacggctaccaaagttccctggcagcatcgtcccacgacacgcgcgcctatatcagcatcggcagcatcgtccaagcatccattggctcgccaacgacacattctggtgatctgatccacatgggctccctaccgtgacttcgcccctgcatggaggactcacacaaccacctcaacaccccgcaaaagctttctaaaaagtcttggatcactctttttggtgatctgaagattaagttatggatgtttaaattctgaagactgaatctgtctaattctggacagtaaagtctcctagtgtcttttaaccttgatacactttaaatcaacctgaattgtttataaataatttatagacaattttattatctttccagaaagtctagaatcactttgtttggatacctgaatcttgagttatgaatttttgaagtcgcaagacttaatctacccaaatctgaataaagttgtcgtttatcactat

SEQ ID NO: 2576 - DNA, 139 bp, Zea Mays
cacctttgaactcataatcccataaacaccaaatgctttagccacttgcccagctctagcacagccatcaattaatgcactgtatgtgttaacatttggctctataccagcactgaccatctcataaaatacctgaaat

SEQ ID NO: 2577 - DNA, 8398 bp, Zea Mays
gtcaaaatctagtgaactagcacacaccgacaaaagcatattgaaggtacttatcttggggttcccaataaatctgcaaaagcgaagagcttccaagacagctctttgcttcttacacatactgaaaaagctggcatggtgtatctaaaaacaaatggaaatcagtagtttaaagatatttataggaaaaagagtaaaccatccctctgaagtgtgtcaatatgaccttgaggcccccccatccctccaccctacacacacaaaaaaggagcctagttttggacgttgtactatcctagtgggcactaaattgctgaacatggcatcttggtagacagtggtcagcaccaaatatctactcctacctccatcatctcttcatcctattcaccatgaaaggcatgtaaaactccaccaccaggatgttccagagtagggcttgttcggttagctctcaatctatgtggattgagtgggattggatgggtttaaatcccaaacaaatcaaacttcttcttaattttttcctatctcatccaatccatgtgtattgggaataaccgaacaaggccttatggagtctgtgaaccaacaaaaatatatacgcaacccaacgaagatccggagctcgtatttccacatagtattgcttgtgtgtttgatgcccccccctgagcatcagcaagatcgtacaagataattaagatgatgttaagctatggggaatggtgggaccaaaggatcttcgacaactgtggcattaaattaagatgttgtaggagctgatgaccccccccccctccctctctttgtctcttcttttcgtttatctttttgtccctactcttcctgccttctagggaagtttgtactttggtctatcttagatatgggtgacaatgggctttaaattttacactataaaatttatggatcaggtcggattaggatcgagctctatttctattcatttttgaactacaaattatttagggccctaacaaattgtgaaggaacatttggatcgtgatccattaccacccctaatcttacacctttcttattcttcttaataccaaacctaatcccccatcccaaatagtatgcattgcacctggtatccccaaggccgaacccttcgctcaacaaaaaacaacacaatagcactcgtcagagcctaataagcggccaccactgagctctgtaggtagtggcaagctggcagcaaccaaataggcagaactgaggcaaggccaatcatgatgacacttagctcaagcaaaaaaaaagggcgtatccagtgtcgtaggctcaaacagagaaaaaagatatgaacgtaaaaagacaagaaagagaaaagagatgaaaaaaatagcctggcatgcagttctaaacatgttcctaattgagtttcttccattggaactgacttgttgccatgtcatgtaatcaagatgatttaggttcaggggattatttgttctagcatcaatagttgaaggatgaatactagacagttccatagtgaaggattagaattagagcaaggttatcaaagcgataaagcgttgaagcgctcatgagtacttcttaagtttaagtgttagacatatatggacattgctgtccatatatggacagacatatatggacattacagccatatatggacagcacagccgtgtgcagccatatatggacagcactgccgtatatagactagtatagactgattatagtcttccttgtataggcatatagctttccctgtttaggagattgtatacttgtactccaagttaccttggctatatatatgagagatcacccccctcattgggtgtggtgtcttcccaattctatctctctacatggtatcacgagtccagggtctccctgattttgtgccctccctcccgcttcctctaccaccaccatatgccgccgcctgacctagggcgcggcacctacctgcgccgcccctccctctgctgcgcagaagccttggatgtccacgatcacccacgtggactcctccgccggtgacagcgattccgactgctccgtcggattttctctcctgttcggcgacgacgttcttgctgcccagatccatctccccatggcgcttccctacgccacgatctctgtgcagtcctacgtccccatgaagctcgacctccacgcggacaacttctccaagtggaaggcctgcttcgaagccctgtgtggcaccttcgagctgctgtcccacatcgacgggacggcgcctcccaatcccctcacgccggtttggctccaggaggactgttgcgttcgtgcctggctctacggcaccgtctccgacgccgtccacgacctcatcatgacgcccgaaccgacggcacgcaagcattgggctatcatcaccgcccgcttcgaggtgaacaaggcgccgcgtgccatcttcttgagccaagccttcatgaccttgactcagggagatttaactgtcgaggcctatggccaggagatgaagagagcggctgatcgcctccgcgatgtcggcaagcccgtcgacgactccaccatggtgctcaacctcctccgcggcgccaatccccgcttcagcaccacctgcgacatcatcgctggtgacgccaccatggacttcgccggcgccctcgacatgctcgccctcaaggaactgcggctggctgaggagggcaagatggtcaagtccactgccctccacgtctcctccacatcctcctcgtcatcctccggctgcacaggcccctgccggtcctgtacgtcgtctccccagcagttttgggtgcagcaccagcagccggggaagcagcagcgcggcggcgggcagccaaagcgcaagaagacccattttcgcaagggcggtggcggcggcaaccaacagcagcagcagcaccgtgcgcccaaccccactggaccatggatttgcatcaatccgtggggccagcagcagggacaagccggcggcagcagcggtcctggaggtggcgggcagacatggcgcgctgcgaacagtggccagcagcgtggtggccccggccttctcgggtcctccccgcaggcccacactgcgatcagcgaccagcagtctgccggtccccactacttcgacacggcgggcctcatggcggcgctgcagcaaatgtcgctgcaaggtgacgcctgggtgatggacactggtgcctctacacatatgcactcctctgaaggtatccttcattctcatctcccagctgctgcttcttcgatcatggtaggcaatggtgcaagtattcctgtcacgacccgcggctcatcgatccttgacatcaactccactaaatttgtgttgaacaacatccttgtcgctccttccatagtccgtaatttattacttgttcgtcaatttacccgagataatggcggttctatcgaatttgacgcttttggtttctctgtcaaggaacccaagacggggcgagtgattcttcgctgcaatagctcaggcgatctctacacactttcaccagccgcccagtccactgccagcgccctcctcgcagcctcctcctcagtgtggcatcgtcgcctaggtcaccctggtccagcagtcttatctagtctcaagcggaaaaatttaatttcatgtaataaagtagaccagactctttgtcatgcctgtcaactaggcaaacatgcccgtctaccttttagtacatctacttcccacactgtttccccttttgagatagttcattgtgatgtctggacatcaccggttcctagtatatctggctgctcatattacttggttttactagatgacttcacacatttttgctggacatttccccttaagcacaagtctgaggtccgtcagcatattgctgattttattccttatgttcgcacacagtttagctacactattaaatgcttccaagctgataatgggacagaatttgttaaccatgccatggatgaactccttgctgcctatggcatcgtttttcacctttcttgtccccacacttcaccacagaatggcaaggctgaacgtattctccgtaccctcaacaactctgtgcgtaccatgctccttcatgcgtccatgccacccaagtattgggttgaggccctcgcagctgccacatacttgcttaaccgcagacctgcctcctccatacgccatgaggttccatacacccgtttgtacaatactcctccttcctatgagcacttgcgcgtctttggttgtctctgttatcctaacttacaggccacgtccccgcataaacttgcgccccgctctgccgcatgtgtcttcttagggtacccttctgctcacaaggggtatcgctgtctggatctttccacgcgccgcattattatttcccgtcatgttgtatttgatgagctcagttttccgttcgcacatgacccgcctactcccgctagctccttcgattttcttcttggtcgcgacttggatactgcgccttgtgttactgatcatgcagctagtgactcctcgtctggtgggcgtggacctgtgcccctacctggcatcttctcttctggtgggcgtggtttcgtacccccatccggcgcttcggatgctcctactccgggcgggtgtggtctcgtgcccccgtcaggatctctcgacgacacaggggtcgttgctcccagcggctctggatcaggggcttcgccgtcaacgccagcacccagtgcagccggcgccccctgctcctcccagccacctccggtccccgtccgcgaccactacatcgtctacagcaggcgaccaccgcctccagcgcctcaggctccagctgggcccccacctgcaccagcactgtcccgtcctgtgacgcgcacacagaccgggacgatccagcgtgtgtcgtacacaaacctgtctgccacgactccttcgccgatcccggcaaattaccgcagtgggctagcggaccccaactggcgtacagctatggccgacgaatacaaggcgctgatcgacaacgacacttggtgccttgtcccgcggccaccaggcgccaatgtggtctccgggaagtggatcttcaagcataagtaccactctgacggtactcttgctcgccacaaggcacgctgggtggtccggggcttctcccaacagcacggcatcgactacgatgagactttcagcccggtggtcaaaccgccgactattcgggctgttctgagcatcgccgcttcccgttcctggccgattcgccagctggacgtgaagaacgccttccttcacggtcaccttgaggagacagtctactgtcagcagccgcctggcttcgtcgatccagcggctcctgaccatgtttgtcttcttcagcgctccctctacggcctgaagcaggcaccgcgagcttggtaccagcggttcgcctcgtacattcgtcaactcgggttcactgcttccgtctccgacgtctcactctttgtgtacaaagagggtggggacatggcctacttgctgttgtacgtcgacgacatcatcctcaccgcctcttcgtcaactcttctccagcgcatcatcgacaggctccactccgagttcgccatgacagatcttggggatctccaccacttcctcaacatctccgtcgagcgcctccccaccgggatcttcctgtcccagcgacagtacgccgtcgaccttcttcagcgtgcaggcatggccgagtgtcactccacgacgacccctgtcgacactcatgccaagctctccgcgactgctggtgctccagtcgccgacccttccatgtacaggagcatcgtcggtgctctccagtacatcacgctgactcgacctgatttggcatacgcggttcagcaggtgtgccttttcatgcatgacccgcgcgagccacatctggccttgctcaaacggatcttgcgctacttgaagggcacgctttcctccggtcttcacctgggcgtcggccacatccagtctctcaccgcttactcggatgcggactgggctgggtgtcctgactcccgtcgctccacttcgggctactgcgtctacctcggcgataacctcatctcttggtcctccaagagacagactaccgtctcccggtccagcgcggaggctgagtaccgggcagtggcccacgctgttgctgagtgctgctggctgcggcagcttcttgcggaactccatgtgtcgattacttctgcgacggtcgtctactgcgacaacgtgagtgctgtctacatggcagccaatcccgttcaccaccgccgcaccaaacacatcgagatcgatattcacttcgtccgtgagaaggttgcccttggacaagtacgcgtgcttcatgtcccatcttctcatcagttcgcggacatcatgacgaaaggcttgcctgtacagctcttcaacgagttcaaatccagtctttgcgtccgggaccctcccgctgcgactgcgggcgggtgttagacatatatggacattacagccatatatggacagcacagccgtgtgcagccatatatggacagcactgccgtatatagactagtatagactgattatagtcttccttgtataggcatatagctttccctgtttaggagattgtatacttgtactccaagttaccttggctatatatatgagagatcacccccctcattgggtgtggtgtcttcccaattctatctctctacattaaggctagtttgggactgtctattttcccaaggggtttccattttcctaaggaaaattaatacattttcccttgggaaaatagaaatctcttgggaaaatggagttctcaaactagcctaaaatgtttaagcgagctttaaaacgtccttttaaacaacatgtacaaaatatgaatataacacaatttcacataacaatataacatgtccacaactgcttgccattttcagtctgcaaataaccaaaattagagcacatcaggggaggatgagagcagggacaaggaagaggctatagcagccaagcaggcagtgcaagcgcaacaagcggcgtcgagcagggactcggggccgagcgcgagcagggaggtagggcctggcgagttgacagagcagggaggcaaggaccggcaaactgacagagcagggagtcgaggaccggcgagctgacagagcaggtagcagcggcgccgagcgcgagcagggaggcagcggcgcgcagccgcgggggagaagggaattcgagcagcaacgcaaggaggggagggaggcggcgagctcaggcaaggttcttaccggccggcggcaaagcccagggatgccgaaggcgacgaatggacgaaggcaccgcgagtccatgacggctagctcaaggttgaacgaggttgcgggcgtgacaaaagaaggatgtttgttttaggttaggggaactgggctaggctggaagtctagaaaagtgacaaaaagtggccttttacggtccagagcgttttaacgctaaaaagtggcgctttagcgcttaaaatgggcgctatacgttatttcatgaaacgttaccatgctttacgttctgagtagcgctttagcacttaaaaggcacttaagcgcctttttaataaccatgaattagataaccttagaattggataatattgttgggacgaaggccgaaccaaacctcgatcacattctacattggccccacactgaccttgtctacgtatgcaggacaccaatacaatgcggacaagtcccaagaatgaggactacaccacgtatgtgaagtccccacttgcgtggtacggagggttcgcagaccccaatcgggttctgtggacaataggggcttgactcacaacggaggccccgggtaggaggggccaaaggcctgtaggacttcgctcttgtccgcccgtttgccctggaacagtcgatccaggccaaggaatggtcttgggcggggcgacgggtaactgctccccctcggtatcgcatcaggagacggacaactttgaaggcttcagggtgaaggtctccgagtcttgggaccgaaatactgtgtgcagctggcagaggcccaatggaccctctacatgcaaaatacccatgttcagtctgtgtacgagacacgcttaacaagacattcgagccacccagcttcccgttttgacgggacacgcttaacaagacattcgagccaccctgcttctcgttttgtcgtgcgttgtcgctctcacctgctcccgagtgattgggcccacgagtcaggacccaacaaatatatacttaatctgttataaaaggcctattgtaaaactcatgtagtcatgcccacaaaaaaatataaaaatgtcaaacactcagaaaaggtaatttacct

SEQ ID NO: 2578 - DNA, 2148 bp, Zea Mays
ttttaaaacaacaaggaggtggcaaatgcaccggggcttgcctagaagaacactagtgtttgttacgtggcgaccacttggtgaccatcctttgtcttggcatttgttcagattatctatcttcaggttggttcatcagcatcatcttttggagaagctcacgctttccatcatcttgtggttgactcagttttagttctccgcatcacatgattaattaacgtacttaatggtttgcataatgcacatgaatgcatataaacaagaatgctacactgaagagaattaaatatttagtgacgaggcattactacactcaaacaacactagatataataatcatgttcctctagcttaaaccgatctaactcaatcattaagaaatgataactagttgtaagctctacgtgtcttagttaaagttcaacgtttaaaaacataataattctaaactcagtggtctaagaaatttaaatctagaacaagaacaaaagcacatcactttttagaccacgcgacaggattaaattacataccactctaagccatcatatatagcctaccattaattttatcaaacaattataatttttcataagtaatactaataatattattgtttagacattttaaatatgctaaatttaaacttcatttactaatttaccatacgtcacatacttaacatctcaaacctaacaatagtactcaacgcgactactctaaaatcatgaaaataatcacattgcattcatcgaactaattcattaattaagctaacggaaatatcaatcggcttaccatactaaatcaaacttgcaaccatgaaatcgacgacgcctttcagctgtagcatttcaccgaacacatggtgagtactgcatcaaatcacacttcttctccatccacatcgagaatcctccgatcgtgaactgatttatttccttctacgcctaatcttctcggatttttggcatagacgaggatgacgatcgacgataaaggaaacaagggcacgcttgtccggcagctacaacccatgccagaccaagcagggagagtcccggtgcccaacacgcgagggacagggatgacacggggaagaaattcagtgccatggcaaactagaaaccgacgatggggttgaagccggatagaggtctgatggcgctggggcaagcactgcggcagatgacgcggacgagctggagtcgggcactggggatgggcaccgagctagaacagggaggagggagaaacgccggcgagccgcagcagggaccaagcagagggagccgctcggttggtgtccacgccatggccaagggagaagcagatcacgacaagctggagccaggtccagggcgcggaagccatggcaagcagacagagagtgtcgcgagttggagctgggggatggagaggacgcagggaatccgtcgtcgggagcacgactaggagcgtcggtcagcagggcgccgagagggagaattcacggcaagagagctccacgcgcgtagggaaacttcacggcggggtcatgacaggggatgacggaacacgcgctggagagctgaacagggaggagcgccgacgaggaagctccacgacgagcagagagggaaagagagcagcgtagcagggacagggagccaaagcgaggtcgacggtggagcagagcagaggccgtagaaaaatccggcgccagagaaacgtcgagcagagggcaaggagatggaaactcggcgtagggagggagagaagctcgaccagcttggaggagtagggggccgagtagggaggtggcgtgcgctggaacttgagaccgagcagagggaactggggcaggaagccacggcgctggggcgaaggccgagccaggtccgagccaggggcgcggcatgcgcagggagatgaacaccgagagaggagaggtccgcagaaaatccggccaggaacacgcgagcaggatcccaagccggccatgggagatggacgccggcagaggagcgcggctgggggaaagagagaggagtgtgcaggggcgagctcggctgggcgaggcaaagaggaagacacgctggaagagaggaggagcggtcgagctgggagcagggaggagcagaggcgctcgcaggaagatgggca

SEQ ID NO: 2579 - DNA, 5006 bp, Zea Mays
cgagtaccaagacaaaggctgctcgtcaagagaacatcgtctaacaacactaacctagtgttactcaggttacgagtcattttgattgtgaatggtgttaagcgccggtgggcacgaccttcttataagtctaagtacttcttctatacttcttattgaggatggtcacttgagctagcatatattttaaacatataaatgtttatacattcaaaacatagtgcaattactccgatcatgtaccatgtaaacttgatgtaacttgtaaaatttggtaataagatttccactgcaaattgttggtgtgtgatttgtgtttacttaatcctgcggtcctggttataagtggtttatctgaggtccctgggacactcggacagatcctattaagttatctggtgcacatgcatagccgtctgaggtctttgagacaagggcaggtgcatgtgggcccattaacttgggaggttctgccacaactttctcagtttgcccatcagtttgaggatggtaggccgagctaaaatttagtcttgtatccaagcattcatgtaacttctgccaaaatcgagaagtaaactgggagcctcggtctgacacaatcttcttaggcactccgtgtagacaaactatctgagccatgtacaactctgttagcctagcacccgaatatgtggtcttcactgggataaagtgggccaccttagtgagtctgtccacaattacccaaatagaatcatacccagtagttgtgcagggtagacctacaatgaagtccatatcaatttcttcccacttccactcaggtattttaagcgggtgcagcaaaccggcaggtctctgatgttcaacttttaccctctagcaaacatcacacaatgctacatgtgacacaacatccttctttagaccataccaccaatacttctgcttcaggtcctggtacatcttgatactaccaggatggatggagtaagattagtcatgtgcctccttcaatatggtctcacgaagactatcaatcttagggacacaaatcctgttcttgaactagattgtgccttgatcatcctctgtgaagcatgaacctctaccttctgccataagatctctgatttcttgaatcttgacgtcaccaacctgacccttacgtatttcttattctagggtaggttccacttcgatggtaatcccttcagtatgagccactattcctagattgagcttctcaaagtcttctactaactcatcaggtaactgggcgacaataactacatgaacatgctccttccgactcaaggaatccacaaccagattcgccttgaccagatgataatgaatctccaaatcataatctttgatgagatccaaccaacggcgttgcctcaggttgagatctttctgagtgaagatatactttaagatcttatggtcagtgtagacttggcacttagtccccataatataatgcctcaaaatcttgagagcatgcactacggctgccagttctaagtaatgagtggggtagttcaactcatgtgttccgcaactggtgagacacgtaggtgatgacatgtccttcttgcataacaacacaacccaagccctggcggcacgcatcacattatatgtcaaatcccttctgcagatctagcataaccaacactaggggtgacatcaatctaaacttcagttgattgaaactatcttgacattcacgagtccacttaaactcctttcccttctccaatagtgaggtcataggcttcacaatttttgagaatccctgaataaatcgtcgataataccctgtgagtcccaagaagctccggatctcagtaactgaacttggtatcttccatctccactatctctctcactttagcaggatccactgatattcctccattagagatgatgtgtccaaggaatggtacttcgtcaagccagaactcacacttgctataattggcatagagttaattatcccttaacttatgtagcaccaatcgtagatgctcctcatgatatctatcatttttggaataaatcagaatgtcgttgatgaataccacgatgaacttatcaagatactccatgaacaccttgttcatcatattcatgaagtaggccggggcattagttaagccaaatgacatgaccgtgaactcatatagaccatatcgggtagagaaagccgtcttgggaatatcagaaggcctaattttcatttgatgataacccgatttgagttcaatcttagagaataccctggcacctctcatttgatcaaataaatcttcaatacgaggtaaagggtactagttcttaatggtgacatcattaagtgatctataatcaacacacatcttttgtgaaccatccttcttctgtacaaacagaaccggtgttccccaaggtaaggaactcggacgaatgtaccctgcctcctgtaactctgttagttgtttcttaagttcttttaattattccactgacatcctatatggccgtttagaaataggagcggttgcaggtaagagatcaataacaaactcaacttccctatctggtggcattccgggtaactcctctggaaagacatctaggaactctctaaccacacgaatgtttctgcccacaaatttaccatctactatatatatggcaggtctggtggagggggttatggtaatcatgacttcgaatctttctccttttgaactggtgagttctacggttcccctagcataatgtataatggcctctgctttccttaaccctgacataccaaatatcagatatatactgctctcctctaatactataggcatagaccaaaattcccttcccatgatagtcagtgttaatctgttggtcatataatttgcttcaataggccctttaggggttattacaatcatgggttcttgcatattttgatgtagtaactcatttgtgttgacatagcgagcagaaatgaacgaatgcatagcttcagaatcaaataatatagttgcaggaactgaattaatgtaaaacgtatcgatagcgatatcagctccataagcagtagcatcagcactaacttggttgcaatgctgaatcccttgccaaatgctggagtccgttgcttgccctagacattgcttcgagtaggtgtgtcggtgatcctcttcagacaagcattggcgtagtgcccaacctcaccacacttgaagcaagtggtgactgtaccctgtcctgcaggtctcgccggggtgccagtgggggtagcctaacgagtatgtggagtctgtggagtcgcatgtggtttatactgagctggtcgttgccctcctccaggaagagctagtgcaccctggggtggaacatagcgaggacggatgctactgcttccctgcccctaggtgatagccttcctcttcatctcgcttagctgaacacgtttgtgttcaatggctatagccttgtccagaagtctctggaaagatgggaaggtgtgagaaaccagctgatactgaagaggcccaataagtccctccatgaaatgatcctgcttgctttcatcatcaacaacctcatcgggagcatacctcgatagctgaataaatttgcgatgattaggtggttactgaccgactttaatcgcgattcttgcaagtactttctttagggtggggtgaaccaaaatgagtttagataactcggtgaaacgatttctaaactcagtctttgatgacaaagcagttacaagttagtaaaaccaacttgttgaactacttttgacattgagcaggtcctctcagtaccatcggtaagccaagggttgagagttcccattcgctagcaaaaggtcatgcatttgggcagaaatccatttggtcatgttgttcatccgtttcttcatgcgaggtgaatcatccacttggttagggaatatatggattaaataagagagaaaatgaacaaactcctccatctcagcagcaggggaaacagatctccattttgagagctaaccagttgttttccaacactaaaaagctccaaggcttcacctttacacaaaggatgtaaagggaacttgtatgagtagtcactaccaaagtcagggaaaagagaccacacatgaaagtggtatgcctgtttgatccaacagagatgatagatgttgcttgatcacttcgacaaacaacaccgaaatcgtttcaaggaagagatctatggaagataacatattaggatagttccataatggatcttgactagagaccttgataccagcatccgacgagtagcacagtcctgtgtgcacattcacaagagtctctcagtttggttgtggcaccataagtcattaaccatgacaccatcaccgaactggcaccaacacagaatcccacgtggtaaatctagattgtgccaagataacacatcgatatagtctcataatggattacaactactaaccgcgataccagcgcgtgccgagcagcacaaccgtgtgtgcgcgcacaaagaaggcccccggcttcgtcgcggcaccgtcggttttagtcactgtggcggaaccgcccgaattattccaacttaagtgcctaagtcccgccttagaggctagaccacacttaaataggaataaaacgtcagtccctcagatctagtccgacgaggccactaacaggatcaagtaccacgtactcactcgaaggtgaggcacagagcaaatacaataaaacatcaaaccatacattaaggagtacttaatttattacaacttcatcagagtttatcaaaagtagtgatcattgttcggaatgcagcggaatttaactaacggtaaataaacagagggatggggaagcctggcccatcactcctcgtgctcctcctctgccgaggtagggtcccactcgactgtccaaaccggtggcaagatggacggccaagacactctagcaaccatgtcctccagagaacctgtaaaattatgccacaagcaa

SEQ ID NO: 2580 - DNA, 1061 bp, Zea Mays
ctcatccccatttcctccgttatctccatctcccagctgcttagctgccttcgcccaaatgtcgagcagcctgcaccagcccgcagtccttgtccctcctccagcacgttccctagccatccgtccagccgatggccatggctgaggccacccacctcgccagcttcatcatgtgttcgttccccgtggcgtgtccttatcactggtcgttggactcggcttagaccccatgctttgcgtcctttcgacgttgacgacgcttagctccctcctatagctctccgtgcggcaagcccagctttcatctccagctccagcagctgcccctcctggctccagtcctctgttcgtccctcgtcgtcgatctgtgcagccttgacgcgccatcggctccctgtccgacttcatcctcgtcgccgatctcatcccgttcaggctttcaccggcgtgctgctccctcgcctcggcgccctgcgagctccttcttcctcgcccagtttgcagctcaggcctcgatggatgtcaacgccgtttctttgacctcgccttgacactcaatcgctgcagcacgctatgtcatgtgtgctacaatatcatcgttcgctatactcattctcgccaattttccttgtcgtttctcggctactacctcgtcagctcctgcgcgtcgtgcacgtcttgtgttcggatcaagcaccaggattttgaggaaaagaaagctccagtgcatcggccggtgaaataaaactggtggtagtcatcgtccttgcgaaatccaagactagcttagtcgcgaagacgagccaagtcgaccccaagatgatgtatcgggtgggctactccacaagataatgttggtggatcaacctgaagatggataaatcaagtaagtgctcggctaagagatgattagcaagcaagtctcgtctaacaaacactaacctagttttatttcaggcaagacccagtgcatgcaacccctccctcgtgttttaaatgatttttacaccctttatgtctagcgaaatgtgcattaaggtttataggagttgcttggaaac

SEQ ID NO: 2581 - DNA, 1087 bp, Zea Mays
ctcatccccatttcctccgttatctccatctcccagctgcttagctgccttcgcccaaatgtcgagcagcctgcaccagcccgcagtccttgtccctcctccagcacgttccctagccatccgtccagccgatggccatggctgaggccacccacctcgccagcttcatcatgtgttcgttccccgtggcgtgtccttatcactggtcgttggactcggcttagaccccatgctttgcgtcctttcgacgttgacgacgcttagctccctcctatagctctccgtgcggcaagcccagctttcatctccagctccagcagctgcccctcctggctccagtcctctgttcgtccctcgtcgtcgatctgtgcagccttgacgcgccatcggctccctgtccgacttcatcctcgtcgccgatctcatcccgttcaggctttcaccggcgtgctgctccctcgcctcggcgccctgcgagctccttcttcctcgcccagtttgcagctcaggcctcgatggatgtcaacgccgtttctttgacctcgccttgacactcaatcgctgcagcacgctatgtcatgtgtgctacaatatcatcgttcgctatactcattctcgccaattttccttgtcgtttctcggctactacctcgtcagctcctgcgcgtcgtgcacgtcttgtgttcggatcaagcaccaggattttgaggaaaagaaagctccagtgcatcggccggtgaaataaaactggtggtagtcatcgtccttgcgaaatccaagactagcttagtcgcggtacgctaattgctcacgtgatgcagaagacgagccaagtcgaccccaagatgatgtatcgggtgggctactccacaagataatgttggtggatcaacctgaagatggataaatcaagtaagtgctcggctaagagatgattagcaagcaagtctcgtctaacaaacactaacctagttttatttcaggcaagacccagtgcatgcaacccctccctcgtgttttaaatgatttttacaccctttatgtctagcgaaatgtgcattaaggtttataggagttgcttggaaac

SEQ ID NO: 2582 - DNA, 1080 bp, Zea Mays
agctgcttagctgccttcgcccaaatgtcgagcagcctgcaccagcccgcagtccttgtccctcctccagcacgttccctagccatccgtccagccgatggccatggctgaggccacccacctcgccagcttcatcatgtgttcgttccccgtggcgtgtccttatcactggtcgttggactcggcttagaccccatgctttgcgtcctttcgacgttgacgacgcttagctccctcctatagctctccgtgcggcaagcccagctttcatctccagctccagcagctgcccctcctggctccagtcctctgttcgtccctcgtcgtcgatctgtgcagccttgacgcgccatcggctccctgtccgacttcatcctcgtcgccgatctcatcccgttcaggctgtctgctcgagctccagccctcgctatcatgacttctctatggtcgccaccttcagttcaccggcgtgctgctccctcgcctcggcgccctgcgagctccttcttcctcgcccagtttgcagctcaggcctcgatggatgtcaacgccgtttctttgacctcgccttgacactcaatcgctgcagcacgctatgtcatgtgtgctacaatatcatcgttcgctatactcattctcgccaattttccttgtcgtttctcggctactacctcgtcagctcctgcgcgtcgtgcacgtcttgtgttcggatcaagcaccaggattttgaggaaaagaaagctccagtgcatcggccggtgaaataaaactggtggtagtcatcgtccttgcgaaatccaagactagcttagtcgcgacgagccaagtcgaccccaagatgatgtatcgggtgggctactccacaagataatgttggtggatcaacctgaagatggataaatcaagtaagtgctcggctaagagatgattagcaagcaagtctcgtctaacaaacactaacctagttttatttcaggcaagacccagtgcatgcaacccctccctcgtgttttaaatgatttttacaccctttatgtctagcgaaatgtgcattaaggtttataggagttgcttggaaac

SEQ ID NO: 2583 - DNA, 2579 bp, Zea Mays
ctcaattgtaccttgcactagcttgttttgtcattggccagactaggagatattttcagcgttctcaactgatcttatgttcaagggttaattgtgtcagctatgtggcactgatttgaatttgaagatggcccatcgacagttacacttgaacaaattgacgactgctcgattcagtactttgcagcacgagcgagttcgacttctcttggtgccgtgccaatcgctgcactgatagatagtgcgcagccagctagatcgatgactgatcgcaatgatcggttgctgtaaccatttggttcgctactatttttgacctacacatgtataatttttcctcagatcgaaatatataaacattattaccatgggagaagagaagcaacgtcgggatggccatggcggaaagaacaagtacgccgtggcgtgctccattattggctccatcatctccattctcatgggctatgacacgggcgtcatgagcggcgcgatgctgttcatcaaggaggacctcaagaccaacgacacgcaggtccaggtcctcgccggcatcctcaacgtctgcgcccttgtcggctccctcacggccggccgcgtctccgactgggtcggccgccgccgcaccatctccctcgcggcctgcatcttcctcgcggggtcagtcctcatgggcctctcgcccaacttcggtacgctcctggcaggacgctgcgtggccggcgtcggcgtcggatacgcgctcatgatcgcgcccgtctacgcggccgagatttcgtccgcccacatccgcggctccgtcacctcgctgcccgagatctgcatcagcttcggcatcctgattgggtacgtggccaactacctgctagctaagctcccgctggtctacggctggcgcgccatgctggggctcggcgcgctgccgagcgccgtgctcgcagtcgccgtgctcgcgatgccggagtcgccccggtggctcgtcatgcagggccgcgtcgagcaggcccacgccgtgctcaggcgcgtgtccgacactgcaggcgaggccgatgtgcgcctcgcggaaatcaagaccgcggcggggctggcagacgacgatgacggctcaccgagaggtgtcggcaagggcgtgtggaaggagatgttcctgcacccgacgccccccgtccggcgtatcctcgtcgctgccttcggagtccacttcttccagcatctcacgggaatcgaagccgtggtcctctacagcccacgcatctttaaggcagccggcatcgccacccgcagcgagatccttgcagcgaccatcggcgtgggcgtcaccaagacggtgttcatcatgacagccatcctgctggtggaccgcatcggccggaggccgctctacctctcgagcctggcgggcatcatcgcctcgcttgcctgcctcggtcttggcctcaccgtcgtggagcgctcggtgccgcgccactcgccgacgtgggctatggcattgtccatcgcaacggtcttcaccttcatagcgtccttctccatcggtgtggggcccatcacgtgggcgtacagcaccgaggtgtacccgctccggctgcgcgcgcagggcgccagcgtcggcgtggccatcaaccgtgtcatgaacgccggggtctctatgacgttcgtgtcgctgtacaatgcggtgaccatcggcggtgcctttttcctgttcgcagggctggccgtgttggcggccatgttcttctacttcctctgcccggagacgcaaggacggccactggaggagatcgaagaggtgttcggccgtgggtggcgcgcgcgcctcctgtcatgggacgaagctgttgtggagcttccaatgtccaacaccaccgacggcaacaccaaggcgcgcccgtgatgcaaatgcgattgcaaaaattatggatagacattcatatatggtcacgtaaaacactagtttactttatattgtagaatatagttttttttaagtcaagagtcaagtttaaaatagaggataacataagtaatagaataaaaaactgctatagacagtttagtggggttcttctttattaaaaagtcaaatatatttattttaactaacactataataaataaaaccattttcggcggtaaataagctctttgccatcgaaaataaactattttcaacgacaaaagatttattttccaaggttcttgaccgtcaaaaatattagtcgaaaataaaccttattttttggcagtcccacctagaacgccgaaaatagtttattttctatgaccgctaaaagaccgacgaaaataagaaagcttatttctacgaccacaaagtcactgtaacactccaaaatcctattctggataaacaaggaaaactcatttcgttatttaaataaatgtgtttttaaataatagattacctaaaagattcttatgtgaactatactttgtgttaaatatttttttctaaaaaaagttaaactatctcttttatataagttttacataagaaattattttcttttaaataaatatgtgaagattatagatttattttattgtacttctaaaatgtg

SEQ ID NO: 2584 - DNA, 2328 bp, Zea Mays
atacaaccggcaggatcggatactagtataagggtctaagttgcccgggagtgtttcgcgcttcactcatcatactatgcgtgttttgaagatcgaaatatataaacattattaccatgggagaagagaagcaacgtcgggatggccatggcggaaagaacaagtacgccgtggcgtgctccattattggctccatcatctccattctcatgggctatgacacgggcgtcatgagcggcgcgatgctgttcatcaaggaggacctcaagaccaacgacacgcaggtccaggtcctcgccggcatcctcaacgtctgcgcccttgtcggctccctcacggccggccgcgtctccgactgggtcggccgccgccgcaccatctccctcgcggcctgcatcttcctcgcggggtcagtcctcatgggcctctcgcccaacttcggtacgctcctggcaggacgctgcgtggccggcgtcggcgtcggatacgcgctcatgatcgcgcccgtctacgcggccgagatttcgtccgcccacatccgcggctccgtcacctcgctgcccgagatctgcatcagcttcggcatcctgattgggtacgtggccaactacctgctagctaagctcccgctggtctacggctggcgcgccatgctggggctcggcgcgctgccgagcgccgtgctcgcagtcgccgtgctcgcgatgccggagtcgccccggtggctcgtcatgcagggccgcgtcgagcaggcccacgccgtgctcaggcgcgtgtccgacactgcaggcgaggccgatgtgcgcctcgcggaaatcaagaccgcggcggggctggcagacgacgatgacggctcaccgagaggtgtcggcaagggcgtgtggaaggagatgttcctgcacccgacgccccccgtccggcgtatcctcgtcgctgccttcggagtccacttcttccagcatctcacgggaatcgaagccgtggtcctctacagcccacgcatctttaaggcagccggcatcgccacccgcagcgagatccttgcagcgaccatcggcgtgggcgtcaccaagacggtgttcatcatgacagccatcctgctggtggaccgcatcggccggaggccgctctacctctcgagcctggcgggcatcatcgcctcgcttgcctgcctcggtcttggcctcaccgtcgtggagcgctcggtgccgcgccactcgccgacgtgggctatggcattgtccatcgcaacggtcttcaccttcatagcgtccttctccatcggtgtggggcccatcacgtgggcgtacagcaccgaggtgtacccgctccggctgcgcgcgcagggcgccagcgtcggcgtggccatcaaccgtgtcatgaacgccggggtctctatgacgttcgtgtcgctgtacaatgcggtgaccatcggcggtgcctttttcctgttcgcagggctggccgtgttggcggccatgttcttctacttcctctgcccggagacgcaaggacggccactggaggagatcgaagaggtgttcggccgtgggtggcgcgcgcgcctcctgtcatgggacgaagctgttgtggagcttccaatgtccaacaccaccgacggcaacaccaaggcgcgcccgtgatgcaaatgcgattgcaaaaattatggatagacattcatatatggtcacgtaaaacactagtttactttatattgtagaatatagttttttttaagtcaagagtcaagtttaaaatagaggataacataagtaatagaataaaaaactgctatagacagtttagtggggttcttctttattaaaaagtcaaatatatttattttaactaacactataataaataaaaccattttcggcggtaaataagctctttgccatcgaaaataaactattttcaacgacaaaagatttattttccaaggttcttgaccgtcaaaaatattagtcgaaaataaaccttattttttggcagtcccacctagaacgccgaaaatagtttattttctatgaccgctaaaagaccgacgaaaataagaaagcttatttctacgaccacaaagtcactgtaacactccaaaatcctattctggataaacaaggaaaactcatttcgttatttaaataaatgtgtttttaaataatagattacctaaaagattcttatgtgaactatactttgtgttaaatatttttttctaaaaaaagttaaactatctcttttatataagttttacataagaaattattttcttttaaataaatatgtgaagattatagatttattttattgtacttctaaaatgtg

SEQ ID NO: 2585 - DNA, 3079 bp, Zea Mays
gaagaagtccagccgttgcccctcgctcttatgtgaagttctggacacgaccgctttgctcacttgcatctaggcttctagctgtactcctcggccggtcggtcccacccatggacagtgacaatgattgcggctccgacgccggcgccgagtgggtctgggtacgccgtccgtcggaggttgaggccgctgccgcggcggccggatggctggcggatgaagaggcgcggccgctcaaggtggtcttcggctccccggctaagtacttcaccgacgcagcgccgatcgggaacggccgcctaggcgccatggtctggggctgcgtcgaatctgagaggctccagcttaaccatgacactctatggacaggtggacctggtaattatacaaatcccaatgcacctgctgttctttctaaagtaaggagccttgttgagaacggaaagtaccctgaagccacatctgctgcatatgatctatctggtgaccaaacacaggtctttcaacctcttggggatattgatctggtctttggtgaggacatcaagtacacaaattacagacgagagctagatcttcacactgcaacagtcaccgtcacatatactgttggggatatagtctacacaagggaacatttctcctcaaacccacatcaagtcattgtgactaagatctctgcaaataaaccaggaaatgtctctttcacagtgtctttaactagtccactagaccacaagattcgtgtaacacatgcaaatgaaataatcatggagggtagctgtccaggccaaaggcctgaagagatcaagactgctgctgatcaacctattggaattaaattttctgcgattctttatctgcagataaatggtgccaatagcacagtggaagtattgaatgataacatgctgaaacttgattgtgccgactctgttgttttacttcttgcagccaccacttcatttcaaagtgcattcatcaaaccttcagaatctaaactggatccaacagtgtctgcttttacgacattaagtattgctaggagaacgtcatattcacaactaaaagcctaccacattgatgattaccagactcttttccagcgtgtttccttgcaactatcacaaggctctaattatgatcttcggaggagtaggctagttcagtcagcagagactagttctcagggtgctaatgtatcggattatggttttcaaatatctggctgcaccagattgacatcccttaatagttttgtgaagcctacggtagaaagaattgtaactttcaaagacaatgaagacccttctcttgtggaacttctgtttcagtttggtcgttatctactcatttcgtgctcaaggcctggaacccaaatttccaatctacaagggatatggagcaatgacacttcaccaccatgggatgcagcaccccatccaaatataaatctacaaatgaattattggcctgcgcttccttgtaatcttagcgagtgccaagaaccactgtttgactttattggttccctctcaatcaatggagctaagactgcaaaagtgaattatgaggctagtggttgggtcagtcatcaagtcacagacttatgggcaaaaacatcaccagatgctggtgatcctgtatgggctctatggccaatgggtgggccttggcttgcaactcatctctgggagcattactgttttactttggacaaacattttttagagaaaacagcgtatccactattggaaggatcagctaggtttttgttggattggttaattgaaggacacaggggatatttggagaccaatccttctacatctccagaacattattttattgctccagatggtaaggaggcctgtgtgagctactcaacaactatggacatctcaattataagggaagttttctcagctcttatattgtctgctgacattttaggtaaatccgacactaatgtggtgcagagaataaaaaaagcactgccaaatctcccaccaatgaaagttgctagagatggcacaatcatggagtgggcacaagactttcaggatcctgagattcatcacagacatgtgtctcacttgtttggtctttatcctggacatactatgtcacttgaggaaacacctgacctctgcagagctgttgccaatagtctttataaaagaggtgacgaaggcccaggctggtctacttcatggaaaatggtcctatgggctcgccttcacaacagtgaccatgcatacaaaatgatactgcagctaatcactttggtggatccagaacatgaggtttcaagagaaggaggcctatacagcaatctgttcactgcacatccacctttccaaattgatgcaaattttgggttcccagctgcgttgtcggaaatgctggtacagagcactgggaccgacttgtaccttctccctgctctgccccgcaacaagtggcctcaaggctacgttaaaggtctgaaggcccgaggtggtgttactgtaaacatcagctggaaggaagggagcctccatgaagctctgctatggtctagcggcgggcagaataccctttcaaggctgcactacggggaccagattgccaccgtcagcctatcatcgggtcaagtttacaggttcagcatggatttgaagtgcttgaagacttggcccctgtgatagcacacatttgctgaaatgaaagatacgattgattgtgcaaaaattcatgaaaacttctggctggcaagaaaataatcgatttcatacatcaatcataacacgtatcatatttcttatttactgtgtatgtttagttacatttcactgtatacatgtttactcgttgcccgtgccaagtgctatacagtgcacgactgcatgtgcattctgttaacatttttttagatgggaacatatcgaatgcaaaccacgttttggtgtaaacttcgtcctactaaaaaaagtttcaaaaaattctgaaaaaacatgaatgtacatctcagcttaacttatctatatacaaactttcatggtaaaatttatcttactctagcagttaaaaaaacaaa

SEQ ID NO: 2586 - DNA, 2964 bp, Zea Mays
tcacttgcatctaggcttctagctgtactcctcggccggtcggtcccacccatggacagtgacaatgattgcggctccgacgccggcgccgagtgggtctgggtacgccgtccgtcggaggttgaggccgctgccgcggcggccggatggctggcggatgaagaggcgcggccgctcaaggtggtcttcggctccccggctaagtacttcaccgacgcagcgccgatcgggaacggccgcctaggcgccatggtctggggctgcgtcgaatctgagaggctccagcttaaccatgacactctatggacaggtggacctggtaattatacaaatcccaatgcacctgctgttctttctaaagtaaggagccttgttgagaacggaaagtaccctgaagccacatctgctgcatatgatctatctggtgaccaaacacaggtctttcaacctcttggggatattgatctggtctttggtgaggacatcaagtacacaaattacagacgagagctagatcttcacactgcaacagtcaccgtcacatatactgttggggatatagtctacacaagggaacatttctcctcaaacccacatcaagtcattgtgactaagatctctgcaaataaaccaggaaatgtctctttcacagtgtctttaactagtccactagaccacaagattcgtgtaacacatgcaaatgaaataatcatggagggtagctgtccaggccaaaggcctgaagagatcaagactgctgctgatcaacctattggaattaaattttctgcgattctttatctgcagataaatggtgccaatagcacagtggaagtattgaatgataacatgctgaaacttgattgtgccgactctgttgttttacttcttgcagccaccacttcatttcaaagtgcattcatcaaaccttcagaatctaaactggatccaacagtgtctgcttttacgacattaagtattgctaggagaacgtcatattcacaactaaaagcctaccacattgatgattaccagactcttttccagcgtgtttccttgcaactatcacaaggctctaattatgatcttcggaggagtaggctagttcagtcagcagagactagttctcagggtgctaatgtatcggattatggttttcaaatatctggctgcaccagattgacatcccttaatagttttgtgaagcctacggtagaaagaattgtaactttcaaagacaatgaagacccttctcttgtggaacttctgtttcagtttggtcgttatctactcatttcgtgctcaaggcctggaacccaaatttccaatctacaagggatatggagcaatgacacttcaccaccatgggatgcagcaccccatccaaatataaatctacaaatgaattattggcctgcgcttccttgtaatcttagcgagtgccaagaaccactgtttgactttattggttccctctcaatcaatggagctaagactgcaaaagtgaattatgaggctagtggttgggtcagtcatcaagtcacagacttatgggcaaaaacatcaccagatgctggtgatcctgtatgggctctatggccaatggcattttttagagaaaacagcgtatccactattggaaggatcagctaggtttttgttggattggttaattgaaggacacaggggatatttggagaccaatccttctacatctccagaacattattttattgctccagatggtaaggaggcctgtgtgagctactcaacaactatggacatctcaattataagggaagttttctcagctcttatattgtctgctgacattttaggtaaatccgacactaatgtggtgcagagaataaaaaaagcactgccaaatctcccaccaatgaaagttgctagagatggcacaatcatggagtgggcacaagactttcaggatcctgagattcatcacagacatgtgtctcacttgtttggtctttatcctggacatactatgtcacttgaggaaacacctgacctctgcagagctgttgccaatagtctttataaaagaggtgacgaaggcccaggctggtctacttcatggaaaatggtcctatgggctcgccttcacaacagtgaccatgcatacaaaatgatactgcagctaatcactttggtggatccagaacatgaggtttcaagagaaggaggcctatacagcaatctgttcactgcacatccacctttccaaattgatgcaaattttgggttcccagctgcgttgtcggaaatgctggtacagagcactgggaccgacttgtaccttctccctgctctgccccgcaacaagtggcctcaaggctacgttaaaggtctgaaggcccgaggtggtgttactgtaaacatcagctggaaggaagggagcctccatgaagctctgctatggtctagcggcgggcagaataccctttcaaggctgcactacggggaccagattgccaccgtcagcctatcatcgggtcaagtttacaggttcagcatggatttgaagtgcttgaagacttggcccctgtgatagcacacatttgctgaaatgaaagatacgattgattgtgcaaaaattcatgaaaacttctggctggcaagaaaataatcgatttcatacatcaatcataacacgtatcatatttcttatttactgtgtatgtttagttacatttcactgtatacatgtttactcgttgcccgtgccaagtgctatacagtgcacgactgcatgtgcattctgttaacatttttttagatgggaacatatcgaatgcaaaccacgttttggtgtaaacttcgtcctactaaaaaaagtttcaaaaaattctgaaaaaacatgaatgtacatctcagcttaacttatctatatacaaactttcatggtaaaatttatcttactctagcagttaaaaaaacaaa

SEQ ID NO: 2587 - DNA, 1987 bp, Zea Mays
tcacttgcatctaggcttctagctgtactcctcggccggtcggtcccacccatggacagtgacaatgattgcggctccgacgccggcgccgagtgggtctgggtacgccgtccgtcggaggttgaggccgctgccgcggcggccggatggctggcggatgaagaggcgcggccgctcaaggtggtcttcggctccccggctaagtacttcaccgacgcagcgccgatcgggaacggccgcctaggcgccatggtctggggctgcgtcgaatctgagaggctccagcttaaccatgacactctatggacaggtggacctggtaattatacaaatcccaatgcacctgctgttctttctaaagtaaggagccttgttgagaacggaaagtaccctgaagccacatctgctgcatatgatctatctggtgaccaaacacagtttggtcgttatctactcatttcgtgctcaaggcctggaacccaaatttccaatctacaagggatatggagcaatgacacttcaccaccatgggatgcagcaccccatccaaatataaatctacaaatgaattattggcctgcgcttccttgtaatcttagcgagtgccaagaaccactgtttgactttattggttccctctcaatcaatggagctaagactgcaaaagtgaattatgaggctagtggttgggtcagtcatcaagtcacagacttatgggcaaaaacatcaccagatgctggtgatcctgtatgggctctatggccaatgggtgggccttggcttgcaactcatctctgggagcattactgttttactttggacaaacattttttagagaaaacagcgtatccactattggaaggatcagctaggtttttgttggattggttaattgaaggacacaggggatatttggagaccaatccttctacatctccagaacattattttattgctccagatggtaaggaggcctgtgtgagctactcaacaactatggacatctcaattataagggaagttttctcagctcttatattgtctgctgacattttaggtaaatccgacactaatgtggtgcagagaataaaaaaagcactgccaaatctcccaccaatgaaagttgctagagatggcacaatcatggagtgggcacaagactttcaggatcctgagattcatcacagacatgtgtctcacttgtttggtctttatcctggacatactatgtcacttgaggaaacacctgacctctgcagagctgttgccaatagtctttataaaagaggttcccagctgcgttgtcggaaatgctggtacagagcactgggaccgacttgtaccttctccctgctctgccccgcaacaagtggcctcaaggctacgttaaaggtctgaaggcccgaggtggtgttactgtaaacatcagctggaaggaagggagcctccatgaagctctgctatggtctagcggcgggcagaataccctttcaaggctgcactacggggaccagattgccaccgtcagcctatcatcgggtcaagtttacaggttcagcatggatttgaagtgcttgaagacttggcccctgtgatagcacacatttgctgaaatgaaagatacgattgattgtgcaaaaattcatgaaaacttctggctggcaagaaaataatcgatttcatacatcaatcataacacgtatcatatttcttatttactgtgtatgtttagttacatttcactgtatacatgtttactcgttgcccgtgccaagtgctatacagtgcacgactgcatgtgcattctgttaacatttttttagatgggaacatatcgaatgcaaaccacgttttggtgtaaacttcgtcctactaaaaaaagtttcaaaaaattctgaaaaaacatgaatgtacatctcagcttaacttatctatatacaaactttcatggtaaaatttatcttactctagcagttaaaaaaacaaa
